United States Patent Application Publication US 2026/0062700 A1 - sequence listing, part 3

SEQ ID NO: 6485 - protein, 556 aa, unidentified
  source 1..556: note = Related to NZ_JAHPZK010000060.1; note = Paludisphaera sp.
MSIWQRFLQFIFGERSFRPAEPPPTFSPAVPPSLAERPTTAEAPRLTIPEASADPDFAADAGTHKDGQPKLAGKAVDPLDAGAYLPISREEIKREAKGKNLFNNFAFGNRSIIPPADDLRTKLIDRAMVTHGLLSPEQLHEIHAVGARMDELRPTMAAVEHKAAKAGEAAVEADREARARLKAQKKAEAIERKRLRAEGIAYRRATDIVFLGRGVSGRLGDRTCDASKLEAADLPVIATPTELAAALGVSVPRLRWLAFHNEAATRVHYVQFTVPKKSGGTRTLSAPHRSLAEAQDWIFREILARLPVEPPAHGFVTGRSILTNASPHCGKRIVVNMDLEGFFPSIGFARVRSVFQRLGYSPAAATILGLLCTESPRRSVVYDGVAYHVATGPRGLPQGASTSPALSNQVARRLDRRLSGLSTRLGLAYTRYADDLTFSGDEAFEGRVGYLMARVRHFAAEEGFAVNEAKSRILRQGTAQTVTGLVVNDRPGVRREEVRRLRAILHRARTEGLEAQNREGRPDFLAWLRGKIAFVAMARPETGALLKAELEALLAG

SEQ ID NO: 6486 - protein, 511 aa, unidentified
  source 1..511: note = Related to NZ_JAALJI010000068.1; note = Paludisphaera sp.
MAAPPPTPEASTDPYFSARTDPTKEASPKKVDPLDAGDYLPITREEIKEEAKGKNLFNSFAFGLRSVIPPADDLRTKLIDRALVTHGLLSPEQLREIHDVGARMEAMKPTMAAVEHRAARAGEAAVAADREARARLKAQMKAESAERKRIRDEAISQRKATDILFLGRGVSSRLGDRTGDASKLAEAGLPVVSTPAELAAALGISVPKLRWLAFHNEAATRVHYVQFTVPKKSGGTRTLSAPHRSLAEAQGWILREVLAKLPVEPTAHGFVTGRSILTNASPHCRKRLVVNMDLEGFFPSIGFRRVRSVFGRLGYSPAVATILALLCTECPRRSVVYAGETYHVATGPRGLPQGACTSPALSNQVTRRLDRRLGGLASRLGLTYSRYADDLTFSGDEVLEGRVGYLMARVRHLAGDEGFAVNEAKSRVLRRGTAQTVTGLVVNDRPGVRRTEVRRLRAILHRARSEGLAAQNREGHPDFLAWLRGKIAFVAMARPDVGAALRAELESLLVR

SEQ ID NO: 6487 - protein, 645 aa, unidentified
  source 1..645: note = Related to CP003364.1; note = Singulisphaera acidiphila
MLRRSAVVDSAPETASPRVLFFWPGAVAVRRAESTVVPGVRLQPRASVNTLGRRFEVGQRPVPVLPTPNPSAGDMNLFHRLLRFLFGYEPPARSASQPRPTPAPAPAPEPPTTPDAIAATLTEAFGKTAETTAPALLPDATADPYFAVTADVQSTATNQGKGNGKSSLGLEANAYLPISREEIKKTAKGIDRFGNPWFGRRDLIPPTDDPRTNLIDRAMVTQGLLSPTQLHEIHDVGARMDQIRPSLAAIESRAAVDGAAAVAADREARVLLKARKKAEAAQRKQERIDQVAHRKATDIVFLGRGVSAGLNDRQSDLDALTGAGLPLLSTPADLAAALSLSISKLRWLAFHTEAATRTHYVQFTVPKKSGGLRTLSAPHRTLAEAQRWIFQEIVAKLPVESAAHGFVAGRSIVSNAEAHCRRAVVVNMDLEAFFPSIGFPRVRRVFRKLGYSPAVATILALLTTECPRRTVVYGGTTYHVATGPRGLPQGACTSPGLSNQVAIRLDRRLSGLARKFDLSYTRYADDLTLSGDATLEAKVGYLMARLRHIAGEEGFAVNEAKSRVLRQATAQTVTGLVVNDRPGVRRAEVRRLRAILHRAKSEGLASQNRDGHPNFLAWLHGKIAFVAMARPELGAALRAELDSLL

SEQ ID NO: 6488 - protein, 524 aa, unidentified
  source 1..524: note = Related to JAIEMG010000080.1; note = Gemmataceae bacterium
MGFFSRLIERLFGKTDTGVIVPKQAAPGATAGAAPQAAPPLARPLNLSADNFLPIARDELKEAAKDVTRWGPWFGRRDVIPPADDPRTRLIDRGMVANGLLTQEQLVEIHQVGAEMERLRPLQFGVSNLAAQAGESAVQAERARRTEIKKQKKAEAADRKKRRAEAIVQRHATDIVFLGRGVSARLGERTSDGEKLKSLDLPMLQTPAELASALGIGVPRLRWLAFHAEVARRVHYVGFTVPKKSGGTRTLSAPHRSLAAAQEWILRNILDRLPVEASAHGFVIGRGTLTNANLHVGRAILVNMDLQDFFPSIGFPRVRSVFQRLGYSPAVATVLALLCTECPRRPVEYDGQSYHVAIGPRGLPQGACTSPALSNQVARRLDRRLHGLALTLGVTYTRYADDLTFSGAAEFNARVGYLMARIRHIAEDECFAVNARKSRVLRRNTAQRVTGLVVNDKPGIGRQEVRRLRAILHRAAKEGLEQQNREGRPNFTAWLHGKIAYVSMVRPDLGARFQAQLHAILQGK

SEQ ID NO: 6489 - protein, 645 aa, unidentified
  source 1..645: note = Related to JAJKFQ010000002.1; note = Stieleria sp.
MADKATTEKFELYVVDLVKSGQTFTASDVVIGARARGIDVRHNESRDIIHDLHRRGVLGPAYSRTTVPLTDSTRPFVYHPTNINPSEYRSSFTDVSSSLRSGHRSQPKRGFLGRLIQSLFGGGDDESKSGRKQRSGDQPAPADLSSNPSVPPKSSRRMPQRRKNVTLDLDAKSFLPIDRDELLSSAKKVNLWASPWFGRRDLIPPLDDPRTNLIDRGMVAEGLLTSDELRRIHEVGAEMDFYRPDDLLLRHQAQRSASGAIEAQRQASAERKALKKAEAAERRQQREKEIQYRRANQIDYLGRRVSTQLHLCQSDADKLQAVNLPVLHTTKDLADAMGIEISRLRWLAFHEDVASRIHYVSFSIPKRSGGTRTLSAPLPRLAAAQRWIYAQILRDLPVGDCVHGFVPGRGIVSGAQPHIGQEVLLNMDLEDFFPTIGFARVRHAFHWLGYSPAVSTVLALLCTEAPRREVSYQGTAYQVATGPRVLPQGACTSPAISNLVTERLDRRVIGFANKFGLTYTRYADDMTLSGGTDFAGQIGYAIAKIRHIAEEEGFRVKTSKTRVLRRNAAQRVTSLVVNDKAGVGRRKLRQVRAILHNASKTGLQAQNRDNHPNYRASLEGMIAYIAMTRPDQAATMRAKLDAIAD

SEQ ID NO: 6490 - protein, 547 aa, unidentified
  source 1..547: note = Related to PPHI01000001.1; note = Rhodopirellula baltica
MSMADKATTEAVERFVIELVNCDEAFTAADVTLGARAAGIQVHYSDSRNILHDLHRRGILGTSYQRSSVQLTDGTKPFVYHPVGFTANHYRSNQSSLMASDHPDQVSQPKPGLLARLKQFLLGRGDSDRSDSSKDARSLANQAPATQATRAAQRKNVTLNLNAPSLLPISRKELLAGAKSINLWSSPWFGRRDVIPPIDDPRTLLIDRAMITAGLITPEELARIHEVGAQMDRYRPDELLMRHQANRAGRDAVAEDRRAKAERKAAKKAESEAKRQRRREEIEIRRATRIDFLGRRVSTKLHLCESDEERLNAAGLPILHTTTELADAMGIQLSQLRWLAFHDDVASSTHYVEFDIPKRAGGVRRLSAPLPRLAEAQRWIYSQILRGMPVDDCVHGFVPGRGTATGAAPHVGQDVILNMDLEDFFPSIGFARIRHTFERLGYSPAVSTVLGLICTEAPRRKVSFQGATYYVATGQRVLPQGACTSPALSNLVAGKLDRRILGFAKCIGATYTRYADDLTLSGGQDLANRIGYTIARFVISARTKASG

SEQ ID NO: 6491 - protein, 544 aa, unidentified
  source 1..544: note = Related to NZ_VSZO01000001.1; note = Proposed Roseiconus lacunae
MADQSPNQASNQQPASPNPKLGWLGRIFRSLFGGPTRRPDRSSDSFAAMAQQPRPLPPRRREKVTLDLDAKAFLPIDRDELLSDAKQINLWASPWFGRRDLIPPADDPRTSLIDRGMVTEGLLTPDELTRIHEVGAEMDYYRPAELFLRHQARQAGRDAVELDRQTRAERKARKQAEAEAKRIRRRERVERRFATQIDFLGRGVSTQLHLCESDVDRLKEAGLPVIQTTTELADAMGIEIPRLRWLAFHSHVAERSHYISFRIPKKSGGTRTLSAPLPRLAAAQRWIYSQILRERPHPECVSGFVPGRSILTGAAPHVGSQTVLNLDLEDFFPSIGFARIRHAFQFIGYSPAVATVLALLCSEAPRRKVRFNGGEYYVATGPRVLPQGACTSPALSNLIAAKLDRRISGLASKLGATYTRYADDLTLSGDRDFDDKAAFAMACVRHIAEDEGFRVKLSKTRVLRQNAAQRVTGLVVNDKAGVGRKKLRLIRAILHNAEKTGLNAQNRDHHPNFRASLEGTIAFVAMSNPERAAKLRRQLDAVPD

SEQ ID NO: 6492 - protein, 653 aa, unidentified
  source 1..653: note = Related to DNWZ01000159.1; note = Planctomycetaceae bacterium
MADSNAQKIVTDITRRRAAAGESFSAFDITTEARSQGAFIRHGEARDLVQALFQNGSMGADYRRTVLDLGGGARPFVYHRFDADLTTYRSTASGAAPVSPPANRPGQATPPAVGQGSTSGRSGGLIRRVWNFLGGGTTSDAGNPTTDDATHSGSKTPSPANPDNPKTTGTIRKVLNLTASAFLPIQRDDLIRQASGLSLWSNIWFGRRDMIPPVNDPRTLLIDRGMLSAGMLSAEELAEMHRIGDLYAKHSGEVTRIRSEGALAGQAAVDADRQARAEAKAKKKAEAAERKAKRRAEIEHRRANDILFLGRGVSQGLADRTSDLAKLEKLELPLASTPAELAAVMGTTVSNLRWLAFHADVATRTHYVSFEIAKRSGGVRKLSAPHVRLAAAQRWIYSSILRGVKVHDAAHGFVPERSIVTSAKLHVGQAVLINADLENFFPSIHWTRIRKVFRCLGYSPAVATILALICTECPRREVVYDGQTYYVATGPRGLPQGACTSPALSNLVAMRLDRRLSGLATKFDIRYTRYADDITLSGGDELGRRLGYVMARLRHITADEGFAINEKKTRVQRRHQAQVVTGLIVNDRVSVTRKELRRLRSILHHAATEGLDSQNKHHHPNFRAYMSGMIAYVAATRPALAREMKKQLSQVRS

SEQ ID NO: 6493 - protein, 643 aa, unidentified
  source 1..643: note = Related to NZ_SJPM01000010.1; note = Rhodopirellula pilleata
MDNNARQIVTTITRRRAAAGESFTAFDITTEARGQGAFVPHGEARDLVQALFQGGEMGAAYRRTVIDLGGGARPFVYHRFDVDARTYQTPSGSRPIVPTPTPAAPVPNAPTADTSSSSPPTNQGGLIRRVMNFLGGSARSDVAANNPSASTFGGAAAPPSRRKTLNLDASAFLPITRDEMMRESRTSLFWSGAWFGRLDLIPPTTDRRTLLIDRGMMSAGLLSAEQLAEIHRIGELYSKYAKDLQVIQHAGQVAGQAAVDADRKARAEARQKKKAEAQEKREKRRAEIEHRKRNDIVFLGRRVSGGLADRESDVGKLRSLELPVLSTPAELAAAMDLAISDLRWLAYHADVATRSHYVSFDIQKKSGGLRRLSAPHKRLKAAQSWILENVLGSAVVHDAAHGFVPGRSTITGAKEHIGQAIVLNADLENFFPSIHWTRVRKVFQTLGYSPAVATILALVCTECPRREVQFNGQAMYVATGPRGLPQGACTSPMLSNMVALRLDRRLAGLANKFEMKYTRYADDLTLSGGDELGRRLGYVMARLRHIAVDEGFAINESKTRVQRRHQAQSVTGLIVNDRVSVSRSELRRLRAILHSAKSQGLESQNRDDHPDYRGYLTGLLAYVAATRPALAAEMKRELDSIRN

SEQ ID NO: 6494 - protein, 644 aa, unidentified
  source 1..644: note = Related to JAGQQE010000043.1; note = Planctomycetaceae bacterium
MADAQTNNAVQQAVLDFVRSMTMFTAYDVTLAVRNQGVVARHGEVRDVVHSMFQDGILGAAWQRTAVDIGTDTRPLVYHHFNQDPRTYKSPSTGSAAKPATNSGQSGSPSPGSAASGSGKGFFQRIVGAFFGQGSSPVTPSNHPASGGAQVPSQPLRTPKQRPPITIDLDASAYLPISRSDLLSEAKKTNLWGSPWFGRRDLIPPVEDDRTKLIDRAMLTQGLLTPEQLTEIHRVGAEMDKYRPDQLLINQKSQKAGQAAVDEERQSKAALKKQKKEEAALRKQLHRQAVADRKANDIVFLGRGVSSRLGDRTSDDTKLQAAGLPVMSTPSDLANALSITVPQLRWLAFHSDVASRTHYVNFTIPRKSGGVRILSAPHQRIAAVQQWILAEVVSRLPVEGCAHGFVPNRSILTNARPHVGQQVVLNMDLENFFPGITYPRVRKMFQTIGYSGSVATILALLCTECPRRTVTWSGEVFHVACGPRGLPQGACTSPAISNQVVKRLDRRLQGLARKHNLVFTRYADDLTFSGGSDFDTNVAWVMACVRHIAEDEGLVVNEKKNRVLRRNTAQIVTGLVVNDKPSVSRKKLRQIRAILHRAQQEGLESQNRDGHPNFRAYLDGYISFISMTRPEIAARLKEQLANVS

SEQ ID NO: 6495 - protein, 646 aa, unidentified
  source 1..646: note = Related to NZ_SJPW01000002.1; note = Rubripirellula tenax
MTDSTTRQVVSQLVLNQVAAGAMFTAYDITLQARGRGMQLRHGEGRDLVHELFNTGRMGTDYTRTVVDLGTDANPMVYHRRGDSPRTYQSGSTGATAASAPPGALPTQPFPPAAAPPANTPGLIGRLVKGLFGGGKDQPIVGRVVGDGGNAASGDDVGALALRPPASLDLDASDFLPISRDDLMSAAKTTTLWGNPWFGRRDIIPPIGDPRTKLIDRAMVARGILTPDQLAEIHRIGADMDHYRPTQILIESQAHSAGRSAIEVDDKRKAEEKAKKKAEAKERKEKRQSDIAERKATDIVFLGRGVSGQLHLRDSDAEKLAAADLPILSTPAELASALGLTISKLRWLAFHNDVATRTHYVRFEIPKRSGGTRQLSSPHKLLAEKQRWILKEILNKLPVEDSAHGFVRDRDILTNAIPHVGKDVVLNMDLENFFPSIGFPRVRQVFKGLGYSPAVATILALLCTESPRRAVTYAGQPYLVASGPRGLPQGACTSPAISNQVAKRLDRRVQGLATKFGVAFTRYADDMTVSGGAEMTTRIGYMMAKLRHIAEDEGFVINRSKTRVLRRNTAQIVTGLVVNDKPTVSRTQLRRIRAILHHAHHDGLSAQNREQHANFRAWMQGMIAFVAMTRPELAKDFLAQLQSVRD

SEQ ID NO: 6496 - protein, 522 aa, unidentified
  source 1..522: note = Related to JAEUIP010000375.1; note = Planctomycetaceae bacterium
MANGMLQQLIARMGRIFGSIFCSYKRSPGTQSRATTAPAQGQAVRPASRPEAPPLPPRANKTLDLAASQFLPISRSELLVAAKGTRLWGNVWFGRRDLIPPADDARTLLVDRGMVTEGLITPEELAEIHRVGAEMDLHRPAQAAIQHQTQKAGQAAIDELRAEKARIKAEKKVESAARKAARQSAIDQRRANDIVFLGRRVSGKLGHRESDPQRLQQLNLPVLQTPADVAVALQISISQLRWLAFHAEVAERTHYVYFDVPKKTGGFRRLSSPHAKLAAVQRWILEQVLNKLPTQPAAHGFIAGRNILSNAMPHVNQSVLINMDLENFFPNITFPRVREMFARLGYSGAVSTVLALLCTECPRRAVIFHGATYQVATGPRGLPQGACTSPAISNQVAVKLDRRLQGLASKMELNYTRYADDLTLSGGDALRERVGYVMARVRHFAEEEGFRVNNQKSRVQRRNSAQIVTGLVVNERPTVSREKIRRIRAILHRAQTEGLEAQNRQNHPYFRAWLEGYIAFIA

SEQ ID NO: 6497 - protein, 514 aa, unidentified
  source 1..514: note = Related to DNMF01000374.1; note = Planctomycetaceae bacterium
MDVVSLPDHRPGRSPVSSVDTSKSRRSAPPAPFSFLPKIKSERNFLDLRGAADLWDRGCVVGFWGRLLRLILGQNAGSGLTEQLQASGTAKSRNRSSVFFPAQSLQAPQLLPPASVAETVVGPVGAEGSRIRSTLSVVARREAQQRARDNERRRLREIRRTDRLSRDITYLGRGVSGWLNERISDVARLQSAGLPVLSGPADVAKALGISLQSLRGLAFHAEVTRLTNYLRFTVPKRSGGQRELSVPHRRLAAAQRWILRTILDRLIVSEQAHGFVSGRGVLTNAQQHCGQAVLLNLDVQNFFPSISFARVRRVFMAAGYSKCVATILALVCTECPRREVVFEGRRLWVATGIRGLPQGACTSPALSNLVCLRLDRRLQGLAMKLGLVYSRYADDLTFSGGADLRQRAGAVLKSVGAILGSEGLQVHPWKTRVQPRSTAQVVTGLVVNDRPGVCRREVRRVRAILHRAATEGLERQNRDGHPNFVAWLNGRIGWIGQSRPELGRKLMEELRGLR

SEQ ID NO: 6498 - protein, 468 aa, unidentified
  source 1..468: note = Related to DQCF01000782.1; note = Planctomycetaceae bacterium
MATGFWGRILRALLKSDDSDQSASAASPNVTAADSVVGESTVAAAAGLTRRAFEAPHLLPVGKQSESAGSGRQTQSDDASGSSSGRTSLAVAARREARRRARENERLRLQAIRRTDRLNRDITYLGQGVSGWLNERVSDEERLRQSGLPVLATPADVARALGISLRSLRGLAFHAEVTRLNNYVRFTIPKRSGGVRVLQAPQRRLAAVQQWILREILDRLPVSAQAQGFVRGRSVVTNAALHCGQAVVLNLDVQEFFPSIPFARVRRVFISAGYSKCVATILALVCTECPRQELTFEGRRLWVASGPRGLPQGACTSPALSNLVCLRLDRRLQGLSARLGLVYSRYADDLTFSGPAELRQRVGAVLKSVTGILQAEGLQVHPGKTRVQPRSTAQLVTGLVVNDRPGVRRDEVRRIRAILHRAAREGLQAQNREGHPNFRAWLCGRIGWIGQSRPELGQQFLQQLNALQ

SEQ ID NO: 6499 - protein, 539 aa, unidentified
  source 1..539: note = Related to JAEUII010000041.1; note = Planctomycetaceae bacterium
MSTQDSRGFFGWLRRLLFGDPIPAPKQAAASAATSTHGTAKPVTTAQNPAQQQNAPSLKAGLDASSFLPITRDEIISSTRTRWLWSGAFWGRRDLIPPVSDTRTKLIDRGMLTQGMLTAEQLAEIHRVGLEMDAVRPSMTLIRSEAEKAGAEAVVASREERKKIKAQKKEEAARRKEQRARDIAARFATDITYLGRRVSGRLNDRTSDVAKLEAAALPVLQTPADVAGALGLTIPQLRGLAFHSEVTSRSHYIQFSIPKKSGGVRLLSAPHRRLANCQRWIHTQILSKLEVAAQAHGFVVARSTVTNATPHCGKAVVFNTDLEGFFPSITFPRVRKVFQRLGYSPAVATILALLCTECPRRTVEFGGQTLFVATGPRALPQGACTSPALSNQAALRLDRRFQGLATRMGLTYTRYADDITFSGNEELKSRTGYLMARIRHVVQDEGFRVNEAKTRVQRQSTAQSVTGLIVNERPGVLRSKVRRLRAILHQAKSSGLEAQNRDKHPNFRAWVEGMIAYIAMSRPDTAEVLRQQYAQIRET

SEQ ID NO: 6500 - protein, 537 aa, unidentified
  source 1..537: note = Related to JADZDL010000180.1; note = Planctomycetes bacterium
MLFGGSPRPRPAARTPARPAPGRAASPGGSQPTVQPTVSSASPPRPSGLGKRLQAPDLTPLAGSELKRSLRQRGQSSWSIFGGASWWGRRDLVPPSTDERTNLIDRGMIGRGLTSADEVAELHRVGDEMLQRDPRRDGGAAAGEIAVQKDRAERAQQKQQKREAAAQRRAERAAAVAARRANDIIFLGRGVSKGLADRTGDATRLVGAGLPVLATPADVATALELPIPRLRWLAFHADATAQPHYVRFSVPKRSGGTRDLAAPMPRLKATQDWILANLLAKVPTHAAAHGFVPGRSTVSNAVPHLQALAVINCDLKDFFPTIHVHRVRGCFEELGYSPAAATILALLCTEAPRRLVEYAGRPLHVATGLRCLPQGAPTSPALSNLIARRLDARCLGIARKLGFTYSRYADDLSFSTHEPAALARIGYLLARIRHIARDEGFAVNEKKTRVLRPSSSQRVTGIVVNGAEPRIPRATVRRLRAILHQAEKTGLEAQNRDGHPDFANYLAGMLAWVRMVSPQQAEPLLAAWRRVRRSAAD

SEQ ID NO: 6501 - protein, 536 aa, unidentified
  source 1..536: note = Related to JAEUHU010000483.1; note = Planctomycetes bacterium
MQLLFGAPPRPRPAARPPARPAPAAPNAAAPTSARPEPRPAPPRPADVGHRLEAPNLTPLAASELKRSLRQRGQSSWAIFGGASWWGRRDLVPPSTDERTNLIDRGMVGRGLTTVDELAAMHRVGDEMLRLDPRRDGGAAAGEAAVQADRAERARVKQQKKEEAARRRAERAAAVAARRANDIGFLGRGVSKGLADRSADAARLGGAGLPVLATPADVAAALQLPIPQLRWLAFHAEATERPHYVRFTVPKRSGGTRDLAAPMPRLRATQDWILANVLAKVPTHAAAHGFVPGRSTVSNAAPHLRPLAVVNCDLQDFFPTIHVHRVRGCLEELGYSSAAATILALLCTEAPRRLVEYAGRPLHVATGPRCLPQGAPTSPALSNLIARRLDARCLGIARKLGFTYTRYADDLTFSTTDPEALARIGYLLARIRHIAQDEGFALNEKKTRVLRPSCSQRVTGIVVNGDQPRIPRATVRRLRAILHQAEKTGLEAQNRDGHPDFANHVAGMLAWVRMVSPQQAEPLVAAWRRARRNDAG

SEQ ID NO: 6502 - protein, 576 aa, unidentified
  source 1..576: note = Related to CADCUQ010000908.1; note = Phycisphaerae bacterium
MPLAVGGVGMGWFDWLKPRKTPDEGPPAPSPGLTHGDLSGLVAQPGPPTPGTVPTDPRVVTTRVPTTQEPATPTVASAGTPASASRAARRSPSSPPPESLDYDLGPFAPISQSDLRAQAGKLTNAWRTLYLFGRTSRIPPANDPRTNLIDRAMVSGGLLTPEELAEIHAVGEAYDRARPDLQVELAKAELSAVLPEQERAERKARKRAEAAERKRLRAEAVAERRATDVVFLGRGVSTQLHDRTSDAEALAKLGLPVLSTPADVAAALSVTIPQLRWLAFHSEASTVSHYVRFEVPKRSGGTRQLAAPQPHLAAAQAWVLANVLSRVPPHDAAHGFVPGRSTVTNAAPHVGRAVVVGADLTDFFPTVTFARVRGVFRQLGYSPAVATVLALLCTESPRRTVTYANRPFHVATGPRALPQGACTSPALSNLAARRLDSRLSGIGRKLGFAYTRYADDLTFSGGAEQLAKVGYLLARLRHIAQDEGFAVNEKKTRVLRQSASQQVTGVVVNQRPGVPRDVVRRLRAILHRAQFEGLPAQNRENHPHFEAWVRGMVAYVQMVNPDQARPLREALDALPG

SEQ ID NO: 6503 - protein, 598 aa, unidentified
  source 1..598: note = Related to NZ_CP063458.1; note = Proposed Humisphaera borealis
MGLLNWIKKLVSGKSPGRPSGGQSASDLAREFGQTIDPGLLAGQGSQPPVNQPPTVPPQRPTVVKVPANWISTGQAPSSATNTPNSAAASTIPYASLALRAAVPPAPANRLSPSPAESFDYDLGPFAPISADDLRTGADRLKNNWNNLWLFGRSNRIPPADDPRTKLIDRAMITEGLLTPQELAEIHAVGQAYDAARPDLQVELAKAQVAVTLPEQERAERKARKQAEAAERKRKHAEAVALRKQADIIFLGRGVSNQLHDRVSDVAKLTAIGLPALSTPADVAAAMDLPVSRLRWLAYHSDAATVSHYVRFTVPKRSGGTRQLAAPHDSLAETQQWILANVLSRVPTHDAAHGFVPGRSTVTNAMPHVGKPLVINCDLRDFFPTISFGRVRGIFKQLGYSPAVATIFALLCTESPRQEVVYAGKTFHVATGPRALPQGACTSPAVSNLASRRLDSRLAGICRKLGFTYTRYADDLTFSGDAALNDKVGYLLARVRHIADDEGFAVNEKKTRVQRPHVAQKVTGIVVNDRAGVPRDVVRRLRAILHKAGKEGLAAQNRENIPHFEAWLRGMIAYVHMVNPKQAKPLAEAMGRIAPTTT

SEQ ID NO: 6504 - protein, 518 aa, unidentified
  source 1..518: note = Related to JACQZM010000063.1; note = Candidatus Riflebacteria bacterium
MGFFDWLIELLVGGPSTDRFSSPQPPPRRPPGARQSRRLDLDIEQFTPLSDSEVKKQARTLGRAWSNPWFGRRDLIPPPEDPRTLLIDRAMVGHGLLTPEELVRIHEIGLEMDKVRPDLAMAKVEAQAAVARTVEERRARKLARQQESARLKKLGAEAVAQRRATDIVYLGPGVSRGLADRRSNVEKLAAASLPVLASPADVAQALGLAVPRLRWLAFHSDAASRLHYVRFTVPKKSGGTRELSSPHRALAAAQRWVLTSVLDKVPTLPAAHGFVKGRSTVTNASVHVNRAVVVNLDLVDFFPSITFPRVRGVFQRLGYSPAAATVLALLATEAPRRTVAYAGKTFHVATGPRALPQGACTSPALSNLVARGLDARLSGIAAKLGFAYTRYADDLTFSGPDEVQNLVGYLMARVRHIAGDEGFAVNEAKTRVQRRNTAQQVTGIVVNQRPNVPRTEVRRLRAILHRAATEGLAAQNRQNHPRFAEWVQGMVAYISMVNPAQGKPLAEALARLDAKKGP

SEQ ID NO: 6505 - protein, 518 aa, unidentified
  source 1..518: note = Related to JACPRC010000003.1; note = Planctomycetes bacterium
MGFFDFLRRLFGGGEAGDPPPPLAFPAKALPPKPAPPLPPKKRAPPTSYEADFLPISDKELHAKAATEEVRTSPWWGRTDTIPPADDARTKLIDRALVTRGYLTPEQLEEIHQVGDLMLLKKGDEAMVRQEAKRAVERRKEERAARKAEMKRLAEERRRAHAAEVASRRATDILFLGRDVSGGLADRRSDVEKLRTAGLPILASPAEVAAAMGLTIPQLRGMAFHIDAATVTHYVTFRIPKKSGGMRDISAPKPRLATAQRWLLENVLSKIPVEPPAHGFLTGRSTVTNAAPHVRRAVVVNMDLKDFFPSITFPRVRGIFEKMGYSPAASTIFALLTTEAPRRVAEYEGKRYYVAIGPRGLPQGACSSPALSNLAAGRLDRRLGGLAAKLGWTYTRYADDLTFSGDTIIPKGTKDPKSVAWLLARTRHIISEESFEVNEKKLRVQRRNTAQVVTGIVVNDKPAVPRAERRRLRAALHRARFVGLKEPARVRGEVAYVSMVNAEHGGRLKVRLDALLKR

SEQ ID NO: 6506 - protein, 498 aa, unidentified
  source 1..498: note = Related to JACQFK010000217.1; note = Planctomycetes bacterium
MGFFDWLRNLLFGGMPQKKAVIVRPAQPVFPLRPAPARLPAAAPKAPPPAPRPTADYAAEDFAPISDKELRQKSKSSEVATSPWWGRTDTIPPGDDARTKLIDRALVTRGYLTPEQLAEIHRVGDLMLLKKGDEAILRVQAQAAVARSKEERAALKAEKKRQAEERKKAHAEAVARRKAADIIFLGRGVSGGLAGRTSDEGKLRKFGLPSLATPDQVAAALSIPILRLRWLAFHSEASTVSHYVRFQIPKKSGGLRDIWAPQPKLAAAQAWILENILSKVPAGPVAHGFVPGRSTVTNAAPHVKRTIVVNVDLRDFFPTITFPRVRGLFESLGYSPAVATVFALLCTEAPRREVEYSGRKYFVATGPRALPQGACTSPALSNLAAWTLDRRLGGVAAKLGWTYTRYADDLTFSGDTLVPKGEKNPKSVGWLLARTRHLCEAEGFEVNEKKVRVQRRNAAQTVTGIVVNEKPSTSRAERRKLRAILHHARFEGIEKQNR

SEQ ID NO: 6507 - protein, 536 aa, unidentified
  source 1..536: note = Related to JAGQQS010000445.1; note = Planctomycetaceae bacterium
MLLRLLRFFFGLVRPKSSAERGTHPGALPSSLTGRDLTPPRTVQSATASNPETGSSSPGPSGLNGLDTDKFAPSTVEEAWTATGRADWRSVFLDSRGAIPPSEVPRVQRIDRTMVGMGLISESELAEIHDIGDRMSQYQSDAAFVASSGESAVAQSREERRRQREEKQAAAEARRKQRREQIAQRRANDIVFLGRGVSRGLADRRSNIEQLQEQCLPVLSSPADLAQSMGMSISLLRWLTFHSDAPTRVHYVSFDVPKKSGGMRRLSAPHRKLAEAQHWVLTNILNLLPVHACAHGFVARHSVVTNAELHVGASVVINADLSNFFPAITFARVDGMFQKLGYSPAIATILALLCTECPRQPLQFGETMYYAATGPRSLPQGACTSPAISNQIAGKLDRRMSLLAEKLGWRYTRYADDLTWSVCGEAIPSIGYVLARIRHIVEDEGFELNHAKTRVQRRSQQQSVTGVVVNDRMNVPRPTIRRIRAILHNAKRTGLDAQNRNSHPHFRDWLTGMIGWVHMVNPEQGRRLMSALAELS

SEQ ID NO: 6508 - protein, 536 aa, unidentified
  source 1..536: note = Related to JACMKP010001266.1; note = Fuerstiella sp.
MLIRLLRFLFGWSKPAAPAEVASPREPAPSSLTGRDLSQPASVQSATVPKADSRAAAPPRSNLSGLDTDKFAPITVDEALAATAKADWKSAYFDSRGVIPHPSLPRVQVIDRTMVGMGLISEQELAEIHDIGDRMGQFRSDAEFIAIAGERAVVESREERQRRKELRKAEAEARRNLRREQVVQRRATDIVFLGRGVSRGLADRRSNVELLQNNGLPVLSSPAELAQAMGVSISLLRWLAFHSDAPTRVHYVSFDVPKKSGGIRRLSAPHRKLSVAHHWILTNILNLLPVHTCAHGFVAQHSVLTNAEPHVAASVVINADLSNFFPTITFSRVDGMFRKLGYSPAVATILALLCTECPRQALKFSDTIYYAATGPRALPQGACTSPAISNQIAAKLDRRMSAMASKLDWKYTRYADDLTWSTTGEVTPSVGYVLARMRHIVNDEGFELNHAKTRVQRRSQQQSVTGVVVNDRMSVPRQTIRQVRAILHNAKRTGLDGQNRDAQPHFRDWLTGMIGWIQMVNPEQGRKLRSELAELS

SEQ ID NO: 6509 - protein, 535 aa, unidentified
  source 1..535: note = Related to QWOO01000305.1; note = Planctomycetes bacterium
MLLRLLRFLFGISPPTAPRDVRSSLQERDLSGVPGSTKSTSGSSATSLTTGAGRSAPAGLSGLDTDRFRPQPGTDLTSLGRMTDWQFSAADTRNLIPSEESPQVRAIDRAMVGMGLITETELVRIHDIGRQMAPLLSAASFIQSAGASAVKESREERQRRKAEKKETARLKQIAHLEQVQHRKATDIVFLGRGVSRGLADRRANIEKLQDAGLPVMSSPSDVANAMGLTVSRLRWLAFHSEAPTRVHYVSFEIPKKSGGTRRLSAPHRQLAAAQHWILTRVLNLVPVHENAHGFITQRSVVTNAVPHVNSSIVINADLKDFFPSITLARVDGLFRSLGYSPAVATIFALLCTECPRQTVQMHGTTYFAATGPRALPQGACTSPAISNRITHKLDRRMSAMAAKLGYRYTRYADDITWSTSDESAVAVGYVLARIRHIAEDEGFELNHAKTRVQRRSQQQSVTGVVVNDQLGVARETVRTIRAILHNAERTGLASQNRNQHPQFESWLTGMIGWISMVNPEQGQKLRQHFDKVRGS

SEQ ID NO: 6510 - protein, 539 aa, unidentified
  source 1..539: note = Related to QWPK01000237.1; note = Planctomycetes bacterium
MLIRLLRFLIRLALPTPQPPRDTPSSLAGRDLSGQPGSASRTVSSVANTTVSSSGPAAPKGSSLSGLSTDKFAPMSVADALSATAAADWRSANFDSRSVIPPADLPRIQVIDRTMVGMGLISEQELAEIHDIGREMTQFQSDAAFIHQAGERAVAISREERQRLKEQKKAEAEQRRVLRRQQVAHRRATDIMFLGRGVSRGLADRRSNIEKLQAGGLPLLSSPADLANAMGLTISKLRWLAFHSDAPTRVHYVSFNIPKKSGGTRRLSAPHQQLAAAQHWILTNILNLIPVHQNAHGFVAQHSVVTNAAPHVGSSVVINADLKDFFPSITLARVDGLFRRIGYSPAIATILALLCTECPRDTVTFCGTTYHAAIGPRALPQGACTSPAISNLVAHKLDRRMSAMADKLGWRYSRYADDLTWSIEAEPSPSVGYVLARIRHIVDDEGFSVNHEKTRVQRRSQQQSVTGVVVNDRLSVSRDTIREIRAILHNAKSTGLAAQNRNEHPHFESWLAGMIGWIDMVNPQQGGKLRAELIELLRK

SEQ ID NO: 6511 - protein, 308 aa, unidentified
  source 1..308: note = Related to JACPHK010000356.1; note = Planctomycetia bacterium
MGVAIPKLRWLAFHSEAPTRTHYVYFKVPKKSGGERRLAAPYKQLAAVQRWILDSILNQLPVHDAAHGFVRERSTVTNADLHVGADVVINADLCDFFPTITFYRVEGLFRSFGYSPAVATILALVCTECPRDAVTFSGETYYPATGHRGLPQGACTSPAISSLICRNLDVRFAGIANRMHWRYTRYADDLTFSTSTEHGDKIGYLLARIRHISEDEGFRINAKKTRVQRNHTRQSVTGIVVNDKRSIDRNTIRRLRAILHNAKRTGFAAQNTEQRPHFENWLRGMIAYVAMVNPERGHELREQYEALR

SEQ ID NO: 6512 - protein, 525 aa, unidentified
  source 1..525: note = Related to JAGQPR010000143.1; note = Planctomycetales bacterium
MGLFNWLSNLLGKSPAGNKSSVDRGSVVIPELSEPRPESKKRGPIRLNGLDAQQFAPLEDNEARELAKSLGRSIWNDTFFGRRDLIPPTSDARTLLVDRMMIADGITTADELAEIHAVGLEMDRLRPQLAHAAARADRAVASNRQARAERKARKKSEAADRLRLRAEAIAERKLNSIDFLGRGVSRGLPHRQSDAQLLEQRSLPVLHTPADLAQAMQLTISELRWLAFHSEATERIHYVQFAIRKKSGGVRLLASPHLKLRTTHRWILANILSKIPLDNAAHGFVVGRGIVSNAQPHVGKSVVVNVDLADFFPSITFPRVAGLFRGLGYSGAVATILGLLVTECPRQRVRYAGRELWVASGPRSLPQGACTSPAISNAIAWRLDHRLAAIASKLDWTYTRYADDLTFSTSGDNAEKIGYLLARLRHICENEGFRLNHNKTRVQRRNMQQSVTGVVVNDRCGVSRKVVRQLRAILHNAKQTGLAAQNRDGHPDFQNWLQGMIAYVHMVNPDQALPLKQKFEQIIGP

SEQ ID NO: 6513 - protein, 533 aa, unidentified
  source 1..533: note = Related to SIHJ01000002.1; note = Posidoniimonas corsicana
MGMFDWLSGLFGRASSGRPTAPAAGAASPAPPPVRSSAPEQQPRPRQSGPKRLEGLDASQFAPLEIDDARGQAKRLSRSFGRLVWGNRTDRIPPANDARTLLIDRMMVAEGLVTPEELADIHRVGAEMDRLRPDYDAAHRAGAKAAEQAAASSRQEREQRKAEKKAAAAERKRERAEQIAERRRSDIVFLGRGVSRGLADRQSYPDLLGSFGLPVMATPADVVKAMGFLDIAELRWLAFHTEAATRTHYVQFTTRKKSGGVRVLASPHQKLRRAQGWVLENIIAKIRVDDAAHGFVAGRSTVSNATPHVGQQVVVNADLKDFFPSITFYRVEGFFRRLGYSGAVATILALLTTECPRQQVTYAGQTLWVATGPRCLPQGACTSPGLSNAIAWKLDRRLGGMARGLGWTYTRYADDVTFSASGEPAAKVGWLLARLRHLAQEEGFELNHKKTRVQRQNAQQSVTGLVVNDRVGVSRKTVRRLRAILHNAKQTGLEAQNRDNHPNFTGWVQGMIAYVAMANAEQGASLQAAFDEL

SEQ ID NO: 6514 - protein, 541 aa, unidentified
  source 1..541: note = Related to NZ_CP036278.1; note = Aeoliella mucimassa
MGLFDWISNLFGGSSSTANPPKPESSDSAGPQGPASTSSSSSPAPTPPQPPRPGPPAPPKSKRLEGLDASQFAPIEEAAALRQAKSMRLRFWTSTWFGLRDRIPPASDERTKLVDRLMVADGLATPEELAEIHEVGAEMDRLRPALDDAAKQAGQAVSRNKEDRAKLKAQKKAEAAERKRLRADAIAERKRNDIVFLGRGVSRGLADRESNAEKLEGRGLPVLHTPSELATAIDLPLSTLRWLAYHNEAAEQVHYVQFQVRKKSGGIRVLASPHKKMRRAQQWILDNILTKIDIHEAAHGFVAGRSTVTNAAMHVGQQVVVNVDLQDFFPSVTFPRVEGFFRSLGYSGAVATILALLVTESPRQRVRYAGKELWVATGPRSLPQGACTSPALSNAISWTMDTRLTAISSKLGWSYSRYADDLTFSTAGEASQQVGYLLARIRHITQEEGFGLNRKKTRVQRRSAQQSVTGIVVNDRAGVARKTVRQLRAILHNAKTTGLAAQNREGRPDFEAWLQGMIAYVRMVNPEQAASLTDAYEQLRY

SEQ ID NO: 6515 - protein, 540 aa, unidentified
  source 1..540: note = Related to PZKM01000007.1; note = Blastopirellula marina
MNFFRRLKQWFAPGQERSAQQTPSQLPASVENRDYTSPSPGTPPASQPTTPNRSTSPPSSPQPRPESTLSGLDASRFQPLTQDEAMESTSQPGWRTAYWDPLNVIPSASLPRIRVIDQTMVGMGLIDAEELAEIHDIGEQMAQFRTDYHVIQHAGQAAVQAARNARDARKAEMKRLAAERKQQRQQAVAQRKATDIVFLGRGVSRGLADRRSNIERLQASGLPVLSSPAELAEAIGISVGTLRWLSYHHPASKTTHYHSWKIAKRSGGERTISRPHKKLEHAQRWVLDHLLSKLPTHDAAHGFVPGRSTLSGAVPHVGASVLVNVDLQDFFPTIDFARVAGLFRGFGYSPAVATILALLTTEAPRRMIRSGSETLHVAVGNRSLPQGACTSPAISNLICQRMDKRLSGMAASIGWCYTRYADDLSFSSVEQADKVAYLLARVRHFTDEEGFQIKASKTRVLRRSNQQSVTGIVVNDRPSIDRKTIRQLRAILHRAKSEGLERQNRIGHTNFRGWVAGMIAYVEMVNPQQGRKLREAFGTI

SEQ ID NO: 6516 - protein, 505 aa, unidentified
  source 1..505: note = Related to NZ_CP083740.1; note = Bremerella volcania
MSPPSESGQASEFSPAASRPTTSSPSPPPESELSGLDASRFQPISHDDALEATSDPSWKTAYFDPLNVIPSVSLPRIRVIDQTMVGMGLITAEELAEIHDVGEQMSQFRTDYYAIQAAGQQAVQSSRDAQAARKAELKRLAEQRKQAHEEAVAKRKATDIVFLGRGVSKGLADRRSNIERLQACRLPLLSSPADLADALDVSIGTLRWLAFHHPASRTTHYHWWKIQKSSGGERTICCPHSKLANAQRWILNNILGKVPLHDAAHGFVPSRSTLTGAKPHIGSRVLVNVDLKDFFPTIDFARVAGLFRGLGYSPAVATILALLTTESPRMRLRSGKTTLYVAVGNRSLPQGACTSPAISNLISRRMDKRLFGIANSIGWRYTRYADDLSFSCSDREDKVAYLLARVRHVTSEEGFQIKESKTRVLRKNSQQSVTGIIVNDKASIDRKTIRKLRSILHRAKFEGLEKQNRLGHPNFSAWLAGMIAYVEMVNPEQGNKLRLAYESLG

SEQ ID NO: 6517 - protein, 534 aa, unidentified
  source 1..534: note = Related to QPEV01000010.1; note = Blastopirellula cremea
MNFFRRLTKWITSGRDSSADQPVPSQMPASVENRDYTVPNTPQTPSAPASNPSPPEQPQTSNLAGLDASRFQPLSQDEALDATSQPGWQSAYWDPLNVIPSTSLPRIRVIDQTMVGMGLIDAEELADIHHIGEEMAKYRTDYHVIQHAGHAAVQAARDARAARKAEMKQRAAQRKQEREAAIAERKATDIVFLGRGVSRGLADRRSNVERLQASSLPVLSSPADLAQAMGIPVATLRWLSYHHPASKTTHYHSWQIAKRSGGVRTISRPHKNLEDAQRWILESILAKLPTHDAAHGFVPGRSTLTGATPHVGAKVLVNVDLQDFFPTIDFARVAGLFRGFGYSPAVATILALLTTESPRRVIRSGSETLHVAVGNRSLPQGACTSPAISNLIARRLDKRLAGMARSIEWQYTRYADDLSFSCRESEEKVAYLMARVRHLTSEEGFLVKESKTRVLRRHAQQSVTGIVVNDRPSIDRKTIRQLRSILHKAKSEGLERQNRIGHTNFSGWVTGMIAYVEMVNPQQGQKLREAYEAL

SEQ ID NO: 6518 - protein, 555 aa, unidentified
  source 1..555: note = Related to NZ_CP037423.1; note = Stieleria neptunia
MGLFEILKQIFAPGQRRPGPPRGAPSDPSAIDPGSLTPPRQAEPSPATSSAPLSSATPATTPAPAATSKPAGGLEGLDASRFQPLTPSEALDATAQPGWQTAYWDPLNVIPSTHLPRIRVIDQTMVGMGLIDADELAEIHDIGQRMSKFRTDYHVIADAGQQAVDQSQAARDARKQEMKKRAAERKQAHQQAVAHRKATDIVFLGRGVSKGLADRRSNIERLAASDLPLLSTPADLANTLGISIGTLRWLSFHHPASKTTHYHHWKVPKRSGGERTISRPQKKLESAQRWILESILAKRPTHDAAHGFVTQRSTLTGALPHVGSQVVVNMDLENFFPTIDFARVAGLFRAMGYSPAVATIMSLLCTESPRRVIRSGDETLHVAIGNRSVPQGACTSPALSNLICKRLDNRLVGMAESIGWRYTRYADDLSFSCPIAKDGTDQGAQASAKIGYLLSRVRHFADEEGFRVKESKTRVLKRSTRQSVTGIVVNDRPSIDRKTIRRLRAILHRAKHEGLEAQNREGHPNFAAWLAGMIAYVQMVNPAQGQKLRKQMDLL

SEQ ID NO: 6519 - protein, 542 aa, unidentified
  source 1..542: note = Related to NZ_ANOF01000123.1; note = Rhodopirellula sp.
MGLFRVLKQFFAPGRNPPQDATRAQATAPSSIDHRDLTPPTTPVVTTGPDYVPLNSLPATPPRESSGFDGLDASQFQPLTQDEAMEATAEPGWRTAYWDPLGVIPSADLPRIRVIDQTMVGMGLIDAEELAQIHSLGEEMSRFRTDYYAVQDAGNQAVQQTRDARTARKAEMKQRAAERKKQHDADVAHRKATDIVFLGRGVSRGLADRRSNIERLKSSELPVLSSPADVASALGISVGTLRWLAFHHPASKTTHYHTWTIAKRSGGDRTISRPQKKLAAAQQWILDSLLSQIPVHDAAHGFVPGRSTLTGAQPHVGSQIVVNMDLQDFFPTIDFARVAGLFRALGYSPAVATIFALLCTESPRRVIRSGGETLHAAVGNRSLPQGACTSPALSNLIAKRLDKRLAGTAKSIGWQYTRYADDLTLSTKVNSSKVGYVLARVRHLAKEEGFVVKESKTRVLRQCTQQSVTGIVVNDRPSIDRKTIREIRAILHRAKFEGLEKQNRIDHPNFAGWVSGMIAYINMVNPQQGGKLRRQLDELSMR

SEQ ID NO: 6520 - protein, 544 aa, unidentified
  source 1..544: note = Related to JACKHI010000001.1; note = Phycisphaerales bacterium
MGLFDFFKQMFGGRSVQEKCVRCRQPLRMGALFCGNCKHPRGAPYPIPLAQTKRSDQGAANAPRVRPQNLVGLDADKFKPMTTSEAMATIDNEDSFKSAYLDSLNAIPDASLPRIQVIDRTMVGLGLIAPEELVHIHDVGKAMGELRGDWSSIHARGQQAVQLSREERAARKQQKIEEAARRRQARAEAIARRKATDIVFLGRGVSRGLADRRANVEALKRAGLPVLAAPSDVSVAMNISIPRLKFLAFHSDAPERVHYVSFSVPKKSGGMRLLSAPHQSMDEAQRWILDNVLCKIPTHSAAHGFVTGCSTVTNAEPHVGARTLVNVDLKDFFPSITFPRVMGLFQSLGYSPAVATIFALLCTEAPRRVMKYAGRVFHAATGPRSLPQGACTSPAISNLVARGIDRRLEGIARRLDWTYTRYADDLSFSRKDAGEPHVGYLLARIRHIAQDEGFEVNEKKTRVQRPNQRQTVTGLVVNDKVNVSRKDIRRIRAILHRAKHEGLARQNREDHPYFESWLRGMIAYISMVNPTVGQSMRTQFDALA

SEQ ID NO: 6521 - protein, 544 aa, unidentified
  source 1..544: note = Related to JACMKE010000965.1; note = Burkholderiales bacterium
MGLWNVLARLFGGGSASTNPTPPTQPQDARAPVGMPYGRGSAVNTPPPPPRTLARPGSPSPTRPAPTNLNLDPGQFAPVGAAELKKRAGELRWNWASVNFDRRDQIPSAGDPRTALIDRALVAQGLLTPEQLVEIHETGAQMAELRPELRNLQNIAADAALADEAERRARKEAKKAEADRRRAERAEAIKQRRATDIVFLGRGVSGGLADRRANIERLQALGLPVLATPADVAKALGLEVSRLRWLAFHSEAAAVTHYVRFQIPKKSGGTRELAAPHRDLARCQEWVRIQILDRVDLHDAAHGFVTGRGTLTNARPHLGRAAVVNADLKDFFPTITFPRVKGVFQQLGYSPASATVLALLCTECPRGVVNYDGRELHVATGPRGLPQGACTSPALSNLVARGLDNRLSAFARRLGWTYTRYADDLTFSADGEAMGQTARLLTGLRHIVGDESFVVNEKKTRVQRPKTRQTVTGIVVNRHPNVPRDTVRRLRAILHRAKTEGLTAQNREAHPHFEGWVRGMIAYVAMVNPERGRELLAEFELRKR

SEQ ID NO: 6522 - protein, 544 aa, unidentified
  source 1..544: note = Related to JADJTK010000010.1; note = Opitutaceae bacterium
MGLFSTLFRWLRGGPTLDEARRAAARRVPADRAPEGQPYRAAVPGAGARPPVLPSAQPSSRPAAGKLNLDAGQFTPLSPEEVKKRAASLSWNWSTVNFDRRDQIPSTAEPRTALIDRALVAQGLLTPEQLVQIHEVGAQMAALRPELANIHTIAHNAVAADAAERRLRKERKQAEAAQRRTARATAVAHRKATDIVFLGRGVSGGLADRRANIERLQLLGLPVLGPPGDLAQALGLEVSRLRWLAFHSEASAVSHYVRFRIPKKSGGTRELAAPHRDLARCQDWIRRNILDRVPLHEAAHGFVTKRNTLSNATPHVHRAVVVNADLKDFFPSITFPRIKGVFQQLGYSPAAATVLALLCTECPRTAVKYEERELWVATGPRGLPQGACTSPALSNLVARGLDGRIAGLARKLGWTYTRYADDLTFSTDAEGAPKTAWLLARLRHIVGEENFLVNEKKTRVQRPNTQQSVTGIVVNQHPNVPRETVRRLRAILHRAKTEGLAAQNREAHPHFAGWVRGMIAYIQVVNPERGRELLADFEALPQGR

SEQ ID NO: 6523 - protein, 551 aa, unidentified
  source 1..551: note = Related to SLWZ01000015.1; note = Proposed Chthoniobacter flavus
MIPLGAIAGALVVLLRQLFKGSKPQPRRSSPPPPVPRPGDRPYTPGAPPPIPPAAGAARPAQPSPPRSAPPRSTTLNLDAGQFTPVSAEEAKKQARGIKWNWASVNYDRRDQIPAPTQPRTLLIDRAMVAQGLLTPEQLVEIHDVGAKMAELRPDLAGIGNVADHAVAADQEERRRRKEQKIAESAERQRKHAEAVAQRRATDIIFLGRGVSGGLADRRANVEKLQQLNLPVLATSGDVAKVLDLEISRLRWLAFHSEACAVTHYVRFTIPKKSGGTRELAAPHREMARCQLWIKLNILDRIPLHEAAHGFVAHRGTMSNAVPHVRRDVVVNADLKNFFPTITFPRVKGIFQELGYSPAVATILALLCTECPRQRVTYAGRELHVATGPRALPQGACTSPALSNLAARGLDARLTGLARKLGWDYTRYADDLTFSTSGAPAQKTAWILARLRHIAQEENFTVNETKTRVQRPSAQQTVTGIVVNKRPNVPRETVRRLRAILHRAKTEGLAAQNREQHPHFAAWVGGMIAYMQMVNPERGKKLKAEFDALPK

SEQ ID NO: 6524 - protein, 404 aa, unidentified
  source 1..404: note = Related to SEGX01000707.1; note = Verrucomicrobiaceae bacterium
PSRQAIQAKQQAEAQAAEQALADDDAARAAAREARKAAAAARREQRAAAIAERRRTDIVFLGRGVSGGLADRRANVERLTAFGLPVLASPADIARVLGISVPRLRWLAFHSEASSVSHYIRFTIAKKSGGIRELAAPHRDMAAAQQWILTNILNVPPVRDCAHGFVRGRNVMTNAVPHVRRDAVVNADLKDFFPTVTFPRVKGIFESLGYSPAAATVLALLCTDSPRRLVEYEGEKLHTAAGPRALPQGACTSPALSNMAARKLDARLEGLARATGWTYTRYADDLTFSANGETASRCGGLLQALRRLCAEEGFTVNEKKTRVQRPNSQQSVTGVVVNQRPNVPRTLRRRLRAILHQARTTGLAAQNTENHPNFPMWLRGMIAWVSSTNPDEGRRLLEAFKDLK

SEQ ID NO: 6525 - protein, 528 aa, unidentified
  source 1..528: note = Related to JADLHC010000305.1; note = Planctomycetia bacterium
MGFIDWLRDLFLGPEFRPKDRSQPPPQRPGAVPDPVFPPRNVAIPGQNPLAQRPAPAPRTPPPPPRKLNLTAAAFAPISDAEAKKQGEAARSAFNPWWGRRDLIPPPDDPRTLVIDRSMVAHGFITPQELTGIHDVGRQMEELRPDLNQVEAQANQAVLAAQADREELKKRKKAEAAEKKRRHAEDVLRRRSTDIVFLGRGVSKGLSDRRANVEKLQAAGLPVLATPADVARALGLTVPRLRWLAFHTEASPVTHYVRFEIPKKSGGMRALAAPHRDMARCQQWILANILGKVAPHAVAHGFVKGRSTLTNAAPHCRRDVVVNADLRDFFPTITFPRVLGIFAQLGYSPAAATVLALLATESPRRPVEVDGTTYHVACGPRALPQGACTSPALSNLAARGLDRRLAAIATKLGWIYSRYADDLTFSTSGEAKTGYLLARLRHIARDEGFTVNEDKTRVQRRSDAQSVTGIVVNEFPSTPRKERRRLRAAMHKAKTSGLAPKDLARARGMAAYVAMVNPAQGAKFAALR

SEQ ID NO: 6526 - protein, 529 aa, unidentified
  source 1..529: note = Related to JAIPJY010000032.1; note = Prosthecobacter sp.
MGLLSLIRRLLGRDQPSQPPPIPRPSTSPRHNVVPQVRATSQPPQRKTLSQLDSQVFAGLSGAETKQQAKAMGRPLWSNLFAFGRQSVIPPVSDERTLMIDRAMVGEGLITPEELTAIHEIGLKMEELRPSYEGARHQGQVAVNADKAAKAELKRQKKAEAATRKAEREAAIAQRKATDIIFLGRGVSGGLADRRSHVEKLQEAKLPVLSTPAELATALELPVKRLRWLAFHAEVAVVTHYIRFQIPKKSGGMREISTPHTDLARAQSWILQNILEHVPVSGVAHGFVRERGTLTNARSHTGKDVVLNADLKDFFPSITFPRVRGIFQQLGYSPAVATVLALLCTECPRRTVTYDGQTYHVANGLRALPQGACTSPALSNLCARKLDLRFAALAAKHGWTYTRYADDLTFSTRGEPAKATALILSRLHNIVQDEHFEVNTAKTRIQRRNAQQSVTGIVVNDRCNVDRKTRRRLRAILHQAEKTGLPAQNRIGHDNFAGWVSGMLGYVKMINPQQGMKLFKAWDLLGGQK

SEQ ID NO: 6527 - protein, 528 aa, unidentified
  source 1..528: note = Related to JADJPW010000004.1; note = Verrucomicrobiaceae bacterium
MGLFSFIKSLFGGSSTPPPLPRRETTPVRNAVPQAKTPPQPPKRQTLAHLDSQVFEAISSEAAKKQAKAMGRPLWSNLFAFGRQSVIPPVTDPRTLMIDRAMVGEGLITPEELTQIHEIGEKMAELRPDFNWARHQGQAAVNADKAAKAELKRQKKAEAAKRKADREAAIAHRKASDIIFLGRGVSGGLADRRSHVEKLQEAKLPVLSTPAEVATALELPVKRLRWLAFHAEVAVVTHYIRFQIPKKSGGVRELAAPHADLARAQRWILQNILERVPVSGVAHGFVKGRGTLTNARSHTGKDVVLNADLKDFFPSITLPRVRGIFQQLGYSPSVATVLALICTECPRRTVEYDGQTFHVATGPRALPQGACTSPALSNLCARKLDLRFAALAAKHGWTYTRYADDLTFSTDDEAAKATALILSRLHHIVKDEHFEVNEAKTRIQRRNAQQSVTGVVVNDHCNVPRKTRRQLRAILHQAAKTSIPAQNRIGHDNFTGWVSGMLGYVKMINPQQGEKLFKAWDMLGEKRP

SEQ ID NO: 6528 - protein, 532 aa, unidentified
  source 1..532: note = Related to NZ_JAALXT010000006.1; note = Rubinisphaera sp.
MFRWLLNFLGLAPNPRPTARQRTIADSWTAERTSAAPQSTPARSVSAQKKQTSASPEALNAAQFTPIGDRDLKEQAKNLGSAWSNPWFGRRDIIPPADDPRTQLIDRAMVTHGFLTREELADIHAVGEEMSEYRPDTVLVSHRANQLVAEATADREELKRQKKAEAEERKRQREEEIAERKRTDIVFLGRGVSKGLADRRANVEELQKNNLPVLATPGELAKAMEFPIPRLRWLAFHTVAAERVHYISFTVPKKSGGERVLSAPHRDMAAAQRWILENILEAVPVHEAAHGFVRKRSTVTNAEPHVGQEMLVGCDLEDFFPSITVFRVMGVFEQLGYSPAVATILALLCTECPRRKMIYAGQTFYAATGPRALPQGACTSPALSNLVCRRLDSRLTGLAKQFGANYTRYADDLTFSGSGDVANMAGWVIAKIRHVVADEGFTLNRKKTRVQRPNMRQTVTGVVVNERPGVPRKLVRRLRAILHNAQTTGLAAQNRENHPHFESWVEGMVSYIQMVNPSQGEPLRAALATIRN

SEQ ID NO: 6529 - protein, 507 aa, unidentified
  source 1..507: note = Related to JADZEF010000026.1; note = Planctomycetaceae bacterium
MPIGVQPESSGDERSAPAPTRRRENLAALNAEQFAPLEHDEVREQADQLGSLWGNPWFGRRDLIPPASDPRTQLIDRAMVGQGLLTPEDLVDIHRIGDAMDAVRPDLALAVAEADRAVTRSAEERAALKAEKKAAAAERRRLHAEQVTHRRATDIVFLGRGVSKGLAERTPNVAALQQAGLPILATPADVAAALSISIPRLRWLAFHSVATKRTHYVSFTVPKRSGGVRTLSSPHRSLAQCQEWILRNILDRIPVHAAAHGFVRGRSTLSGARPHVGAEVVLNVDLKDFFPTITFPRVKGVFQQLGYSPAAATILALLCTECPRRPVEYAGEKLYVATGERGLPQGACTSPALSNLVVRRMDARLQGIAQRLGWIYTRYADDMTLSTSGDAAQRLAYVMARVRHIAGDEGFALHAEKTRVQRPNVRQCVTGIVVNERAGVPRETVRRIRAILHRARHEGLAAQNLDGIPHFEGWLRGMIAYIRMVNPRQGAPLQHAFDELMPPGTVR

SEQ ID NO: 6530 - protein, 429 aa, unidentified
  source 1..429: note = Related to NZ_JACHXU010000001.1; note = Rhodopirellula rubra
MSVWDSLRRLIAPPKLPKTSEADRHAMAESFNLHRKRPLPAVRLKEQLDLSWLARRRTAPAAEPFGYLGDGVSYELGQRVTDVERLSSAGLPVLKTPEQLAEAIGFSARRLRWLAYHRDAQASCHYIHFIVEKKSGGVRSIAAPRPQIAACCRWIDREILRLIPPHDAAHGFVLGRSTTTAAQPHVGQDVIVNMDLSDFFPTITFPRVRGWFASLGYSRQTATVLALLCTESPRTPIDMDTSNVNASSIDTVNHSRLWLATGPRQLPQGACTSPAISNLVCRSMDRRLTGLCEKLGWTYTRYADDLSFSTSGKDDSQIGYLMHRVGGIVRDERFAINDSKTRVQRRSGRQTVTGLVVNDRIGVPRETVRQLRSILHHAKTEGLEAQNREGHADFLGWVTGMIGYVGFVDPAKGERLRSQLDQVLKQETT

SEQ ID NO: 6531 - protein, 408 aa, unidentified
  source 1..408: note = Related to DNPC01000265.1; note = Planctomycetaceae bacterium
MWDRLKRLFSGSAKSPRRSAAQFNTRRGNQSDERVLPYWSQRTPLADSAEARFSYLGNGVSHEAADLATDAELLKKLELPVVETGNQLAEAIGFSPKRLKRLAVHSAQTRSCNYFYFTVPKRSGGERLLAAPRPQIDACCRWILREILDKISIHPAAHGFAKGKSIKSNAEIHTQQQVIVNLDLLDFFPAIEFRRVRGLFESLGYNGQIATLLALLTTEASREPVPSPAGTLWAATGPRHLPQGACSSPSISNLICRALDRRLSGLCRSLSWNYSRYADDLTFSASAVAGQRVGYMLHRIRGIVREEGFQVNESKTRVQRPSQAQTVTGLVVNDGVSVSRSTVRMLRAILHNASLHGLESQNRDNHPHFAAWLEGMIGHVVNVDPQHGVKLQRQFRQLKKQQVSHNHE

SEQ ID NO: 6532 - protein, 321 aa, unidentified
  source 1..321: note = Related to JAFLCQ010000046.1; note = Planctomycetes bacterium
LPVLATPADVARWLDLSIPRLRWLAFHSDSTTVSHYVFFTVPKKTGGVRRLSAPHAGMAAAQRKIFQEILPRLRIHDAAHGFVTGRSIRSNATPHVGAHVVVNLDLKDFFPSITFPRIRGLLTAAGYSPCASSILALLCSESPRQVLGLGGQRLFVATGPRALPQGACTSPGLANLAARILDARLAGLVAAWGWTYTRYADDLTFSTQNAQADIGRLLTAVRNIVADEGFTVNEEKTQVQRRSQAQEVTGLVVNQRAKAPRELIRRIRAILHRAEREGLAAQNREGHRDFAAWLGGMIAYIAMTDPATAARYRAQLERVPR

SEQ ID NO: 6533 - protein, 602 aa, unidentified
  source 1..602: note = Related to CP043547.1; note = Planctomycetales bacterium 10988
MLLSSRLFFPLDVSSQKYFFYLPEFREWVVMSFFDWLQKLFGSASPEEQRPIPPRKSPEDPNPVATPEPQPSPTTETLKPSKVADPPARVSKTARAVKITEQEEPPKPPVSSVSGDALAMGELAPLSLDEAKSEAKASNISWRMSGGWDRRDRIPSLENPRTSLIDRAMIGHGLITAEELEEIHRVGAEMDELRPLREHALELARQQVAAEEQDKQKIKEEKKKEAARRAAVRQAEIELAKKTDIVYLGRGVSQGLANRQSNREQLDQLQLPFLDHPDELAKILEVEIPQLRWLTFHNEAAERTHYLQFEIPKKSGGSRILSAPHQALSKTQQWVLTNILQKLPTHEAAHGFVPGRSTVTHANLHVGCDLVAQMDLADFFPSITFPRVRGLFESFGYSPAIATILALLCTEAPRRTIELSGKRYYVAEGPRSLPQGACTSPALSNLIARKLDARLTGMSQKIGWTYSRYADDLTFSWKGSAGENGKQPNYGYLLSQVLAIIDEETFALNEQKTRIQRPSQRQQVTGIVVNDRPGVPRPVVRRLRAILHQAQKTGLAAQNRENHPHFAGWVQGMIAYISMVQPEKGKQLQAAFEQVPKDDAVN

SEQ ID NO: 6534 - protein, 563 aa, unidentified
  source 1..563: note = Related to JADLAG010000600.1; note = Polyangiaceae bacterium
MGLWDKVKTLLGLGDGAQQPGAGEDAGGGQGSSPAAPAQPARPAAAQGSAKPAAAQPPAAVQQFSAAPAPAAAQRPAKQRQKPTDPYDAKGILGLSADEVRKRALKINPYKTAWIGRVDTIPPQSDERTALIDRGLILRGLLTEAQIAEIHRVGDIWLKHHEAARLAGTVAAKTAEKAIADIKREKEARKAEKKRLAAERRERRAAEIARRRAEDIIYLGRGVSAGLADRRAHVEALEERGLPVLSTPGDVARALGLTISQLRWLAFHGDAVERPHYVYFEVPKRSGGKRLLSSPHRSLAAAQAWILHDILERLPVEAPAHGFVQGRSTVTNARPHIGRDVVVNLDLSDFFPTITFPRVRGVFQRLGYSPAAATVLALLCTEPPRRELEYDGQRYWVAVGERGLPQGACTSPALSNQVARKLDRRLAGMCKKHGFEYTRYADDLTFSAPPGKRAEIPMLLARVRHIVTEEGFAINPKKGRIQRAAGRQEVTGIVVNDKLGMPREEVRRLRAILHAAKKTGLAAQNREGLPDFEAHIRGKLAYLQMIDRQRAAPLLAALDALAG

SEQ ID NO: 6535 - protein, 541 aa, unidentified
  source 1..541: note = Related to NC_010162.1; note = Sorangium cellulosum
MGFWDKLKSMLGLGGAEQGERSPGGVEAEQAQGAQAGPAAATQPAARAGQPRVAAGAKPRPADPYDAGGILGLSADELRRRALKINPYQTAWIGRVDTIPPQSDERTALIDRGLVLRGLLTEAQLAEIHRVGDLWLRHKDAAALAGTVAARSADEAIERLKREKLARKEEKRRQSAERKRQRAEAVARRRAEDILFLGTDVSAGLADRRSHVESLAQRGLPVLSTPADLAAALGVAVPRLRWLCFHGEAVERPHYVYFDVPKRSGGTRQLAAPHASLAAAQAWVLREILEKLPVEAPAHGFVKGRSTVTNARPHTRRDVVVNLDLSDFFPTITFPRVRGVFHRLGYSPAVATLLALLCTEAPRRPVEYDGQRYWVAVGDRALPQGACTSPALSNQIARKLDRRLAGMCARAGFTYTRYADDLTFSAPPGKRGDIAMLLARVRHIVEEEGFAINPDKGRIQRAGGRQVVTGVVVNDKPSAPREEVRRLRAILHAAKKTGLAAQNRSGVPDFEAHLRGRIAYVQMIDRERAAPLLAALDALTG

SEQ ID NO: 6536 - protein, 567 aa, unidentified
  source 1..567: note = Related to CP012159.1; note = Chondromyces crocatus
MSFWNKIKSLLGVGANDEPAGEKQRDEPADGGDGQRARTKPVVTASSSVAAKFSGASTPSPPARKPATTPTRPKTTATKQPAKAAPPNSPPTTGVLLGLSKDELRQRALKIDPYRTAWIGRVDTIPPQSDERTALIDRGLILRGLLSEEQIQEIHRVGDLWLRHHDALRLATSKAAKTVELAFEQMKRERAERKVQKQREAAERRRRRVEDVARRRAEDIIFLGSGVSSRLVDRRSHIEALTERGLPLLSTPADVARALGISVPRLRWLCYHGDAVERPHYVYFEVPKRSGGKRLLSAPHASLAQAQTWILRSILDKLPTENPAHGFVAGRSTVTNAREHLGRDIVVNLDLRDFFPTITFPRARGVFQRVGYSPAVATILALLCTECPRREVDYDGQRYWVAIGDRGLPQGACTSPALSNQVARKLDRRLAGMAAKHGWTYTRYADDLTFSAPPGKRSGIPMLLARVRHIVTEEGFTLHPSKGRIQRAARRQEVTGIVVNDKLSVPRDELRRLRAILHAAKTTGLEAQNREQRPDFEAHIRGKIAYVAMVDPEKAAPLRAALDALPR

SEQ ID NO: 6537 - protein, 561 aa, unidentified
  source 1..561: note = Related to NZ_ASRX01000016.1; note = Chondromyces apiculatus
MSFWDRVKAFFGGGKGEGTEAPPYDAPTQRAPAQRAATKGTSGSGTKASQGAATSTSPAASGAPAASRRTFVKWITEAFSTDPAVTTRAIMSMSAAEIRRRALTINPFRTAWIGRVDVIPPQSDERTALIDRSLILLGLLTEEQIVEIHRVGDLWLKHREASRLVALSAARNAEQALADLKRERAARKEQKRRDAVERRRKRAEAIARRRAEDIVYLGAGVSAGLADRRSHIEALAARGLPLLASPADVAKALGVSISRLRWLCFHSDAVERPHYVYFEIPKRSGGKRLLAAPHASLERAQHWILREILDKLPVEPPAHGFVKGRSTVTNARPHVGRDLVVNLDLSDFFPTITFPRVRGVFRRLGYSPAVATVLALLCTEPPRRPVEYEGQRTWVAVGERGLPQGASTSPALSNQVARKLDRRLTGMAEKHGWTYTRYADDLTFSAPEGRRGDLAMLMARVRHIVTEEGFALNPRKGRVQRASGRQEVTGIVVNDKLGVPRDEVRRLRAILHAAKATGLEAQNREKIPHFEAYLRGKIAYVAMIDPAKAAPLHAALEALSR

SEQ ID NO: 6538 - protein, 573 aa, unidentified
  source 1..573: note = Related to NZ_SSMQ01000028.1; note = Polyangium fumosum
MGFWDKVKSFIGTGKPGEGEPGKNEPDDKPKAASASTTSSSSSSSTKSTTTGAATGSATTAVATFTSTSPAPAAKKKDKPKPKDPYDTSGILGLSADEMRKRALKINPYQTAWIGRVDTIPPQSDERTALIDRGLILRGLLTEAQIEEIHRVGDLWLKHNEATSLASTVARKKADEAIEELRRQKAERKAEKKRLAAERKKKHAEAVAKRRAEDIIFLGRGVSGSLGDRRANVESLQKQGLPLLSTPAEVAKALGLPIPRLRWLCYHNDAVEKPHYVYFEVPKRSGGMRLLSAPHEALSKAQQWILQNVLAKLSIEAEAHGFVKGRSTVTNARAHLGRGIVVNLDLSDFFPTITFGRVRGLFESIGYSPAVATIFALLCTESPRRKVVYDGTTYWVAVGERGLPQGACTSPAISNLVARKLDRRLTGMTRKMGWTYTRYADDLTFSAANEVVDDGKGGQKKGRGDLGILLARVRHIVQEEGFAINPKKGRVQHAGGRQEVTGIVVNDKLGMPREEVRKLRAILHAAKKTGLAAQNRENIPHFEAYLQGKIAYLNMVDPERAMQLAKAFLEIPR

SEQ ID NO: 6539 - protein, 566 aa, unidentified
  source 1..566: note = Related to JADJXL010000001.1; note = Polyangiaceae bacterium
MGFWDKVKTFIGPGKPGEGEPKKDDPAPAAKPASTPATTSTSASGKTASASSAVGAVSTFTASTPAKTAAAKPKKDKPKDPYDASGILGLSADELRKRALKIDPFRTAWIGRVDTIPPQSDERTALIDRGLILRGLLSEEQIEEIHRVGDLWLKHHEAANLASTVARKRADEAIAELKKEKAAKKAEKKRLAAERKKKRAADVARRKAEDIIFLGRGVSGKLADRRANVEALQKNGLPILSTPAEVAKTLGLPIGKLRWLCHHNDAVTRPHYVYFEVPKRSGGTRLLSAPHENLAKAQEWIFNNILQKLPTENPAHGFVKGRSTVTNAKEHVGQGIVINLDLSDFFPTIGFGRVRGLFESLGYSPAVATIFALLCTEPPRRKVTYDGTLYWVAVGDRGLPQGACTSPAISNLVSRKLDRRLLGMTRKMGWTYTRYADDLTFSAEMQEIEGGKKGRKDLGMLLARIRHIVQEEGFAINPKKGRLQHAGGRQEVTGIVVNDKLSMPREEVRRLRAILHQAKKTGLEAQNKEKRPHFESYLKGKIAYLNMVDPDRAMQLAKAYMEAGGR

SEQ ID NO: 6540 - protein, 568 aa, unidentified
  source 1..568: note = Related to NZ_CP079217.1; note = Polyangium sp.
MGFWDKVKTFLGNEKPGEGEPKKDDAPPAVKGPATPASSGGAKPAQSAKNAAAPPPVATFTTTQPVITPAPAPATGAKKGKPKDPYDASGILGLSAEELRKRALKINPYKTAWIGRVDTIPPQSDERTAIIDRGLILRGLLSEAQIAEIHRIGDLWLRHREVTSLAESVAKQKASEVIEELRRQKAERKAEKKRLAAERKQKRAEEIARRRAEDIIYLGRGVSAGLGDRRSHIEALGERGLPLLSTPADVAKALQIPVPRLRWLCFHSEAVEKPHYVYFEVPKRSGGTRLLSAPHEALAKAQQWILHNILEKLPVEDPAHGFVKGRSTVTNARPHLGQQVVVNLDLSDFFPTVTFLRVRGFFEKIGYSPAVATIFALLCTEPPRRRVVYDGQPYWVAVGTRGLPQGACTSPAISNGVSRKLDRRLTGMSKKMGYTYTRYADDLTFSAPAPAGEDGDKARNDIGILLARVRHIVQEEGFAINPKKGRVQHAGGRQSVTGIVVNDKLSVPREEVRKLRAILHAAKTTGLAAQNREGIPHFEAYVRGKVAYLHMVDPERAAPLLRALEALG

SEQ ID NO: 6541 - protein, 549 aa, unidentified
  source 1..549: note = Related to JABBJJ010000008.1; note = Pyxidicoccus fallax
MGSFWNRLKGLFTGGDTPGDAAPAQGTTAAPPAGTAAPSTGAPASTATPPQAQAPQAPAVRNPYEANEAILGLSPEEFRKRALKIVPWRTAWIGRVDTIPPQSDERTALIDKGLLLRGFLTREQLAEIHRVGDLWLKHHDADRLAHAAAAKTAEAAVEARRAERKKRKEEKQRQSAERKQQRAEDIARRKREDIIFLGRGVSSGLADRRSNIEALQASKLPVLSSPADVAKALGLSIPQLRWLCFHQEAAEKTHYHYFEVPKRSGGKRLLSAPQPTLKQAQAWILENILEPLPTEAPAHGFIRGRSTVSNAAAHLDRDVVVNLDLKDFFPTITFRRVRGVFRRLGYSPSVSTVLALLCTESPRRQVDYDGKRYWVAVAERGLPQGACTSPALSNQVARKLDRRLRGRMAKLGWEYTRYADDLTFSAPAGKREQVPFLMAAVRHVAEEEGFALNPNKGRVQRVGGRQSVTGIVVNEKLSVPREEVRRLRAILHQAKTTGLAAQNRENRPDFEAWLHGKIAYVCMVDKPKGLKLLEAFEALRSGKQASAGS

SEQ ID NO: 6542 - protein, 534 aa, unidentified
  source 1..534: note = Related to JACPVI010000075.1; note = Myxococcales bacterium
MASFWGRVRGFFGGGQPPSDFETSAPSPGASPVPRAAAPASAASPAKNPYLANEEVLGLSAEELRKRALKITPWRTAWIGRTDVIPPQSDERTAIVDRGLVLRGLLTKEQLAEIHTVGDQWLKHHEAMSMAGALAAKSADQAVEQRRKEKAQRKAEKQKLAQERAQARAAEVARRKKEEVAFLGPGVSSGLSDRRSNIEALAAAGLPVLSTPADVAKALEVTVPELRWLCFHSEAAERTHYRTFEVPKRSGGVRLLAAPKKKLAKAQGWVLRSILEKLPTEKPAHGFVKGRSIVSNAAAHLGRDVVVNLDLKDFFPTVTFPRIRGVFKKAGYSPAVATVLALLCTESPRREVEYEGRRYFVAVGPRALPQGACTSPALSNQVARKLDRRLRGRMAKLGFEYTRYADDLTFSAPPGKREKVGFLKAAVRHLVEEEGFTVHPEKGSVLSSSRRQRVTGIVVNRKLSVPREQVRRLRAILHQARKTGLAAQNREGRPNFEAYLQGMIAWVSMVDREKGQNLARQLAELVVAGRRAAG

SEQ ID NO: 6543 - protein, 535 aa, unidentified
  source 1..535: note = Related to JAIBBR010000058.1; note = Myxococcaceae bacterium
MERDGRYLYNPYSGDSSATALRNAPPAPAPAPVRTTAASTPAPYQTPPPPRTINENSYAANPEILGLSADDLRKRALKIVPWRTAWIGRVDTIPPQSDERTALIDRGLMLGGYLNEKQLAEIHTVGDLWLRHQDATRLAEAAAAEAADDAIEALKAEKARLKAEKKKAAAERRAARAAEVARRRAEDIIFLGRGVSKGLHDRRSNIERLTEKGLPVMSTPADVAAQLGLTVPKLRWLCFHSDAAQTVHYTAFEILKRSGGTRLIAAPRPTLAKAQTWVLRNLLEKLPVEENAHGFVKGRSTVTNARAHVGRDVVVNIDLKDFFPSIGFRRVRGVFKRLGYSPAVATVLALLCTEAPRRKVEYDGHTYFVAVGERALPQGACTSPALSNQVARRLDKRLRSRSQKAGWTYTRYADDLSFSAPAQRPAAAQLQAMVRHVAQEEGLAVNPKKGRVLVRGGRQQVTGIVVNQKTSVPRAQVKRLRAILHQAKKTGLAAQNREQHPDFTAWLKGMIAYVTMVDSAKGHKLKAAFDALSPS

SEQ ID NO: 6544 - protein, 635 aa, unidentified
  source 1..635: note = Related to CP016211.1; note = Minicystis rosea
MASFWDKLKSWIGGGPSSTPPDPSEETSDLARRVEAIVVRRMTRKESFEAIEIADEAASAPEDRTVKGIAAASAVVARLYDEGRFEPLGYTRTKLADGNWLYHLKGADLSKQSATAPAARTTPRSTAPATRTAPQTTPAQTTAPVPAAPAPKAKDPYAASEILGLSADEMRKRALRINPYKTAWIGRVDTIPPQSDERTALIDRGLILRGLLTEKQITEIHRVGDLWLRHHEATRLAASTAAVAAAKQMEDIARERAEKKAQKKREAIEREARRAEDVARRKREDIVYLGVGVSKGLADRRSHVEALLDRGLPVLSTPADVARAMGLTISELRFLCFHAEAVEKPHYIYFEVPKRSGGKRLLASPQPRLAKAQAWVLHEVLEKLPTEDPAHGFIKGRSTVTCAIPHVGRDVVVNLDLSDFFPTITFSRVRGVFERLGYSPAVATIFALLCTEAPRSLVEFEGRRYHAAVGPRALPQGACTSPALSNQVARKLDRRLAGMAKKHGYTYTRYADDLTFSADGKSATDLGMLLARVRHVVSEEGFAINPKKGRLQRAARRQMVTGVVVNDRPSVPREEVRRLRAILHHAEKTGLAAQNRENVPHFEAHLRGRLAYLHMIDPERAAPMLARFEAIVARA

SEQ ID NO: 6545 - protein, 508 aa, unidentified
  source 1..508: note = Related to JADJRH010000011.1; note = Polyangiaceae bacterium
MPPPRSTKPSAGQAPPIQAAAPPPPKPQPEDPLAAEILGLSAQELRKRAIKINPYQTAWIGRTDTIPPQNDERTAIIDRGLILRGLLTPDQITEIHRIGDQWLTHREAAKMAQILAARSVEEALAARRAEREAKKAQKKAESEARKARIKEEIARRKAEDIVYLGAGVSHLLHDRRSHLETLESRGLPILSTPADVARALNLPIGKLRWLCFHSEATEKPHYRYFEIPKRSGGTRKIAAPQPELAKAQEWIFTHILQKLPTEDAAHGFIPNRSTVTCAAPHVGKDVVINLDVKDFFPTITFVRVRGVFQKLGYSPAVATIFALLCTEAPRVETSFEGQTLWAAVGPRACPQGACTSPALSNQVARKLDRRFVGMSKKHGFVYTRYADDLTFSAPEGKRAEIGMLMARVRHILAEEGFTLHPDKGRVQRRQHQQLVTGIVVNQKLGLDRKHIRRLRAILHAAQKTGLEAQNRENIPHFEAHIRGHLAYLHMVAPDKAAPLLQALNSLPK

SEQ ID NO: 6546 - protein, 628 aa, unidentified
  source 1..628: note = Related to JAFEBD010000111.1; note = Deltaproteobacteria bacterium
MSFWKKVKGFFGGGGGDEPPEGLTGHDPKVAAEVIAVLRVRCAAQTSFEAVDIADEVTRDDASRGVAQIRAACAIVEALYESGWFSTLDYVRTGAIYHHTSKAPSSYAPPRGGSTFPPPAPPAPRPAAPPTTPTATNPTAPAAPAVPAVDPLAAEAILGLSPEEFRKRALTIKPYQTAWIGRVDTIPPQSDERTALIDRGLLLRGLLTREQLEEIHRIGDQWLLHHESVKLAEIAAQANVEAYLRAAREEKARLKAQKKAESAEREAVRKALVAKRRAEDIIYLGRGVSGGLADRRAIVEELERRGLPLLGSPADVARALGLTVPRLRWLAFHAEAPSRTHYVYFEVPKRTGGLRLLSAPHDDLKKAQHWILENILAKLPVTDAAHGFVSGRSVVSNAAAHLCRDVVVNCDLESFFPSITFGRVRGVFEAIGYSPAVATILALLCTEAPRTKVTHEGKTYWVAVGARGLPQGAPTSPALSNQVARKLDQRLTGLGRKLGWSYTRYADDLTFSAGPGKREQIGYLLARIRHIAQDEGFAMNRKKTRVQRAARRQEVTGVVVNDKLSLAREELRRLRAIVHGAQKTGLAAQNREGREDFEAWLRGKIAYVSMIDAAKGEKLRAALDAAPP

SEQ ID NO: 6547 - protein, 625 aa, unidentified
  source 1..625: note = Related to NZ_CP012333.1; note = Labilithrix luteola
MSFWNKVKQFFGAGEAPEGPAKTGDALSAHDAALVREVSAIIQIKCQNGELFQAVDVADQGGYAAKGIPQIRAACAVVEALHDTGRFDALGYTRTDAVYHPVGASPDSYVRPRAAALGSPPAPAPRPAPVAQPAPVSAVRQADAKDPLDGGDILGLSAEDFRKRALKINPYRTAWIGRVDTIPPQSDERTALIDRGLILRGMLKPEQITEIHRVGDLWLKHHDAMRIAEIAAQKNADAFLEARRAEKAALKEQKKREADERRAKRKAEIAQRRATDIVFLGRGVSAGLADRRTHIEELARRGLPILSTPQDVAKALGLDVPRLRWLAFHAEAPARTHYVHFEIPKRSGGTRLLSAPHDDLKKAQHWILEFILSKLPVTEAAHGFVPGRSTVTNARMHVGRDVVVNCDLKDFFPSITFKRVRGVFEVIGYSPAVSTILALLCTEAPRTKVVHEGREFWVAVGERALPQGAPTSPALSNQIARKLDQRLEGVCKKIGWSYTRYADDLTFSAESGQRERIGWLLARVRHIAQNEGFALNAKKTRVQRNARRQDVTGVVVNDKPATPREEIRRLRAILHGAKRTGLEGQNRQGHPAFEAYVRGKIAYVSMIDREKGEKLRRELDVITGS

SEQ ID NO: 6548 - protein, 538 aa, unidentified
  source 1..538: note = Related to JACRCQ010000074.1; note = Deltaproteobacteria bacterium
MGFWDKVKAFFVGPPAEPSVADDDSESGSSPPPAKGSRSSTQAPRAPSRAAESAPPQSADSFAAGEILGLSAKDMRARALKINPYHTAWIGRIDTIPPQSDERTALIDRGLILRGLLSKSQIDEIHRVGDIWLRHHDAAKLAEAVAAAKAQRAVDDMRARKAEEKRRKKEEAAQRKALRAEQVQRRREEDIVFLGRNVSASLADRRSHVEKLSEAGLPLLATPSDVAKALGITIRQLRWLCFHAEAALKSHYVYFEIPKRTGGTRLLAAPHRHLAQAQRWVLDNILRRISPSEPAHGFVAQRSTVTAAAPHVGMDVVVNLDLKDFFPTITFPRVRGLFKSMGYSPASATVLALLCTECPRTPVDHEGLRYWVAAGERALPQGACTSPAISNLVGRKLDRRLVGMSTKMGWHYTRYADDLTFSAPAGHREAIGILLARVRHILQEEGFQLHPRKQHIQRAARRQQVTGIVVNHKLAVPREEVRRLRAILHNARRTGLAAQNRDDIPHFESWLQGKIAYVQMVDAELGRKLAEQYRALTG

SEQ ID NO: 6549 - protein, 529 aa, unidentified
  source 1..529: note = Related to JADZES010000060.1; note = Deltaproteobacteria bacterium
MGVWEKLKGLFSRPPPPPSGPGGPATPSSASSLSSPSNLSGAGASGAPASDPYQASAILGLSYDEMRKRAMKIDPMRTAWIGRVDTIPPQSDERTALIDRGLILRGFLTKEQIGEIHRVGDLWLRFHEADRLATTVAQREAGELMKNLAEEKAKKKEEKKRLAAERRAARQQAIEKRRREDIIYLGAGVSSGLRDRRSNLERLNGAGLPVLSTPADVAAALDVSIGRLRWLCYHSDAAERLHYVRFTIPKRSGGQRAIAAPLPDLKRAQAWILESVLEKLEVEPEAHGFVAGRSTLTNATPHLKREVIINLDLADFFPSIGFRRVRGVFEAIGYSPAVATIFALLSTEAPRMEVDYDGQKLQVAVGERALPQGAPTSPALSNRVARKLDRRLRGMATKHGWTYTRYADDLTFSAPTGHQGEVPIMQARIRHIVGEEGFAVNLKKGRVQRRSGRQEVTGVVVNDRPGLPRTEVRKLRAILHQAKKTGLAAQNRQSHPRFEAWLRGKIAYLMMIDPARGKAMAAELDALVG

SEQ ID NO: 6550 - protein, 659 aa, unidentified
  source 1..659: note = Related to JAEUKI010000057.1; note = Myxococcales bacterium
MAGLWDRIRAFFRSGRGGDADAQIEQAVRVALVRRVSGRSVFTPLELAYDIVPREDRSDEVIEAIATALDRLYVRAYFGPFNYARSIDPKSAYRYVYHPAGTRVPGTTPDTTRVRAEPESEPPPPPAPTRSTRASTVSGSTRAPTSVSSRGGSTARGASTTTSGRGAPSSARGAYRTAADPYARPEILTLSAEELRARAVKIDPYKTAWIGRVDTIPPQSDERTAIIDRGLILRGLLSEAQITEIHRVGDLWLRHSEAARLAATTAAKTAEDAVRQMREEKVRKKAQKIKEAAEKKRRYAEGVAKRRATDIIFLGRGVSSKLGDRRSDIEKLDAQGLPVLSTPKDVADALRTTISELRWLAFHSDAAERTHYVTFTIPKRSGGTRSLSAPHEKLARAQKWVLEHVLAKLPTEIPAHGFIRGHSTVTNALPHVKRDVVVNLDLKDFFPTVSFARVRGVLEKVGYSPAVATVLGLLCTESPRQIITYADKPYHVALGPRALPQGACTSPALSNQVARRLDRRLSGLCAKMGWTYTRYADDLTLSADEGHRGELPVLIAKVREIVEDEGFKINPKKGRVQRKSARQTVTGVVVNDHPTVPRDEYKRLRAILHRAKFTGLDAQNKEARPHFDKWVEGKIAYISMVDATKGARLKAAFDAIPKT

SEQ ID NO: 6551 - protein, 611 aa, unidentified
  source 1..611: note = Related to NZ_CP011125.1; note = Sandaracinus amylolyticus
MSFWKKVVDFFTGGPTSIETSAVGTSGSPLEAAIWSAIKSRMAKGESFTPIDVVDDATSSTPGRTVKTITDGIAFVDAFFARGLFAPHGYTRTLTSTPSGQNWLYHPASSAPLVAMPAIVAQPALKASAPAIDPYDVGSLLTLTPAELRTRALKIVPWRTAWIGRTDVIPPESDERTALIDRGLELRGLLTRAQLVEIHRVGDEWLKHKDAPRLAQSRAAKNAEEAVAQLRAERARTKEEKRAASEARKKARAERIARRKREDIVYLGRGVSALLGDRRAHVEKLNALGLPVMASPADVATALGVTIPALRFLCFHAEAARRAHYVQFDVPKRSGGVRRLSAPMPRLAAAQQWVLEHVLEKLPVERPAHGFVPGRSTVTNAREHVGRDIVINLDLESFFPSITFPRVRGLFVGVGYSPAVATILALLCTESARTRAEYDGAKYDVATGPRALPQGACTSPAISNQIARKLDQRLRGLAVARGWTYTRYADDLTFSAPEGKRSEIARLIARIRHVVEEEGFRIQVKKGRVQRAGGRQTVTGIVVNETHKLGVPREDVRMLRAILHNAKKTGLAAQNRDAKPDFEAWLRGKIAYVQMIDRARGDALLRALDAL

SEQ ID NO: 6552 - protein, 531 aa, unidentified
  source 1..531: note = Related to JAGQIZ010000659.1; note = Myxococcales bacterium
MGLWDSVKRLFGGGDAASPDEGKEEREERGGGSAARGGVYRSAPERGEPDAIDPYGKSPVMGYSEDDVRARFFALRRGGISPFFHPDLLPAPDDEFTQLVDRSLVLAGLLTQEELEAIHRTGLEWRKHRHRADHARIVGKAAAGEAVEILKQERAENAKRKKAEARARREARRQAIEQRKREDIIHLGRGVSNRLGDRRSHVEKLQAAGLPVLSGPADIAVALGITIGQLRWLCFHDEASRTSHYHQFTVPKRSGGVRVLAAPMPHLKRAQTFVFDNILRKLEVEEPAHGFIRGRSTVTNARPHVGQDVVVNLDLEGYFPSVTFPRVRGVFEHLGYSPAAATILALLCTECERRPMRYAGQRYHVAIGDRGLPQGACTSPALANQVTKRLDRRLAGLCRAFGWQYTRYADDLTFSAPAGKRAEIPKLLGAVKRLITEEGFTLNPKKGRIQRRGGCQEVTGIVVNDKLGLARTEVRKLRAILHNARKTGLEAQNREGRPHFRAWLQGKLAYLAMIDRDKGTAMLRELEELPS

SEQ ID NO: 6553 - protein, 573 aa, unidentified
  source 1..573: note = Related to JAFLCL010000034.1; note = Deltaproteobacteria bacterium
MFGPHGYTRTLLQTPAGTNWVYHPKSSAPAAVAPVPGAAAVAPRPATASSAGTVRGPLVPQGSRLPASVTAHTASGGAPAKDPYDLGVFLTLTPAEHRARSLKINPYQTAWIGRVDVIPPESDERTALIDRGLELRGLLTRPEIVEIHRIGDLWLKHKDAARLAESIAHKNVEELLAQERIARQLAKTKKKEESAAKRTREAEDVQRRKREDIVYLGRSGLARNVSKGLSDRRSNIEKLAARGLPRLSSPADVARALELEIKTLRFLAFHADAQRHAHYVQFEVPKKKGGTRTLSAPKPQLAKAQKWILEEVLEKLPVDPVAHGFVKERSTVTNARPHAGKAIVINQDLVDFFPTINFARVRSVFQRAGYSPAVATIFALLTTECPRIQATYAGHTYYVATGQRGLPQGACTSPALSNLVASRLDRRLTGYTSKHGWTYTRYADDLTFSSAEEAEPGSPSGVAKLLATLHHIARAEGFTIHPDKGRIQRKSKRQTVTGIVVNEAHKLGVPREDIRLVRAILHNAKKTGLAAQNRDLSPTFEAWLRGKIAYITMVDRARGLAFSEELEHLDLGR

SEQ ID NO: 6554 - protein, 566 aa, unidentified
  source 1..566: note = Related to JAIBCE010000038.1; note = Sandaracinaceae bacterium
MFGPHGYTRTLLQTPAGTNWIYHPKAQAPTALAPVVKAAAAAPVPVAAKGPLVPQGSRLPSSVTGHTASAGPVKDPYDLGVFLTLTPAEHRARALKINPYQTAWIGRTDVIPPESDERTALIDRGLELRGFLSRAEIVEIHRVGDLWLRHKDAARLTESIAHKNVEALLAQERLAKQLEKARKKDMAAAARAKHADDVARRRREDIVYLGRSGLAPGLSKGLADRRSNIERLASQALPRLSSPADVARALEIDVKKLRFLAFHADAQRHVHYVQFEVPKKKGGMRTLSAPKAELAKAQQWILDNVLERLSVEKQAHGFVKGRSTVTNAQPHQGKAIVVNQDLVDFFPSITLRRVRAVFERAGYSPAVATIFALLTTECPRTRATYAGHEYHVAVGPRGLPQGACTSPALSNLVASRLDRRLQGYTQKHGWTYTRYADDLTFSCDLEPAADSGNDIAKLLATLHHVARSEGFTVHPDKGRIQRKSKRQTVTGIVVNEASKLGVPREEIRLVRAILHNAKKTGLAAQNRELSPTFEAWLRGKIAYIAMIDRSRGLALQKELDSLDLGR

SEQ ID NO: 6555 - protein, 548 aa, unidentified
  source 1..548: note = Related to JADLFP010000335.1; note = Acidobacteria bacterium
MFKRLIDKFRQLVSHPDSPEPPMPSHGPSSAPPPREAAPGAPPLPRAAPGADPKPSTLDQYSPPDILGLSKEELRKRALLVNPYRTAWIGRVDTIPPRSDERTALIDRGLVLRGLLNEEQLAEIHRVGDLWLTFHDAERLASAAAGKTADEAIEEARKAKQAAREEKRRQAAERRARRAEEIALFRKTHLAFRGEGVSAGLSDSRSEIEKLEAAGLPVLASPPDLARVLDVSVSRLRWLAFHSEAVTRPHYTYFRIAKKSGGTRLLAAPHKDLEKAQRWIFENILAKIAAEKGAHGFVKGRSTVTNAVPHKGRAIVVNIDLRDFFPSITFPRVRGLFQSLGYSPAVATVLALLCTECPRVEAVLDGKTFYVAAGQRGLPQGAATSPALSNLVARKLDRRLSGLARKRGFIYTRYADDLTFSCGRDKDSELGRFLASVRHILTEEGFTINPKKFRVQRSSARQRVTGIVVNRKLSVPREEVRRIRAILHQAKSAGLAAQNRENLPNFESWLEGKIAYISMVDRARGAVLKAELDRVQRQRPAEDSSSTA

SEQ ID NO: 6556 - protein, 558 aa, unidentified
  source 1..558: note = Related to PABA01000104.1; note = Sandaracinus sp.
MGLWSWLGKVFRRVRAWLAYNPELPPPPPEAPKVDELPPPAGGSGGAGVGYGTATAKTWTTAKAKAQQKKPPPKPKKAVDPWDTGELLTLSPEELRARAMHIQPWKTQWIGRVDVIPPESDERTALVDRGLVLRGFFTEAELAEIHAIGDAWLEHKDAARLARARAAKDVDAALAQLRAEERERKARKKREAAERRERRAREIAERRRTDIVFLGRGVSHSLADRRAHVEKLEARGLPVLATPKDVADALGLPIPRLRFLAHHDEALQRAHYVQFEVPKRTGGMRTLAAPKPDLAKAQTWILEHVLAKVPVHDAAHGFVPGRSTATCARPHRGRAAVVNLDLKDFFPSITFPRVRGVFAELGYSPAAATILALLCTECPRREVRFAGVTYHVAVGERGLPQGACTSPALSNLVARRLDARLAGLAEKRGFAYTRYADDLSFSTGDPKAVAPLLAIVRKIVREEGFRENGKKTRVQRAAGRQTVTGLVVNEPDRLGLPREEVRRLRAILHNAKKTGLAAQNRGGHPDFEAHLRGKIAYLAMVDAPKAARFRAELDALTG

SEQ ID NO: 6557 - protein, 576 aa, unidentified
  source 1..576: note = Related to JADZAM010000038.1; note = Sandaracinaceae bacterium
MLARAKARSHFSAINIDVVVARALSAGERAEIAPWVEQLFRRGVLQGHAYTRTLVRAGDRVIWIYHPQDQAPEPVSPGSPAPSAAAASHAAPRPAAHAAGPLLDAGSLWKLSPDELRARALDVKPYLTAWIGRVDVIPPASDERTALIDRGLVLRGLLTEAQILEIHRVGDLWLEHSDAARLAQLRAYKKADDAILALRARDAELKAEKRKLAAERAQRRREEIARRKNEDIVFLGRGVSERLHDRRADVEKLERLGLPVLATPADLAKALGLRAPELRFLAFHAEATERPHYVQFDVPKRSGGTRRLSAPLPKLAAAQRWILDNVLCKVAPHDAAHGFVPGRSTLTNARPHLKKGVVVNLDLQDFFPSITFPRVRGVFASLGYSPAVATILALLTTEPPRRAVRYAERTLHVAVGSRGLPQGACTSPAISNLACRKLDRRLSGLAAKHGLTYTRYADDLTLSGPKDTHVARLLASLRHLIESESFRVNDKKGRVQRAGGQQTVTGVVVNDKPSVPRSERKRLRAILHQAKKTGLEKQNRAGVPSFEAHLRGKIAYVSMIDGTRGAELAKALDALD

SEQ ID NO: 6558 - protein, 544 aa, unidentified
  source 1..544: note = Related to SHBB01000309.1; note = Sandaracinaceae bacterium
MDALHERGVPGAYDFERTLLSVAGRSVWIYHPIGASPNQPSTPPPPVATPASPTRTKAKQKGKEKALPDPYAAGPLMTLTAAELRARALTIEPWRTAWIGRVDVIPPQSDERTALVDRGLVLRGFFTEEEIAEIHRVGDLWLEHKDATRLAKARAQKSADDAIQALREEAKRERARKKAEAAEKKKQRAAEVARRKAEDIIFLGRGVSGRLNDRRANVEKLAEAGLPVLATPADVAKALGLTVPRLRWLAFHAEASEQGHYVQFEVPKRSGGTRRLSSPKKALRAAQTWVLNNVLARCGTEDAAHGFVPGRSTVTNARPHVGRRVVVNLDLEDFFGTITFPRVRGLFVSLGYSPAAATVLALLTTEAPRREVRYDGKPYRVAVGPRALPQGACTSPALSNLVARKLDRRLTGLAKKHGWTYTRYADDLTFSRDDDTQVGALIATVRHVVTEEGFRINEKKGRVQKSGGQQTVTGVVVNDKLSVPRAEIRRLRAILHNAKKTGLSAQNTSGHPHFEAHVRGMIAYVRMVDPERGAKLAAQLAAVR

SEQ ID NO: 6559 - protein, 556 aa, unidentified
  source 1..556: note = Related to JACKEC010000023.1; note = Sandaracinaceae bacterium
MEIAPYVDGWVEAGLLDKHGYTGTEQIVAGRAVWIYHRVGQPVAGVTPSTRVNAPAPTAPKAAPQKAKKKEKKKRKWFDPWDAGDLMSLTAAELRARAMKIVPWRTAWIGRVDVIPPQSDERTALVDRGLILRGFFTEEQIEEIHRIGDLWLKHKDAAKLARAAAAKSADAAILQLREEAKQKKARLKEEAKARAEKQRADVAHRKATDIVYLGRGVSGQLHDRRSNIERLESQGLPLLAAPADVADALGVTVSRLRWLAFHDEAAPAGHYSFFEIPKRSGGTRLLSAPKAELRAAQSWIHENILKKVALEAPAHGFVPGRSTVTNAAPHVGRDVVVNLDLEDFFPTITFARVRGLFTSLGYSPAVATVLALLTTEAPRRRLTYAGRPYFVAVGRRGLPQGACTSPALSNLVARKLDRRMAGLAKKLGWTYTRYADDLTFSAPAGQRDTVGRLFAHVRHIVQDEGFRVNEKKGRVQRKGGRQTVTGVVVNERLAVPREEVRRLRAILNNAKKTGLAAQNRDDHPHFEAWLRGKIAYVSMVDPDRGAKLAAQLAELS

SEQ ID NO: 6560 - protein, 540 aa, unidentified
  source 1..540: note = Related to JADJGV010000002.1; note = Myxococcales bacterium
MGFWDKVKRFFGGGGALQPDPSAPTAAPPSTPTPSTPAPAPAHTAPAPPAARTAPAPTSTDDSARFRNPAILGLSAAELRKRALRINPYQTPWIGRVDTIPPQSDERTAIIDRGLILRGLLTAAQIEEIHRVGDLWLAHHDAMRLAAAAGAASGEAAVAAERARRAEAKRAKQAAAAARAAARAAAVAARRATDIIFVGRGVSAGLADRRSHVEQLAAAGLPVLAAPADLAAALGLTVPRLRWLCFHADAPAKTHYTYFTIPKRSGGTRKLAAPHRQLAAAQRWIFDQILAKLPITDAAHGFVPGRSTVTNARPHVGQRIVINLDLADFFPSITFPRVRGLFASLGYSPAIATLLAMLTTEAPRVEVEFAGRTHYVATGPRALPQGACTSPTLANLVARKLDRRLGGATRKLGWTYTRYADDLTFSAPAAGSAQVALIFARVRAIVTAEGFAVNEAKGRVQRGGRHTVTGLVVNDRLAVPREQVRRVRAILHGARTTGLAAQNRAGHPDFRAWLQGTIAYIHMVDPARGAAFQAQLDALS

SEQ ID NO: 6561 - protein, 467 aa, unidentified
  source 1..467: note = Related to JABFYI010000076.1; note = Polyangiaceae bacterium
MEELRARAAKVRPWLSPWGWRMDIIPPASDERTSLIDRGLVLNGYFTEAQIQEFHRIGDLWLEHKDTARTIAARALETAKADLEELKRKKLEEKAAKKVAAEERRKAHRAAIEKRRLEDIVFLGRGVSGKLADRRSDVEALQRAGLPVLSSPADVAKALEITIPTLRWLAFHTEAAGAIHYRQFEVPKKTGGVRLLSAPRPKLAAAQRWILESVLAKIAPEADAHGFVDGRSTVSNAKPHVGRDVVVNVDLKDFFPSIHFPRVRGFFETLGYSPAVATVFALLTTEAPRRRVEYAGKPYWVAAGPRGLPQGACTSPAISNLVSRRLDKRLSSMGKKHGATYTRYADDLTLSLDPGRREQIGMLLARIRHIAEDEGFRVHPKKVAIQRSGGRQMVTGIVVNRGLSVPREEVRKIRAVLHAAKRSGLAAQNREGHADFRAHLRGKIGYVMMVDRQKGERLLRELEALAP

SEQ ID NO: 6562 - protein, 659 aa, unidentified
  source 1..659: note = Related to JABFXY010000131.1; note = Polyangiaceae bacterium
MGFWDKVKSFFGGASPPGGGDGGDGGNGDSDEAPPLFNERGLPTDAFTQFVERRVRVRAKKEHLFTRHDIARIVVKKLESPPSAAETFAANAVLKLKKAGLFEELGYECSYSSTVRGEVFHPEGTDPDEYPGAGGGPPSGVRRVQPQPVAPVAPAAPPPPRPATPAAAAPARAPTTPYRSNPFDAGQSLGMSADELRRRAMKIVPWRTPWIGRVDVIPPASDERTALIDRGLVLRGYFTEEQIAEFHRIGDLWLEHKDAASFVAARGKEQAKLDLEALKQKKLQEKAEKKRAAAERRERLREAIAKRRAEDIVFLGRGFSGKLADRRSDVEALERAGLPVLSTPADVARAMELSIPTLRWLAFHSDAAETIHYRQFEVPKKTGGVRLLSSPLPKLAQAQQWILENVLAKIPTGGDAHGFVPGRSTVSNAKPHVGRDVVVNVDLRDFFPSIHFPRVRGLFESLGYSPAVASILALLTTEAPRRRVVYAQKPYWVAAGPRGLPQGACTSPAVSNLVARKLDTRLAAMSAKHGARYTRYADDLTLSLEPGRRDQIGMLLARIRHIAEDEGFTVHPDKVFVQRAGGRQLVTGIVVNRGLSVPREELRRLRAVLHAAKKTGLEAQNRDGLPDFRAHLRGKIGYVMMVDREKGSQLLRALEATPP

SEQ ID NO: 6563 - protein, 469 aa, unidentified
  source 1..469: note = Related to JAEUKE010000177.1; note = Myxococcales bacterium
MSAEELRKRAMKIVPWRTPWIGRVDVIPPASDERTSLIDRGLVLSGYFTEEQIAEFHRIGDLWLEHKDAATFAAQRARAQAKLDLDALKRQKLEEKAAKKQAAAARRAALRDAIAKRRAEDIVFLGRGFSGKLGDRRSDVEALERAGLPVLSTPADVARALGVPIPTLRWLAFHSEAAQTIHYRQFEVPKKTGGVRLLSAPRPKLAAAQRFILESILEKISPGPDAHGFVSERSTVTNARPHVGRDVVVNVDLRDFFPSIHFPRVRGLFEQLGYSPAAATVLALLTTEAPRRRVTYAGVAHWVATGPRGLPQGACTSPAISNLVARRLDKRLGAMATKHGGVYTRYADDLTISLESGRREQIGMLLARVRHIAEDEGFTVHPKKVAVQRAGGRQTVTGIVVNRGLSVPREEIRRLRAVLHAAKKTGLAAQNRDDLPDFRAHLRGKIAYVAMIDRDKGARLLQALEQTPP

SEQ ID NO: 6564 - protein, 550 aa, unidentified
  source 1..550: note = Related to JACQYO010000047.1; note = Deltaproteobacteria bacterium
MLRVAGFWDWLKKAFSDPEAPPGPSSSGSTPTPPSPAPSGAAPASATSTPTSSPGKSNDKSATKGRNYDANPEILGLSEAELRKRALRITPWRTAWIGRVDTIPPQSDERTAIIDRGLILTGRLTEAEVAEIHEVGDLWLKYHGRVELARSEAKKASQRAADQIAADREALKKQKKEEAAARKKARAEAILDRKQNDIVYLGRSVSARMNDRRANVEKLHQLGLPVLATPKDVAQLLEISVPKLRWLSFHAVATERPHYISFHVKKRSGGLRLLSAPHKELKKAQKRIATQILDKVDPGPVAHGFIKARSTVTNATPHVGQDVVLNLDLSDFFPSVTFPRVRGLFQSFGYSPAVATVLALLATESPRRTVKYDNRTYHVAVGERALPQGAPTSPAIANLVARKLDRRLSGLARSAGWSYTRYADDLTLSTRGEARKKTPWMYRQVREIISSEGFVVHPKKGRLQRKGGCQTVTGVVVNHKLGLPRREVRRLRAILHGAKKSGLASQNREGRADFPAYLRGKLAYLAMVDPQKGKKMLAELDTLEGRHRPE

SEQ ID NO: 6565 - protein, 547 aa, unidentified
  source 1..547: note = Related to JACPFK010000116.1; note = Deltaproteobacteria bacterium
MAGFWDRLKQLFGDGPSPKGSDPDAGPPSSSRSPSRDGDPVPPASSKAGAQSPEKGQKSPARSYDANPEILGLSESDLRKRALRITPWRTAWIGRVDTIPPQSDERTAIIDRGLILTGRLSEAEIAEIHEVGDLWLKHHGKADLARAEAKKASSAAIAELHAEREAKRKQKKEEAAERRRLRADGIAERRRTDIIFAGRSVSSRLADRRANVEKLVALGLPVLATPRDVAELLGISVSKLRWLAFHAEATERPHYVTFHVKKRSGGLRLLSAPHKELKRAQKKIATQILDRLDVGPAAHGFVKGRSTVSNAKIHLGQDVVLNLDLSDFFPTISFPRVRGLFQSFGYSPAAATLLALVATEAPRRVIKYEGRAYHVATGPRALPQGAPTSPALANLAARKLDRRLLGLAKSAGWVYSRYADDLTFSTKGEPRKKTPWVFRQISEIVSSEGFVVHPRKRRVQHKGGRQTVTGVVVNEKLGLPRDEVRRLRAILHGAKKNGLASQNRDGRSDFPAYLRGKLAYLAMIDPGRGKKMLRELDVIEGRKPAPT

SEQ ID NO: 6566 - protein, 305 aa, unidentified
  source 1..305: note = Related to JADJBV010000001.1; note = Deltaproteobacteria bacterium
MAFHAEAATRTHYVRFTVKKRSGGERQLAAPHQKLKAVQRQILQKILERLDPGPYAHGFVKQRSTVTNAQAHLARHDLINLDISDFFPTIHWRRVRGLFKSFGYSPAVATILALLVTEAPRTLAEYDGKKYWVAIGERVLPQGAPTSPAISNLVSRRLDLRLAGLAKKRGWRYTRYADDLTFSAGEKKRPDIPWMMRQAKEILAAEGFVLHPNKQRVQRKGRRQTVTGIVVNQKLSVPREEVRKLRAILHGAQKTGLAAQNRENLPHFPAWLRGKLAYLSMVDPAKGKKMLAQLDALEGRRPTPV

SEQ ID NO: 6567 - protein, 545 aa, unidentified
  source 1..545: note = Related to JACKED010000002.1; note = Sandaracinus sp.
MWLYHPEGVDPRGTGKAPAAVLPPSPKAASTTGTAGSTTSATTASNNSSSTGGWKPPAERANDGDPFDTAGTLTLTPEQLHERAKKIVPWRTAWIGRVDVIPPASDERTALIDRGLVLRGLLTQEDIDEIHRIGDLWLLHKDADRMASTLAHKSAEAAIQARRRERAERKAQKKAEAAKKKAARDAAVAERRATDLFFLGEGVSSQLHDRRTEIERLETLGLPILATPADVAAHLGVEVPRLRFLAFHQEAAQTTHYVQFEVPKRSGGTRTLAAPKPGIAAAQERILETILAKLPLDEAAHGFVTGRSTVTNARPHQGRDLVINLDLKDFFPSVTFPRVRGLFRSFGYSPAVATILALLCTESPRRELSYDGRSYQVAVGARALPQGACTSPAISNLVARKLDRRLRGLAAKHGLAYTRYADDLTFSADADKRGELGMTLARLRHVIEDEGFALNPKKVRVQRKGGRQTVTGIVVNEPTKLGLPREEVRRLRAILHAAKTTGLQAQNRAGHPDFRAHLAGKIAYLAMIDPARARTLREALAACTG

SEQ ID NO: 6568 - protein, 396 aa, unidentified
  source 1..396: note = Related to JAGQRJ010000919.1; note = Planctomycetes bacterium
PSDNPPSERGLKAEQREAARRKEAREEAQREARLARVEARREREAALRQRLAREVLYAGEGVSATVAHAASDVARLEAGGLPVAHSALDLAHLLGLDLPALRWLTFHREVARSTHYRQYQVAKRRGGFRTISAPRPKLKAALRAVRERILGRLAVSPQAQAFVPGRSTLTNARPHLRAAVVVKLDVVDFFGSFSFPRVRGWFRARGYSGMVSTLLALLTTEAPRVEVELDGARYYVATGPRVLPQGAPTSPELTNLLALRLDRRLAAYGAKHGWTYTRYADDLTFSRADEPEGCVSRLLGTAEAILRDEGLRLNHDKQCVTRRGRQQRVTGIVVNEVAGLPRRDLRTFRAAVHRVTRDGFKDVHERQRMLGYASYVRMVKPALGERWLEALREVRS

SEQ ID NO: 6569 - protein, 394 aa, unidentified
  source 1..394: note = Related to JAHBXY010000086.1; note = Planctomycetes bacterium
MTEGPRKSVRVEAEEAARRAEAREEARRAARLARAAAVRARRATHAARLTREVLHAGEGVSARLPAARSDAAALERRGLPVMHDAADLATLLGMDMRALRWLTYHRDVATVTHYRQFQVPKAKGGVRTISAPRPALRAAQQAIRQHVLARLEPTVHAQAFVRGRSTLTNARPHLRAAVLVKADIRDFFGAIDFPRVRGLFEALGYSGMVATLLGLLTTEARRVEADLDGQPAWVAVGPRALPQGAPTSPELTNQIARRLDARLAGYARRHGWVYTRYADDLAFSSQDGARERVGRLLGVVRAALEGEGFQLNPDKLVVVRRGRQQRVTGVVTNDVAGLPRATLRRFRAAVHRVTRAGFADPAERARMLGYASYVKMVKPALGERWLRALREVPA

SEQ ID NO: 6570 - protein, 428 aa, unidentified
  source 1..428: note = Related to JAKCFI010000006.1; note = Myxococcus stipitatus
MSWFASTLAWFKRWTRAKPVTRDVSGLDAPTGRDGRPLDVVSETVRLSGPLKPGHLRQIKRDPRLLPKGKRVYARNLKRWMGAGEARRFFSRSMLTRDRSVRDLLPDEAQLARYGLPVWRTEEDVAAALGVTVGRLRHYASHRPRERVRHYVTFTVPKRSGGVRWVHAPKRRLKTLQRRLLMLLVAKLPVSAHAHGFVTGRSVRTGAAPHVGRRVVLKLDLKDFFPSVTLPRVRGLLLALGYGYPVAATLALLMTEAERQPVEVDGTVFHVPVSARVCVQGAPTSPGVCNAVLLRLDRRLAGLAKRYGYAYTRYADDLTFSGDDLGALERVRALAARYIQDEGFTVNRDKTRVQRRGGAQRVTGVTVNAGLGLSREERRRLRAMIHQEGRDGADAERSAYIDGMLAYVKMLNPEHAEKLSRGRKRRGS

SEQ ID NO: 6571 - protein, 428 aa, unidentified
  source 1..428: note = Related to NZ_CP012109.1; note = Myxococcus sp.
MSWLDSTLSWLKARFTRPVTRSTTGLDAPVDAQGRRVDVVSETVVMSGPLKPGHLRQIHRDARLLPKPQRRYTPGRAKWMPAAEARRLFSGTLRTRNRNLRDLLPDEAQLARYGLPVWRTEEDVAAALGISVGMLRHYSIHRSRERVRHYVTFAVPKRTGGVRLLHAPKRRLKALQRKLLEVLVSKLPVSQQAHGFVSGRSIKTGAQPHVGRRVVLKLDLKDFFPSVTSARVRGLFIALGYGYAVAATLAVLLTESERQPVDIEGTVFHVPVGPRVCVQGAPTSPALCNAVLMRLDRRLAGLARRYGYTYTRYADDLTFSGDDLSALERVRALAARYVQEEGFTVNRDKTRVRRRGGAQRVTGVTVNATLGLSREERRRLRAMLHQEGRDGEDSTRRAYLDGMLAYVKMLNPEQAARLVRKRKPRAGG

SEQ ID NO: 6572 - protein, 426 aa, unidentified
  source 1..426: note = Related to NZ_FOIB01000012.1; note = Myxococcus fulvus
MSWFDSTLGWFKGLFTPKPVTRDVSRLDGSARDASGRAADVVRETVATSGPLKPGHRREIIRDARLLPKGRRVYTPGRKPLMTRGEARRFFSTTFRTRNRDVRDLLTDEAQLTRYGLPVWRTEEDVAAALELTVGQLRHYATHRIRERVSHYVTFSVPKRSGGTRLLHAPKRKLKALQRRLLTLLVAKLPRSEHAHGFVSGRSIKTGAAPHVGRRVVLKLDVKDFFPSVTVGRVRGLLLALGYGYPVAATLAVLMTEAERQPVEVEGTVFHVPVGPRACVQGAPTSPGLCNAVVMRLDRRLAGLARRYGYTYTRYADDLTFSGDDVGALEKVRALAARYVRDEGFEVNAAKTRVQRRGGRQRVTGVTVNAGLGLSREERRKLRAMIHQEDGGDAKQRARIDGMLAYVKMLNPEHAARLARRRKPRG

SEQ ID NO: 6573 - protein, 426 aa, unidentified
  source 1..426: note = Related to NZ_JAAIXY010000026.1; note = Myxococcus eversor
MSWLDWFKGLFSPKPVTRDVSRLDAPFERDASDRPPDVVRETVATSGPLKPGHLRQILRDARLLPKGKRVYTKKRKRLFSALEARRFFSTAFRTRNRNVRDLLPDEAQLARYGLPVWRTEEDVATALGLSVGQLRHYSTHRARERVSHYVTFTVPKRSGGQRLLHAPKRKLKAIQRRLLDVLVSKLPVSEQAHGFVTGRSIKTGAAPHVGKRVVLKLDLKDFFPSVTVSRVRGLLLAFGYGYPVAATLAVLMTEAERQRVDVEGTVFHVPVGPRVCVQGAPTSPGLCNAVLTRLDRRLAGLGRRYGYAYTRYADDLTFSGDDVGALEKVRALAARYVREEGFEVNAEKTRVQRKGGRQRVTGVTVNEGLGLSREERRKLRAMIHQEDRDGGDAKRSARIDGMLAYVGMLNPEHATRLARYRKPRGG

SEQ ID NO: 6574 - protein, 431 aa, unidentified
  source 1..431: note = Related to VBLP01000080.1; note = Deltaproteobacteria bacterium
MGSWLRRVFGPGAESPSGDSSGADRADRAGPATASAAAAAGTRRGGPLRPNQRREAVRDERLLPKPEPRRPWRAPKSRPIIPADAGARLFSDSLRTRNRELRTLATDPAQLARHGLPIWDTERDVADALGISLGELRHHAIHRRRERVEHYVTYAIAKRSGGQRIIHAPKTRLKAILRKLHGALVGKLPVSEHAHGFVAGRSVRTGAAIHVGKRVVLRLDLREFFPTVTAARVRGYLIALGYGYPVAATLALLTTEPPRQRVDIDGTIFHVPVGPRTCVQGAPTSPGLCNAILHKLDRRIAGLARRAGFAYTRYADDLTLSGDDLDTAHRLRRRVERVIREEGFEVNPAKTRVMTGRGAQRVTGVTVNRVLGLSRRERRQIRAMVHCGDPDRARQVEGLLAWVEMLNPAQADALRRAPRKPPARPGARPDR

SEQ ID NO: 6575 - protein, 440 aa, unidentified
  source 1..440: note = Related to NZ_JAHXBF010000024.1; note = Hyalangium sp.
MSFFSTLRAWMGSLFGEKPVTREVTRLSSEPETPSAKQGPTKTVLGRAKDTVVEKVVMTGPLKEKHRRLLKRDARLLPKPSRKRRWEKREKVMSQAEARRLFAGTLRTRNRNHRDLLPDEEQLVRYGLPVWRTEEDVAQALGLTVRRLRHFSIHRERDPVSHYITFAVPKRSGGQRLIHAPKSGLKAVQRKLLSLLVEKLPVSPHAHGFVKGRSVRTGAEGHVGKAVVLRLDLKDFFPTVTYARVRGLFIALGYGFPVAATLAVLMTESERQPVEAEGKVYFVPVGPRVCVQGAPTSPALCNAVVLKLDRRLAGLARKHGFTYSRYADDLSFSGPSEETAERLRALAKKIIEEEGFQVNAAKTRLQRRGGRQTVTGVTVNQVLGLSRKERRKLRAMIHQETSRPADAERSARIDGKLAYLSMLNPQQAEALRTRRKGRTS

SEQ ID NO: 6576 - protein, 433 aa, unidentified
  source 1..433: note = Related to NZ_JMCB01000011.1; note = Hyalangium minutum
MSLFPKLLTWVKTVFGQGPRTRQVTRLSSANGGPVDASGRPVDVVTEEVVLKGPLKEKHRRLVKRDPRLLPKPPRKSHWEKRKKVMSAEEANRLFSGTLRTRNRNLRDLLPDEAQLERYGLPVWRSEQDVATALGITVRQLRHFSVHRQRDRVSHYVTFALPKRSGGQRLIHAPKKGLKAVQRKLLSLLVEKLPVSPLAHGFVKGRSVRTGAEGHVGKAVVLRVDLKDFFPSVSYARVRGLLIALGYGYPVAATLAVLMTESERQPVEVDGQVFFVPIGPRVCVQGAPTSPGLCNAVVLRMDRRLAGLARKHGFTYSRYADDLSFSGPEQKTAEKLRALAGKIIAEEGFQVNAPKTRLQRRGGRQTVTGVTVNQVLGLSRKERRKMRAMIHQEASRPADAENSARIDGKLAYLSMLNPRQAEALRTRRKGRTR

SEQ ID NO: 6577 - protein, 436 aa, unidentified
  source 1..436: note = Related to JAEUJQ010000080.1; note = Myxococcaceae bacterium
MSLFDRLWGFFKGLTSKPVERDVTRLPSHDAKDGRAADLTKEVVRTSGELKPHHRRLITRDQRLLPDPSRKAHWGPLGYTARKKVFDASVAGRLFAGTLRTRNRELRTLATDPAQLERYGLPRWEDEATLAAALGLSVNQLRHLSTHRLRERVPHYVAFAIAKRSGGERVIHAPKKRLKAVLRAVHAQLVSKLPVHPAAHGFVKGRSVKTNAEGHVGRAVVVKLDLEDFFPTVTYQRVRGLLVSLGYGYPVAATLAALMTESERQPVELDGEVVHVPVGPRVCVQGAPTSPGLCNAVVRRMDARLSGLAKKLGFTYSRYADDLAFSGDDPKQVDVLIHRATRVIATEGFRVNGKKTRVMRRGAAQRIAGVTVNATLGLSRKERRLLRAAAHREKTSTVDAKEQAVLTGQLAWVQMLNPSQAEALRRRRARAIGPPA

SEQ ID NO: 6578 - protein, 431 aa, unidentified
  source 1..431: note = Related to QFQP01000022.1; note = Archangium gephyra
MNWLRRFFAWLFGPKQVTRDVARLPDHSGGRAPDVLKEVVQTGGPVKPNYRRLAVRDARLLPDRSRKGGWTGLAWRAPTSVMTGKESRRLFSNSLRTRNRNLRTLATDEKQLARYGLPLWRTETELAAALNLSIEQLRHFSIHRVRDRVPHYVAFAIPKRSGGERVIHAPKKKLKAVLRNVNDQLVSRLPVHAAAHGFVKGRSVKTNAEPHVGRAVVVKLDLEDFFPTVTWARVRGLLISLGYGYPVAAALASLMTESERQPVTVDGQTFHVPVGDRVCVQGAPTSPGLCNAVTRKMDARLSGLSKKLGFTYSRYADDLTFSGDDAKQIETLLNRATRIIHTEGFVVNGKKTRVMRSGNSQKVAGVTVNETLGLSRKERRKIRAALHQATPEKRAQLEGTLAWVHMLNPEQAAKLKADAVRAPTSPGPTTT

SEQ ID NO: 6579 - protein, 434 aa, unidentified
  source 1..434: note = Related to MWCO01000010.1; note = Deltaproteobacteria bacterium ADurb.Bin207
MTWLIALMVLAGVFVLLRALARKKQNAIHTIEPGLTQDEPTSDSASGGSKSQLEPKTTQSLRKQTIDERLLPKAPSRGPHHPRSRLFDAASARRRFSHSMRCKNRDLSVLAEDPEQLARHGLPLWRNEAQLAEALGLSVGQLRHLSMHRIAERTPHYITFSIPKRSGGNRLIQAPKRKLKAAQKKVLSLLIHKLPVHEAAHGFRQGRSIRTGAEPHVHRRVVIRLDIKDFFPSLTFARIRGYLIAMGYGYEVATTLACLCSEPQRQPVEVGGEIVHVPVGPRVAPQGAPTSPGLLNAICHKLDCRMQGLARAHGFAYTRYADDLTFSGDYPDRVGKILSRARAIIRSEGFEVNPSKTLVMRRGKAQRVTGVTVNETLGLSRQQRRLVRAAIHQASFVSPMDGTSKARLLGKVAYIQMLNQSQAEPLRRQTEKLT

SEQ ID NO: 6580 - protein, 322 aa, unidentified
  source 1..322: note = Related to NZ_CP011509.1; note = Archangium gephyra
MGFVDWLKGLFRPKPLMRDVSRLDREGGSLDAVQEEVRPESGPLKPGHLRTVRRDPRLLPKPKPKTPLRGKRKKWMAASESRRLFAGTLRTRNRHISDLLPDEAQLQRLGLPVWRDEGEVAVALGVSVKELRFFSIHREAERAPHYVSFSIPKRNGGRRLIMAPKRRLKALQRKLLPLLVDKLPVSGHAHGFRAGRSIRTGAEPHVGKAVVLKMDLADFFPSVTYVRVRGLLIALGYGYTVAATLAALMTEAERQPVEVNGVRLHVPVGPRACVQGAPTSPGLCNAVVRRLDLRLAGLARKHGFSFTRYADDLCFSGAHWRR

SEQ ID NO: 6581 - protein, 429 aa, unidentified
  source 1..429: note = Related to JAFLEF010000003.1; note = Verrucomicrobia bacterium
MSLWRWIKSWFGAAPTRDISRLDTTRSASSATGDVEERIDISGGPLKEHHRRRALRDPRLLPKIKSPARQLGLTKKKAVMSQTEAKRLFGGTLRTRNRQLRDLLPDEEQLKRLNLPLWRTEDDVAQALGISRRELWFFSIHRERERRPHYVTFSLPKRSGGQRLIQAPKRRLKSIQRRLVSLLVSHLPVSEHAHAFRPGRSIRTGAEPHVGHRLLLKLDLQEFFPSVTFARVRGLLISYGYSYPVATTLAVLMTEAERQPVEVDGEVFFVPVGPRHCVQGAPTSPGLCNALLLRLDRRLAGLARKRQLTYTRYADDLTFSGDLDRAQAESLRALATHLIASEGFTVNSKKTRIMASGARQSVTNVVVNQTLGLSRKERRRWRASAHQLSRRPESERAGLRAQLEGRIAFLHMLNPRQAEALARRLPALQ

SEQ ID NO: 6582 - protein, 424 aa, unidentified
  source 1..424: note = Related to WRPG01000015.1; note = Verrucomicrobia subdivision 3 bacterium
MGLLDFIRSLFGPPKRDISRLSGETVAGEDEVDERVDVSGGLLKEHHRRRALRDPRLLPKRKSVGRQLGLAKRKRVLSAAEAERLFSGTMRTRNRRLRDLLVDPEQLKRLGLPLWKTEEEVAAALGISLRELWFFAIHRERETQPHYVTFAIPKRSGGKRTIMAPKRRLKAIQRKLLGLLVEKLPVSEHAHAFRRGHSVRTGAEPHVGKRMVLKLDLKDFFPSVTMARVRGLLIACGYSYPVATTLAVLMTEAERQLVSVEAEVFHVPVGPRHCVQGAPTSPGLCNALVLRLDRRLAGLARKRGLAYTRYADDLTFSGEFDRAAAQQFRQVASRIISEEGFTVNTAKTRLMGRGARQSVTGVVVNSVLGLSRQRRRQLRAMAHRLKLAQRAGTAEGTELARFAGHMAYLAMLNPRQAARIPVVD

SEQ ID NO: 6583 - protein, 421 aa, unidentified
  source 1..421: note = Related to JAFEGM010000010.1; note = Verrucomicrobia bacterium
MSLLAWLKRLFGREVRRDVAQLERGEVDAVAETVDLTGPPLRPHGQRRAWRDRRLVPKRRSLGRALRLTKRQPLLSRTEADRLFSGSARTRDRQLRDLAPDEEQLRRYGLPVWRTEQELANALELTLGQLRHFAIHRERERQPHYFTFAIPKRSGGERHILAPKRRLKALQRRLLEQLFARLPVGEPAHGFRRGRSVRTAAEPHVGQRRLLQLDLQDFFPSLTFGRVRGLLIGYGYGFPVANALALLVTECVRQPVEIDGEIFHVPVGLRHAVQGAPTSPAIANALVLRLDRRLAGLARRFRCRYTRYADDLTFSGELDAAAAQQLRRLAGHIIRSEGFAVNAAKTRSAGPGARHEVTGVTVNEVLGLSREERRCLRAAAHRLHREPDNAELAARLHGQLAYLHMLNPAQAERLRQRLPTR

SEQ ID NO: 6584 - protein, 428 aa, unidentified
  source 1..428: note = Related to JACSRI010000083.1; note = Opitutaceae bacterium
MSLFDWIRQRLLGGARRRDVSRLESGDDALDSVTELVAVRGGPLKPGHRRLALRDPRLLPKPPRAPVRLGKRKKNPFLATAEASRLFSESLLTRNRGLRDLATDEAQLTRLGLPLWRTESEIATALGLTVGQLRHFSIHRERERTPHYVTFAIPKRGGGERLIMAPKRRLKAIQRTLLAQLVDKLPVTEHAHGFRRGRSIRTGAEPHVGRRVVMHLDLKDFFPSVTFARVRGYLVACGYGYPVATTLALLMTEAARQPVSIEGEIFHVPTGLRHCVQGAPTSPALCNAIAAKLDRRLAGLARKFGVAYTRYADDLTFSGDLDAKITGRLLHHVGAIIQAEGFTINSAKTRILHRGRRQSVTGVTVNKDAGLSRTERRVLRATAHRLTTLRREGAPDAAAERVLAGQLAYLAMLNPAQAAAVRNRQGPV

SEQ ID NO: 6585 - protein, 475 aa, unidentified
  source 1..475: note = Related to NZ_CP036275.1; note = Maioricimonas rarisocia
MRVEFFILRIWTRIAAGLSRLPRWAKIPIWIVLAILMVLVLVIGGLLATVFGLIRGILFRIFPPPPSRDVSRLDMDGAELDAIRETIEDEGKPLRESHRRLIYRDPRLLPKPKPPADVWPRPKRKRVMQVEEASRLFSGTLRTKDRNIRDLLADEEQLERHRLPSWQTESDLADALGLTMGQLRHYSIHRESETARHYVQFAIPKRNGRQRIIMAPKTRLKGIQRQLNEQLVQRLPVSPHAHGFRKGRSVRTGAEPHVGRKVLLKMDLKDFFPSVTFGRVRGLLISLGYSYPIATTLAVLMTEAERQPVQLEDRLVHVPVGHRYCVQGAPTSPGLCNAICLRMDRRLAGLARKYGWSYTRYADDLTFSGDDESALCDIRRLARQICRDEGFEVHPEKTRVMRQGRKQTVTGVTVNEVAGLSRKERRRLRAAIHRLKHPSPDRPASMTESQVRGHLAWLHMLNPEQAERLREQWTS

SEQ ID NO: 6586 - protein, 421 aa, unidentified
  source 1..421: note = Related to JACKEU010000003.1; note = Alphaproteobacteria bacterium
MSWWSSLWERLTAWWRGEPTRSVARIGGDADVDQVVETVRLSGTLTEHGRRRVLRDPKLLPKPKTAGWSMGKRPRILTRDEAYRLFGGTLRTRNREIRDLLPDPDQLQRHGLPHLASEVELAALLDVSLTELRFFSIHRVAERQPHHVVFRIPKRGGGFRTITAPKRRLRTVQRRLLARLVDLLPVSDAAHGFRKGRSVATHAAPHVGRKVVVKLDLEDFFHTVTWQRVRGYLIAMGYGYPVATTIAVLVTEAERQPVDLGDRVVHVPVGPRRCVQGAPTSPALCNAIAHKLDRRLLGAARALGFTYTRYADDLTFSGDDATRVSALLGLVRKIVVGEGFRLNDAKTRVMRAGGRQRVTGVTVNQVLGVSRRERRRVRAMIHQHGGDPAWRDRIAGQLGWVGAVNPEQAGTLRARWKRGGG

SEQ ID NO: 6587 - protein, 418 aa, unidentified
  source 1..418: note = Related to DTTU01000358.1; note = Phycisphaerales bacterium
MALFRWIADKLFGPPKRDLSRLENNDVDLVDESVDLSGGPLKPGHHRKSLRDRRLLPKRKASGLSPLKRVKLFSKEQSDRLFSRTMRTSNRNVRDLTEDEDQLHRYGLPLWKSEHDLASALSLSVKELRHFSIHRFQDKVCHYVLFRIAKARGGHRLIMAPKTRLKKIQRELLRQVLEKLPPPPHAHGFVKGRSVKTGASQHVGKKVVVKMDLADFFPSVTFPRVRGLFIALGYSFPVATTLAVLCTECERQRVKQGDDLFHVPVGERHCVQGAPTSPALCNQIARKLDNRLHGLALKLGFTYTRYADDLTFSGDNPEKLKSLLGLTRKIIEDEGFRLHSKKTRILHSGGHQHVTGVTVNQALGLSKKERRRLRAELHQLSLNQQPDPQQIARLKGKLAYLEMLNPEQAARLRAKYPL

SEQ ID NO: 6588 - protein, 452 aa, unidentified
  source 1..452: note = Related to JAGOBA010000003.1; note = Alphaproteobacteria bacterium
MSGFVTFIAVILGVIVYTYLKRANARRKHKRVVEEFKKAPVRDVSTVAGEGDAGLKTETIQIGGPLKPNHKRLALRDDRVLPKPPLGPDYYSKWPRPPRPKYFSERDADRLFGPSLRTSARDVMDLATDEAQLNRYGLPLWRTEAEAAAALGIPHAQFRYFSQHRHREHISHYVAFAIPKRSGGERIIHAPKTKLKAVLRTLDKLLVSKLPVSDHAHGFVRGRSIATNAKPHVGKPMVAKFDIKDCFPTLTVNRVRGLLLALGYSYPVAAALAVLMTEPPRQLVEAEGNIYHTPIGPRVCVQGAPTSPGLCNAILLRLDRRLAGLAKKRGLAYTRYADDMTFSGPEAEIKKLLGIVPKIVSEEGFELNTEKTRLMRQSGRQVVAGVTVNKDMGLSRKARRKLRAAIHHNSQGKLDVTAAARLEGKLGYLHMLNVDQARRLREGRDGTAAQQR

SEQ ID NO: 6589 - protein, 447 aa, unidentified
  source 1..447: note = Related to JABFRX010000136.1; note = Alphaproteobacteria bacterium
MTGILRLLVFIGLFVAVYYGYKAYQRWRHKQTVKEFKKAPVRDVSTVAGEGVASLKTEKINIGGLLKPNHRRLALRDERLLPKPPLGPDYYSKWPRPPKPKYLSENDADRLFSPSLRTSVRDAMDLATDEAQLKRYGLPLWKNEADVANALRISQGQFRYFSQHRHREQTPHYVAFAIPKRNGEERIIHAPKTKLKAVLRALDKQLVSKLPVSEHAHGFVKGRSIATNARPHVGKPMVAKFDIKDCFPTITMGRVRGLLLALGYSYPVAAALAVVMTEARRQPVEAEGKLYHTPTGPRVCVQGAPTSPGLCNAILLRMDRRLAGLAKKRGLAYTRYADDLTFSGPQGEIKKLLGLVPKVAAEEGFAINHDKTRLMRQSGRQAITGVIVNKDMGLSRKVRRKLRAALHHQKLGKADPANTDRLKGKLAYLNMLNPAQAKRLKDVYAPL

SEQ ID NO: 6590 - protein, 452 aa, unidentified
  source 1..452: note = Related to JAFMSC010000026.1; note = Hyphomicrobiaceae bacterium
MPHLTYLQIGVLLLIVGLLLTRGARRWLVLRRWSKAPQRDVSALATTGEAQFKGEAITTAGPLRPGHRRLVLRDKRLLPKPPPDPAILRRWPRPPKPKYLTEQEADRLFSPSLRTSNRNVMDLATDEAQLQRYGLPVWNSEDDVASALSLSLGQLRHLSQHRHRETAPHYITFAIPKRSGGERLIFAPKRRLKAVLRTLDRLLVCKLPKSEHAHGFVRKRSVATNAAPHVGKAVLLHFDIKDCFPTIHFGRVRGLLIALGYSYPVAATLAVLMTEAPRQPVAAEGKLYHVPTGPRVCVQGAPTSPGLCNAILLRLDRRLSGLASKYGFGYTRYADDLAFSGDDATKVARLLKLVPAIVAAEGFAVNPVKTRVMRAGQRQAVTGVIVNKAMGLSRQERRKLRAALHQQGTAGADPGDELRLHGKLAYLFMLNKLQAAALGWRQGMRPTLTNPP

SEQ ID NO: 6591 - protein, 447 aa, unidentified
  source 1..447: note = Related to JAFECH010000062.1; note = Proteobacteria bacterium
MTHLAALVLAYFLVVGIRTAWRNRKRKQAEKKWAQAPQRDVSAVADVGQAEFKQEIIKTSGTLKPNHRRLILRDNRLLPKAPPDPKQRRWPPPPRTKYLTEHEADRLFGPSLRTRNRDVMDLAIDEAQLERYGLPVWKTEDEVAAALSLTPGKLRYFSQHRFRETASHYVTFAIPKRSGGERLIHAPKRQLKAVLRRLNTLLVSKLPVSKHAHGFLQGRSVATNAAPHVGKAVVLHFDIKDCFPSIHYGRVRGLLIALGYSYPVAAALAVLMTESPRQPVVAEGKTYQVPIGPRVCIQGAPTSPGLCNAILLRLDHRLAGLARKHGFAYTRYADDLTFSGNDTKKIAKLLKLVPQIIFEEGFAANTKKTRVMRAGRRQAVTGVVVNKDMGLSRQERRNLRAALHRQNTSPNTNPRERMRLEGKLAYLYMLNRDQASALGWKKPARSV

SEQ ID NO: 6592 - protein, 446 aa, unidentified
  source 1..446: note = Related to JAFMSG010000097.1; note = Bradyrhizobiaceae bacterium
MSSFLFAIAAIAAVIVWQRRKEIVRTLRWKHQPIRNVAALAVTDDASVAEEVITTAGPLKPQHRRLILRDKRLLPKPPLKFDRYVWPRPKQPRVFTKAEAGRLFSATLRTRDRNIRDLATDPEQLARYGLPIWESEADLAAALSISVGQLHHYSIHRERERASHYVCFAVRKRGGGERLIYAPKRRLKELQRRLHDLLVRMLPVSAHAHGFVPGRSIATNAAPHVAKAVVLKFDIKDCFPTIHFGRVRGLLLAYGYSYPLATTLAVLMTEAPRQPFEIGGALYYVPVGPRVCVQGAPTSPGLCNAVMLKLDRRLAGLAKANGFAYTRYADDLTFSGDKEEAVDRLLAWVPRIAEAEGFALNASKTRIMRRGGRQTVTGVIVNKSAGLSRQERRRVRAEIHRLSQSATAPENGATQRLRGKLAYLNMLNPLTTAPLLAAFARLSGRT

SEQ ID NO: 6593 - protein, 428 aa, unidentified
  source 1..428: note = Related to JAAZAJ010000036.1; note = Planctomycetes bacterium
MGLIDWLRALVGKPRQVRRNVSTIAATSGAAPAEQTEEIVQTEPQPMKPLHRRLTFRDARLLPKPKRKSGQFTWPRLKKKRYMQADEACRLFSTALRTRDRSIRDLATDKAQLSRYGLPVWHTEQDIAAALALTPKQLQHYSIHRCRETSPHYVAFAVPKRGGGHRIIHAPKRRLKAIQRKLNELLVEMLPISSYAHGFVKGRSIATNAKSHVGKAVVLKFDLKDCFPSIHFGRVRGLLIALGYGYPVAATLAVLMTEAPRQPVEVDGRLYHVPTGPRVCVQGAPTSPGLCNAVLVRMDRRLGGLARKYGFAYSRYADDLTFSGNDTAAVRPLLGIVPRIVQEEGFTINSGKTQIRRRGRRQRVTGVIVNECAGLSRRERRRLRAAIHNQQRHGAEGKSRRRLGGKLAYLKMLNPTQAGPLIAAFRSA

SEQ ID NO: 6594 - protein, 429 aa, unidentified
  source 1..429: note = Related to QQVE01000048.1; note = Planctomycetes bacterium
MPGGNPVGLLDWLASWFGGRRRYRDVSGLAEADADLTRERVDTGGGPLKPQHLRQAVRDARLLPKPQPTAGMWVPGQKKKVMSQREADRLFSATFRTCNRNLRDLTTDEEQLRRYGLPVWKSEADVARALQISEGQLRHYSIHRQRETSPHYVTFALNKRRGGHRLIHAPKRRLKQLQRTLDALLVKKLPVSTFAHGFRAGRSVASNARQHVGKAIVIKLDLQDCFPSIHFGRVRGLLVALGYSYPVSTTLAVVMTESPRQPVAAEGKIYHVPVGPRVCVQGAPTSPGLCNAVLMRLDRRLAGLAGKHGFTFTRYADDLTFSGDDPAKIKLLLTIAACIVREEGFRLNPQKTRVLRQGARQRVTGVVVNDQPGLSRTERRKLRAAIHRLDPADEAACRRIEGKLAYLQMLNPDQAAPLRSAFVAARGRG

SEQ ID NO: 6595 - protein, 424 aa, unidentified
  source 1..424: note = Related to JAGQOZ010000372.1; note = Planctomycetales bacterium
MGLWNWLKTWLRPHPITRNIANLDGDQAQSVTEVVDTSGGPLKPHHQRLAVRDVRFLPKPQRPSSLPSWSRPAKPVVFSKSDAERFFSASQRTKNRQLRDLASDTDQLQQYGLPEWNSEDEVAAALGLTVSQLRHYSIHRQRETSPHYVMFAVPKRQGGHRIIHAPKRRLKKIQRMLLAELVSKLPVSEFAHGFRRQRSVATNATHHVGKAVVIKLDLADCFPSLHFGRVRGLLIALGYSYVVATTLAIVMTEAIRQSVEAEGKIYYVPVGHRFCVQGAPTSPGLCNAILMRLDRRLAGLAAKHGFQYSRYADDLTFSGDHPAKAPYLVALAGKIIRDEGFRVNRKKTRVLRPSRRQQITGVVVNQHVGLSRTVRRRLRAAIHQLSANDVHARNQIIGKIAYLRMLNPDQAAPLQAALDAKLQN

SEQ ID NO: 6596 - protein, 426 aa, unidentified
  source 1..426: note = Related to WGNR01000010.1; note = unidentified bacterium
MSFLNWLTSLFKPKPPARNISGLAGTDAIEVEEHVDLSGGPLKPKQLRLATQDKRLLPKAKKAIDPRNWVPRKKPKIMPREEADRRFSESLRTSNRKISTLASDVEQLERYGLPIWNSEADIAAALEMSTSQLRHFSIHRQRETSPHYVTFAIRKRTGGHRLIHAPKTRLKRIQRQLNELLVSRLPVSDAAHGFRAQRSVATNAEPHVGKQVVIKLDLADCFPTIHYGRVRGMLISLGYSYEVAAVLSLLCTEAERQPVAADGKTYFVPIGPRVCVQGAPTSPGLCNAVLLRMDRRLAGLAKKFDFQYTRYADDLTLSGDDASKAKVLIRLAKEIVQDEGFRLNSKKTRVVRHGQRQRVAGVVVNDQKGLSRTERRKLRAAIHQLDPADEKSARHLRGKVAYLAMLSEQQAAPLRAALAVKLSGDA

SEQ ID NO: 6597 - protein, 433 aa, unidentified
  source 1..433: note = Related to JAFGFF010000467.1; note = Pirellulales bacterium
MSFLDWLKSLFRPKPATRIVAGLSAADTSADAAKVREVVDTSGGPLKPGHCRRALRDSRLLPKPKPKSQGYVWPRPPKPKYLDRSEADRLFSTTLRCRDRNLRDLLPDPEQLDRYGLPLWQTEADLAEALGISVGMLRHYSLHRIRETTPHYVTFAIPKRSGGERLIHAPKRRLKAIQRRLHELLVSRLPVSAAAHGFRSGRSVATNAHPHINKAVLIKLDLKDCFPSIHFGRVRGLLVALGYGYQVATVLAVLMTEPPRQPVEIDGKLVYVPVGPRSCVQGAPTSPGLCNAVLLRLDRRLAGLARKYGFAYTRYADDLTFSGDDTAKIKLMITLSSKIVREEGFSLNRQKTRVLRRSRRQTVAGVVVNSTVGLSRRDRRRLRAEIHQLSQAAKPPDSHRVQRLAGKLAYLHMLNADQAAPLLVQFARLGDGS

SEQ ID NO: 6598 - protein, 440 aa, unidentified
  source 1..440: note = Related to PSQY01000124.1; note = Proteobacteria bacterium
MPLPAVRPVTGTPPSHSTLPALERARPAQPQTLQPPPTPQLQRAPTPPPQASEPQEAGVEQSQHRRLAVRDERLAQKLVTTQHAVTARRPSKRSFHRDEAARMFSSTLRTQRRGIRDLVTDEQQLVRYGLPIWRTEAELALALQVGLKALRHYTVHRAQDRVLHYVTFAIPKRSGGERLITAPKTRLKALQRRLNALLVSKLPVSEYAHGFRTGHSVLTNAKPHVGKQVVLRLDIHEFFPSIHFGRVRGLFLALGYGYPVATALAVLMTEAPRQPVQIGEVCLYPPCGPRTCPQGAPTSPGLSNALLVRLDRRLAGLAKQRGFSYTRYADDLTFSGDDIAAAHALRLAAARVVREEGFELNVKKTRVARRASRQLVTGVIVNRVLGLSRQTRRRLRAAVHQYLQAHAAGAADPRTLARLDGRIAYLSMLNSEQARRLTMD

SEQ ID NO: 6599 - protein, 419 aa, unidentified
  source 1..419: note = Related to CP036279.1; note = Planctomycetes bacterium Pan216
MGFFSWIWRLLGFAPRRNVSRLDTGDEDVVQEVVDLSGDPFKEHHRRRALRDGRLLPKRRQHTFWGSRKRYLSKEEADRLFSDTMRTCDRKIRDLLPDEEQLARYGLPPWRTEEDLARALGLTLKQLTFYALHRERERFCHYVSYARPKRNGGERIIMAPKRRLKELQRKLVDDLVRHLPVSEHAHGFREGRSVKTNAEPHVRKTVVVKFDLKDFFPSVHVGRVRGYLISLGYGYPVATSMAVLMTEAERQPVEIDGERYFVPVTSRYCVQGAPTSPGICNAILLKLDRRLAGLARSLEFAYTRYADDLTFSGNDVGAVERLRKSVQRIVHDEGFRVNSEKTRVMKRGACQRVTGVVVNDGVGLSRKERRRLRAMAHQLRQSANGEESKAARLRGKIAYLRMLNPTQAGAIERHWSNRG

SEQ ID NO: 6600 - protein, 419 aa, unidentified
  source 1..419: note = Related to JACQGK010000369.1; note = Armatimonadetes bacterium
MSLWDWIKERLFGVPPSRDVSRLEPGSGQRDAVTEAVDTGGGPLKPGHRRRAIRDRRLFPKARTPIGRRPRVMKPHEARRLFSASLLTRNRSIRDLAPDEEQLKRYGLPLWRTEDDLARALELSLGQLRWLSIHRERESCPHYVTFAIPKATGGERLIMAPKRRLRRVQRRLHELLVSRLPVSPQAHGFRPRRSVKTGAEQHLGKPIVLHLDLADFFPTLAWHRVRGLLIAYGYSYPVATVLALLMTEAERQPVEVDGKLFHVPVSPRYCPPGAPTSPGLGNALLLRLDRRLIGLARKFGFAYTRYADDLTFSGEAERKIAYGLVCRVREVVEAEGFSLNDRKTRFMGSGRRQTVTGVVVNRVLGLSRNERRRLRAALHQHRGEPDPQLLGKLAYLWMLNPQQAMALWPADWPRPRRAR

SEQ ID NO: 6601 - protein, 416 aa, unidentified
  source 1..416: note = Related to QWHO01000540.1; note = bacterium CPR1
MSLWKWLSSKLTGKPPRRDVSRLESEDEDQVSEAVDVSGGPLKPDHRRRALRDRRLLPKAQPPVRFGKKKRLMSKAEAQRLFGASMRTRNRTLRDLLPDVEQLTRYGLPVWKTEEELATALGLTQRQLWFFALHREKERAAHYVTFAIPKRGGGERHIMAPKRRLKALQRKLLGLLVEKLPVHEAAHGFRKGRSIKSGAALHVGKKLVLKVDLKDFFPTVTFPRVRGLLIAYGYGYPVATALALLMTESVRQPVEVEGKLYHVPVGPRHSVQGAPTSPGLSNALVLRMDRRLTGLARKFGFVYTRYADDLAFSGDHDHKTGWGLLQRARRIIAEEGFAVHPDKTVLMGSGRRQSVTGVVVNRTLGRSRQQRRRLRAALHRRRQAEARLRGQLAFLWMLNPAQASALWPEEWKKPQS

SEQ ID NO: 6602 - protein, 406 aa, unidentified
  source 1..406: note = Related to JADMJV010000021.1; note = unidentified bacterium
MSWLDWLKQKLLGIPPQRDISRLEGSSEEVREQVDVSGGPLKPKHRRRALRDRRLLPKARAPLGKRPKQMSHSQAQRLFSASQRTRNRQQRDLLCDPEQLQRLGLPGWRNEDDLAHSLGLTLRQLWSYSYYCQAENAPHYVAFAVAKRSGGERIILAPKRRLKALQRKLLDLLAQHLPVSPAAHGFRKGRNTLSNAREHVGQKVVVRFDLQDFFPHCSWQRVRGLLVAYGYSFPVATCLALLMTESERQPVETPAGLVYVPVRQRYCVQGAPTSPALANALTLKLDRRLSGLARKLGFRYTRYADDLTFSSSGLARLGVLKRAVTAIVEAEGFRLNDSKTRVMRQGRRQTVTGVVVNQVAGLSRQQRRQLRAALHQAAGQPDAHLRGMLAYLHGLNSEQARRLQPP

SEQ ID NO: 6603 - protein, 437 aa, unidentified
  source 1..437: note = Related to nan
MRLLILIALGFLFWRLWKLWRQLRLRHQARHPVRDIARLVDDADSDARGDTVERIDMSGGPLKPGHRRRALRDRRLLPKPKRDWSDPKPPKVMSLDAATRLFAGTLRTRDRHARDLDTDAEQLERHGLPPWRSEAEVAAALGIEEKRLRHYAIHRQRERVVHYIAFAIAKRNGGERVILAPKKELKALQRKLNKLLVDKLPVSDAAHGFRPGRSIASNAAPHAGKAVVLKLDLENFFPSLHVGRVRGLLIALGYAYPVAAGLAALMTESERQPVVVDGETFHVPTSSRHAVQGAPTSPGLANALALRLDRRLTGLARAHGFVYTRYADDLAFSSDDVATARQLLKRAESVIRAEGFRVNRAKTRVMTQASAQRIAGVTVNAAPGWSRAQRRKLRAELHRARTSGATDPSLWQKLRGKLAFVRMLNRAQGERMARADS

SEQ ID NO: 6604 - protein, 435 aa, unidentified
  source 1..435: note = Related to NZ_BLJN01000007.1; note = Steroidobacter agaridevorans
MRVLLLLFVIYVFWQIFVRFWPKRATRDLSRLENADDDAADEEVLETVAVDGGPLKEHHRRLALRDARLLPKAKPRAHTWPPKPKPKVMSMDEATRLFAGTLRTKNRKLRDLRSDDDQLRRYDLPRWASEEDIANALGISVARMRYYSIHREKERVSHYVSFAIPKRSGGERIIMAPKRELKKLQRDLDRLLVSKLPVSEYAHGFRKGRSIASNASAHVGRKVVVKLDLKDFFPSLHVGRVRGLLIALGYSYPVAATLATLMTEAVRQPVQVGDEIFHTPVGGRHAVQGAPTSPGLANALTIALDRRLAGAARELGFTYTRYADDLTFSGDDAGKARQLIRTCQRIVHAEGFALNDAKTRVMTQRGAQLVTSVTVNREKGLSRRRRRLLRAELHRAQREGGDATLWRKLRGKLAFVSMLNARQADALAKNVRFPG

SEQ ID NO: 6605 - protein, 436 aa, unidentified
  source 1..436: note = Related to SADD01000012.1; note = Lujinxingia sediminis
MPRAFRRGGTIFRSPRRFSHTVEEAGPERRRSPRRWLTPCASSTRGASMSLWQRLRDWIQPAPPAAKPPEQVSICEEPAHPSPEFNRRFTTSLRSADPSQTRRRTRSGRLRQRGLPVWRCDDDVAQALGLSLSELYHFACHRLADPHLHYVRFTIPKRGGEERPILAPKPRLKAIQRDLLELALHQLPVHRAAHAFLPGRSIATHARPHLQREFLLTLDLHNFFGALHVGRVRGFLMAMGYGWEVASTLALLCTEAPRQAVLVHGERLYTPTASRSLPQGAPTSPMLANAIVCRLDRRLSGLARSLGLNYTRYADDLTFSGDDPTRIASVMRLTHQIIAEEGFELATAKTRIQRRGQRQQVTGVVVNQTPGAPRARRRRLRAAIHRYAQACSRGEDDPLRRRQLEGELAFIHMLNPAQARALAAGLPDGPPVANAR

SEQ ID NO: 6606 - protein, 387 aa, unidentified
  source 1..387: note = Related to NZ_VOSM01000004.1; note = Lujinxingia vulgaris
MNLWQRLRDWMQPAPSPEHPGEISICKEREPPSPGFNRRFTTSMRSARHDELRRRTRSGRLRRLGLPVWRCDDDLARALGLTTSALYHFACHRLADPHFHYVSFTIPKRSGEERPILAPKPRLKAIQRDLLDQALSRLPVHRAAHAFVPGRSIATNARPHLRREFLLTLDLHNFFGALHVGRVRGFLMAMGYGWEVASTLALLCTEAPRQTVLVHGERLYTPTGSRTLPQGAPTSPVLANAIAYRLDRRLSGLARSLGLNYTRYADDLSFSGDDPTRIATLMRLSHQIIREEGFEVAPSKTRIQRRGRRQQVTGVVVNQTPGAPRARRRRLRAAIHHYARACARGDHNPRRRRQLEGELAFIHMINPAQARALAAGLPAAPPAANAR

SEQ ID NO: 6607 - protein, 389 aa, unidentified
  source 1..389: note = Related to NZ_QHKO01000004.1; note = Lujinxingia litoralis
MSLWQRLRDWLHTDTQPDSTPTPAPDSAPPSSPPSATHNRRFTASLRTHTPAQSLRRTRSARLKRHGLPLWRNDQALAADLDLSTPELYHFACHRLADPHRHYISFNIPRRSGASRAILAPLPRLKALQRRLLALALHRLPVHDAAHAFVPGRSIATNARPHLGKAFVLSLDLKDFFGSLHLGRVRGYLLAMGYGWEVASTLALLCTEAPRQPVQVQGEVRWAPVGSRTLPQGAPTSPALANAIAYRLDRRLNGLARSLNLTYTRYADDLSFSGDDPQVLGSLLRLTHQIVVEEGFELASHKTRVQRQGQRQQVAGVIVNQVLGRSRQERRRLRAAIHRYARAQARGESHPAWRLELEGRLAFLHMLNPAQARALSSGLPDEPPGASAR

SEQ ID NO: 6608 - protein, 454 aa, unidentified
  source 1..454: note = Related to QWHC01000005.1; note = Chloroflexi bacterium CFX4
MSRRGGKLCRSLLHGSHSSDKRGNRSITEIVAACLLCGWLFAISLPLPHFRKERTAMTNAADVLQAWRLNWQPDEFEWRSLTWENRVDLNREEREQRKRERARRDRLSFGGRLWGVGQAHRSAELDSERLARYGLPAFANERALAEWLGISLKRLRWYSYDRKVSPIYHYTRYTLPKRGGGQRVILAPKRTLKAIQHKILFELLAKVPNTDAAHGFIKGRSIATNAAPHVGKACVLNLDLKDFFPSITYPRVRGLFVALGYGFTIASVLALLCTESERISVQRGDKTRYVAINARHLVQGAPTSPAIANLMARRLDARLHGLAAKQGAAYTRYADDLTFSAESAEVATRLLRAAKRIIADEGLTLHMGKIRFFRQSARQVVTGLVVNDKVSVPRDLRRRVRAILHRAVQTGLAAQNREGRQHFRAYLHGLIGHIALQHPEQAAQMLAKLREIRD

SEQ ID NO: 6609 - protein, 395 aa, unidentified
  source 1..395: note = Related to JABTTZ010000003.1; note = Anaerolineales bacterium
MTSDALRAWRLSYTDEELQWRSADWRSEQSEWRAEREQQRRERRRRDRRYFGVGLNSQNLSRRALNEKKLTAQNLPILKNEKALAEWLNVELSRLRWYTYNQTTSSVYHYVRYVLPKRSGGQRVILAPKTGLKAIQRKILAEILNKIVLTEPAHGFRKGRNIVTNASPHAGKPFVLNLDLKEFFPSITFRRVRGLFTGLGYGYTIASVLALLCTESDREMIQRPDRPYYAGLSPRALVQGAPTSPALANLAARRLDKRLAGLAVKRGVTYTRYADDLTFSGEDRDVLFKLMKTAGHIIAAEGFTVHPKKTRFYQRGQRQIVTGLVVNDKVNTPRQMRRQVRAILHNAAQTGLNAQNRMNHPNFRGYVLGLIAHIGQTAPDLAATFRGQLVALSDS

SEQ ID NO: 6610 - protein, 395 aa, unidentified
  source 1..395: note = Related to JADYYJ010000076.1; note = Anaerolineae bacterium
MSDQSVLRDWRLNWHDDEFKWRPDQSWARRGQWLEERELARRARRRRDRGFFGDELWGTPLFKALHTPAALERFGLPAFENEAALAIWLGIPLTRLRWYTFSRLGSPVWHYVRYVIPKRSGGERVILAPKRELKGLQRKVLREILEKLPLSEPSHGFRKTRSIVTNAVPHTGKKYVLNLDLKDFFPSITFRRVRGLFVSLGYSFAVGTTLALLCTESDRAVMQRPDQRYYVSLNPRHIIQGAPTSPYLANLIARDLDLRLNGLARKHQVDYTRYADDLTFSGDDLDAILRILSVAKVIIKEEGFVLNPKKTRLYRRSGRQSVTGLVVNEKVNTPREMRRLVRAILHNAQKGGLNSQNQAKRPNFRAYVQGLIGHIGQSDPNRAAALLRQLAAIPD

SEQ ID NO: 6611 - protein, 375 aa, unidentified
  source 1..375: note = Related to NBMH01000138.1; note = Anaerolineaceae bacterium 4572_78
MSTFSSFIKNIKKGFTGKNKKPEKEIQSPKIAVALSSDVSKVPQKLDDVSLPVLRGKYALAKWLGISASRLTWFTYETKYNSVWHYVRHIIPKRNGGERVILAPKRELKALQRRVLDGILNQVPTSPQAHGFVMQRSITTNARPHVNKAVVINLDLKNFFPSVTLPRVLGIFRTLGYNKEVALALARLCTECDREVGPHLDSKYKDKEFFVSVTPRHLVQGAPTSPALSNLVCWKLDKRLNGLAQTYQFTYTRYADDLTFSGDDIQYVELILKVANGIVRDEGFKVNKDKTHVFYPSSRQVVTGLVVNDKVATPRQLRRQMRAIIHNAQFTGLEAQNYEQHPNFRYHLLGVAEFIGSTHPDKAEQMKQIIHALPS

SEQ ID NO: 6612 - protein, 377 aa, unidentified
  source 1..377: note = Related to JACCSL010001044.1; note = Ardenticatenales bacterium
MIDWYQQWRGEVEQRRQERERRRLERPLQDRRYFGEETWGASAEHLKAETDEPCLQHLYLPLLRSEKELAAWLGIPLTRLRWFTRDQPADTVWHYVAHSVPKRSGGQRLILAPKRDLKALQRHVLHHLLNHVSVTEMAHGFVAGRSIISNAQPHVGKEIVLNFDLADFFPSITFPRVRGLFLSLGYSFSVASVLALLCTEHEREAFDHDGTRYFISVGPRHLVQGAPTSPTLANLAAARLDRRLAGLGRVQGFAYTRYADDLTFSGDEVAGAYWLLKSVPPIVREEGFVIHEGKTRLFRQSARQVVTGLVVNEQLGTPRELRRRVRAILHKAHQTGLEAQNHDGHADFRAYLQGLIGFIHEANPAQAAPLRAALAAL

SEQ ID NO: 6613 - protein, 460 aa, unidentified
  source 1..460: note = Related to JACDGC010000016.1; note = Ktedonobacterales bacterium
MANFFRRLFRRNALKSDIVADAPPVTPTIVPTPPEALVMPTAALPLQTPIQVEQVAQAAGAVAYVILPSASAEPTPTPVAVPDATPLPTVTVNGVAYAQDDLDERALRDRATFGDELWGIANGKEANTTDAEKLARLGLPLLLSEQDVADLLGIPLNRLRWFTFDRAADTTWHYVRRVVPKRSGGERVILAPKQELKALQRKVLSDIVGRAPVALAAHGFVPGKSTITNARQHVGKAVVLKLDLQDFFPSITFARVRGLLIALGYAYAVASTLALLCTEYDREEYTRDGTRYFISVGPRHLVQGAPTSPTLANLVSWQLDRRLTGLAGAFDFTYTRYADDLVFSGDNPDVVQKLRFLTERIIRDEHFTVNRKKTRVARQSARQIVTGLVVNEAVATPRDLRRTLRAILHHAEKEGLAQQNREGRKDYPAYLQGMIAYVNAASPRHAAVLRTQLGKLRGQA

SEQ ID NO: 6614 - protein, 420 aa, unidentified
  source 1..420: note = Related to PSQZ01000251.1; note = Chloroflexi bacterium
MEAATAADDIDEVLEGEGQDEDEDGADWFQVSKHGFEVSEDDDDDITLQGPAYSGHTGQRAPQHTADRAYFGEETWGVSARQRSAEIQPAQLARYQLPVLRSEVDLATWLGIPLSRLRWYTHDRPAERTWHYVRYAVPKRSGQGERVILAPRRELKALQRKVLKGIVAKVPVAATTHGFVAGRSTLSNASEHAGKGVVLKLDLKDFFPSVTFRRVRGLFTALGYSYAVASVLALLCTEYDRQPFERSGEQYYISVGPRHLVQGAPTSPGLANLVAWRLDRRLAGLASKRGFVYTRYADDLTFSGEDAEAAARLGAAAARIIADEQFTVNAGKTRLLRRGGRQTVTGLVVNASPATPRELRRRLRAILHNAARDGLDAQNREDRGHYAAYLGGLIAYVGSANPSHGDVLRRQFRRLVTPRE

SEQ ID NO: 6615 - protein, 511 aa, unidentified
  source 1..511: note = Related to CP011509.1; note = Archangium gephyra
MQYEVRLAGYPDLVCLCRAGGGGSRSTGFAVSRSECTFMNLASLLLELKPLLADPEANFDRITELLDRHQGLAEYEVARFYVRRVWQAPVESRLRSMDARERLKGIRQLPLLFSSATAARLLRQRVKDPDTRVAQAARASVRRLGLADVSLPDRRVKPGRSAGSIGRWNPTGWNFGLFGNELYGFSRKAKRPPPRVGELPELRTRADVAELVGVEENALDALMRPGTESGSGYVEFEVPKRTGGVRRISAPRQKLKEVQRALLDKVLARMTPHPAAHGFIEGRSTVSNAEPHVGATAVVRVDIEDFFPTVHYRRVKGLFLAYGYGDEVAGVLAGLTTHRTKLPDGTVAWPGVLPQGAPTSPAIANLVCRRMDARLTALAKKFSAIYTRYADDLSFSFREPPERLGRFFWWLNAILQQEGFAENGKKRRVMRQGSRQRVTGLTVNQKVSIPREERRRFKAILANCRHHGVAAQARGRPDFERWLEGYAAYVRMVHPELGARWQREVKELLAR

SEQ ID NO: 6616 - protein, 475 aa, unidentified
  source 1..475: note = Related to NZ_CP069396.1; note = Archangium violaceum
MNLASLLLELKPLLADPDANFDRITDLLERHQGLAEYEVARFYVSRSWKEPVESRLRSVDPRERSKGVRQLPLMFSGTVAARHLRSRVKDADSRVASAARAAVRKLGLADVAPPDSRVAPSRHHGRRSVGGWNPTGWYFGLFRYETQGWSGSMKRPPPTSGELPRLSTRADVAKLVGVDESELDALMRPGTEAGSGYVEFEVPKRSGGVRRISAPRQKLKEVQRALLDQVLARMTPHPAAHGFIEGRSTVSNAGPHVGSTVVLRVDLEDFFPTVHYRRVKGLFQVHGYGEEVAGVLAGLTTHRPKLPDGTVVWPGALPQGAPTSPAIANLVCRRMDARLTALATKFGATYTRYADDLSFSFRAPPERLGRFFWWINAILQQEGFTENGPKRRVMRQGSRQRVTGLTVNQKVSIPREERRRFKAILANCRRHGVASQARGRPDFERWLEGYAAYVRMVHPELGARWQREVKELLGR

SEQ ID NO: 6617 - protein, 473 aa, unidentified
  source 1..473: note = Related to NZ_JMCB01000009.1; note = Hyalangium minutum
MGMDLVGLLLELKPLMADPEANFKRITALLEQHQNLAEYEVARFYVSRQWLAPVGRMLRSVDPRERHQGTQQIPLLFARATASAQLRRLVKDPDKQVAGAARAAVHKLGLADVAPPDRRFKPPRHPTPQSRGGWNPTGWNFGLPMRWGGRPKKQPPLKGKLPKLSTRKDVAELVGVQEEELAALMRPGTEAGSGYVEFEVPKRSGGVRRISAPRAKLKEVQRAILEKILEQMPTHDAAHGFVKGRSTVSNAEPHTGATVVVRVDLEDFFPTVHYRRVKGLFQAHGYGDEVARTLAGLSTHRPKLPDGTVVWPGALPQGAPTSPAIANLVCRRMDARLTALAKKAGATYTRYADDLSFSFEKPPEKLGRFLWWVNAILQQEGFLENAPKRRVMRKNSRQRVTGLTVNEQVSIPREERRRFKAILNNCRKHGVESQSRGRKDFSGWLRGYAAYVKMVHPELGERWQREVKELLGE

SEQ ID NO: 6618 - protein, 471 aa, unidentified
  source 1..471: note = Related to NZ_JAHXBG010000028.1; note = Cystobacter gracilis
MDLVGLLLELKPLMADPEANFERITELLEQHQGLAEYEVARFYVSRHWLEPVGRMLRSVDPRERLQGTKQVPLIFSRGTASGQLRRLVKDPDERVSRAARAAVHKLGLADVAPPDRRFKPPRTPRPMALGGWNPTGWNFGIRTGRWASPKKAPPLKGKLPKLASRQDVAKLVGLEEKELDALMRPGTEAGSGYVEFEIAKRSGGVRRISAPRARLKQVQRTILEQILSHMPTHEAAHGFVKGRSTVSNAAPHTGATVVVRVDLEDFFPTVHYRRVKGLFQSHGYGDEVASTLAGLTTHRPKLADGTVVWPGALPQGAPTSPAIANLVCRRMDARLTALAKKYGATYTRYADDLSFSFQAPPEKMGRFMWWVNAILQQEGFAENNPKRRVMRRAHRQRVTGLTVNQQVSIPREDRRRFKAILANCRKHGVASQARGRKDFESWLRGYAAYVRMVHPELGARWQQEVKELLGG

SEQ ID NO: 6619 - protein, 480 aa, unidentified
  source 1..480: note = Related to NZ_WJIE01000006.1; note = Polyangium spumosum
MSLVGLLLELRPLLADPDANFDRVSELLERHQGLAEYEVARFYAGRAFVGPVGRLLGSEDPRERLRGVRLVPLLFARANAAQHLRRMVKDADNAVAHAARAAVRTLGLADVSPPDRRAPAPRFPSPTARGGWNPTGWTFGLFRNHYVFRRGAAATTNAPLTAPPKADVPELKSRNDVAKLVGVKASALPSLMRPGTGKGSGYVEFEIPKRTGGLRKISAPRVRLKNVQRAILREVLEKLPTHPAAHGFVEERSTVTNATPHVGASVVVRVDIEDFFPTVHYRRVLGFFMRYYDEKVAAALAGLTTHRSKLPDGTVVWPGALPQGAPTSPALANLVCRRLDARLDALARKSGATYTRYADDLTFSFRDPPARLGRFLWWVNGILQQEGFAENVKKRRIMRKGGRQRVTGLVVAEKPAIPREDRRRFKAILANCRRHGVESQARGKPDFPAWLRGYAAYVRMVHPELGAKWQREVEEILLKK

SEQ ID NO: 6620 - protein, 474 aa, unidentified
  source 1..474: note = Related to JADJXL010000015.1; note = Polyangiaceae bacterium
MSLVGLLFELKPLLEDRERNFDRIVELLEKHRNLAEYEVARFYVSRNWLDPISKRLASIDPRERLRGVRLIPLLFARATAAQHLRRMVKDADMAVASAARAAVHSLGIADVAPPDRRAPPPRYPGPSALGGWNPSGWTFGLHRDHWAFRANRAKAKTPPKADVPPLKTPKDLAALLGVKVTALRSLSRPGTGPGSGYVEFEIPKRTGGVRRISAPRMPLKRVQRTILDQILAKLPAHPAAHGFVEERSTVSNASPHVGAAIVVRVDIENFFPTVHYRRVFGFFFQHYGEEVAKALSQLTTHRPKLPDGTVVWPGALPQGAPTSPAIANLVCRRLDARLAALAKKASANYTRYADDLTFSFRDPPDRLGRFLWWVNAILQQEGFTENVKKRRIMRKGNRMAVTGLVVNDKVGIPREDRRRFKAILNNCRHHGVESQARGKPDFAAWLRGYAAYARMVHPKLGEKWQREVEELLAK

SEQ ID NO: 6621 - protein, 468 aa, unidentified
  source 1..468: note = Related to NZ_CP079217.1; note = Polyangium sp.
MSLVSLLFELRPLLADPEANFERIVLLLERNQDLAEYEVARFYASRTWLGPLGRMMESIDPRERLRAVRLVPLLFARAPAAGHLRRLVKDADSRVVNAARAAVRKLGIADVAPPDSRFTAPRWPRATAVGGWNPTGWSFGLYRSGSEKSPPPATDLPALRSRADVARLVGVDEARLVALMRPGSGPGSGYVEFEIPKRSGGKRLISAPRAELKAVQRAILDKVLSKIPAHPAAHGFVEGRSTVSNAAPHVGTQRVVRVDIESFFPTVHYRRVKGLFEAYGYDEVVAATLAGLTTHRAKLPDGAVVWPGALPQGAPTSPAIANIVCRRLDGRLSALARKVGATYTRYADDLSFSFREPPARVGRFLWWVNAILQQEGFLENLPKRRVMRKGGKLRVTGLSVDEKVSIPREERRRFKAILANCRHHGVASQARGRPDFPRWLAGYAAYVRMVHPELGEKWQREVAELLAR

SEQ ID NO: 6622 - protein, 472 aa, unidentified
  source 1..472: note = Related to NZ_JAHNZT010000024.1; note = Citreicoccus inhibens
MNLVGLLLELKPLMMDPEASFDRIVELLEHNQGLAEYEVARFYVARAWKDAIESRVRSPDARERLRAARLIPLLLDRTSAARLLRRLVKDPDTRVSASARAAVRKLGLADVSPPDSREEPPSHPHPWAIGGWNPTGWSYGLFPETSKAVRKRPPPVTEALPPLRTREDVAKLLGLGTADLDALMRPGAESGSSYVEFEVPKRSGGVRRLSAPRPKLKAAQRALLEQVLARMPSHPAAHGFVPGRSTVTNAQPHVGATVVVRVDLEDFFPSVHFRRVKGLFEAHGYGEEVATALAGLTTYRAKLPDGTVAWPGVLPQGAPTSPAIANLVCRRMDARLAALAAKVGATYTRYADDLSFSFRQPPERLGRFFWWVNAILQQEGFAENGPKRRVMRQGGRQRVTGLTVNERVSIPRDERRRFKAILANCRKHGVDSQARGRPDFRRWLEGYAAYVRMVHPELGETWQREVKELLAT

SEQ ID NO: 6623 - protein, 472 aa, unidentified
  source 1..472: note = Related to NZ_JAAIXY010000002.1; note = Myxococcus eversor
MDLVSLLLELKPLMEDPEAHFSRITELLERHQGLAEYEVARFYVSRHWSEVVTKRLGSVDPRERIQAVRLIPLLFPRVTAAGHLRRRVKDADSRVASAARAAVRKLGLADVSLPDSREEPPRRPSPHALGGWNPTGWHFGLYPRRREDLVKRKPSVTAKLPKLQSRDDVAKLVGVDVAELDALMRPGSGAGSGYVEFETPKRSGGMRRICAPRAKLKAAQRNLLEGLLTHLPTHPAVHGFVPGRSTVTNAEVHVGAHVVVRVDLEDFFPTVHYRRVKGFFEAHGYNDEVSSTLAGLTTWRPKLPDGTVVWPGVLPQGAPTSPAIANLVCRRMDARLHALAKKAGASYTRYADDLSFSFVKPPERLGRFLWWVNAILQQEGFSENAAKRRVMRQGGRQRVTGLTVNQRVSIPREERRRFKAILANCRKHGVESQARGRPNFPAWLEGYAAYVRMVHPELGTRWQREVKELLNP

SEQ ID NO: 6624 - protein, 472 aa, unidentified
  source 1..472: note = Related to NC_020126.1; note = Myxococcus stipitatus
MDLVSLLLELKPLMEDPEANFQRITELLERHQGLAEYEVARFYVSRHWSETVSRRLGSVDPRERLEAVRLIPLLFPRVSAAGQLRRRVKDPDSRVGSCARAAVKKMGLADVSLPDSRIAPPRRPSPRAQGGWNPTGWNFGLFPGLRATPVKRKPADTPVLPELRTREDVAKLVGVEPSELEALMRPGSGPGAGYVEFETPKRSGGVRRICAPRARLKAAQRALLEGLLARMPTHEAVHGFVSGRSPVTNARAHVGNQVVVRVDVEDFFPSVHYRRVKGLFESHGYNEEVASTLAGLTTWRPRLPDGTVVWPGVLPQGAPTSPAIANLVCRRLDARLHALAKKAGGQYTRYADDLSFSFAKPPERMGRFLWWVNAILQQEGFAENSAKRRVMRQGGRQRVTGLTVNQQVAIPRDDRRRFKAILANCRKHGVESQARGRADFPAWLEGYAAYVRMVHPELGERWQREVKELLGR

SEQ ID NO: 6625 - protein, 348 aa, unidentified
  source 1..348: note = Related to JABBJJ010000521.1; note = Pyxidicoccus fallax
SHPHAMGGWNPTGWNFGLSPGMGGRVKRKPPSTGPLPVLHTREDVAKLVGVDAAELDALMRPGSESGSGYVEFEAPKRSGGVRRLCAPRAKLKAVQRAILDGILAHLPTHPAVHGFVAGRSTVTNAEPHVGSTVVVRVDVEDFFPTVHYRRVKGLFEAHGYGDEVSSVLAGLTTWRARLKDGTVAWPGVLPQGAPTSPAIANLVCRRMDARLTALAKRAGAKYTRYADDLTFSFREPPERLGRFLWWVNSILQQEGFAENAAKRRVMRQGGRQRVTGLTVNQQVSIPREERRRFKAILANCRQHGVESQARGRADFAEWLQGYAAYVRMVHPELGERWQREVKELLAR

SEQ ID NO: 6626 - protein, 471 aa, unidentified
  source 1..471: note = Related to NZ_JAAIXZ010000001.1; note = Pyxidicoccus trucidator
MDLVGLLLELKPLLASPEENFDRIVALLERHQGLAEYEVARFYVSRSWLEPVARRLKSVDPRERLQAVRLIPLLFARASAAGQLRRRVKDPDSRVSSHARASVRRLGLADVSLPDTRADPPRFPSATAVGGWNPTGWSFGLYPSMRAPVKRKPAATTALPVLKTRAEVAKLVGVPVSELDALMRPGSEAGSGYVEFDVPKRSGGVRRLCAPRAKLKAVQRAILDNVLAHLPTHPAVHGFVPGRSTVTNAKPHVGSTVVVRVDLEDFFPTVHYRRVKGLFEAHGYGDEVSSTLAGLTTWRPRLPDGTVAWPGVLPQGAPTSPAIANLVCRRMDARLTALAKKADATYTRYADDLSFSFQKPPERLGRFLWWVNAILQQEGFSENAAKRHVMRQGGRQRVTGLTVNEQVSIPREERRRFKAILANCRQHGVESQARGRPDFANWLQGYAAYVRMVHPELGERWQREVKELLAR

SEQ ID NO: 6627 - protein, 471 aa, unidentified
  source 1..471: note = Related to JAKCFI010000010.1; note = Myxococcus stipitatus
MDLAGLLLELQPLMAEPETHFERIVGLLEQHQGLAEYEVARFYVSRHWMDSASKRLGSADPRERLRAVRLIPLLFPRAIAAGQLRRRVKDADSRVAAAARAAVRKLGLADISPPDSRIEPPRHPGPRSLGGWNPTGWNFGLFPADGERVKRKPEVATRLPELRDRADVARLVGLDERELAALMRPGSEPGSSYVEFDVPKRSGGVRRLCAPRARLKAAQRALLDNLLTHLPTHPAAHGFVPERSTVTNAQPHTGANVVVRVDVEDFFPSVHYRRVKGLFEAYGYGAQVASTLAGLTTWRAKLPDGTVAWPGVLPQGAPTSPAIANLVCRRLDARLDALAKKAGARYTRYADDLTFSFPQPPERLGRFLWWVNAILQQEGFSENAPKRRVMRGGGRQRVTGLTVNQRVAIPREERRRFKAILANCRKHGVESQARGRPDFPAWLEGYAAYVRMVHPELGARWQREVKELLGR

SEQ ID NO: 6628 - protein, 467 aa, unidentified
  source 1..467: note = Related to JAACJQ010000343.1; note = Archangiaceae bacterium
MALAELLLDLKELLQKPDENADAIVKLLEQHADLAEFEVARAVAGRAVEVGVERRLKNVDPKERLAAVRSLSGLFPRAPAARLLRKMVKDPSRSVSAAARAGVRRLKLADVALPDSRWTPDRESPLVPGGWNPSGWWAGLFGRSSKPPPKVSLPKLSSRADVAKLVGVTEEELTAFMRPGSASGSGYVEFDVPKRSGGTRRIAAPRAKLRTAQRALLDQVLSKIPLHGAAHGFAIDRSVVTNAQLHVGASIVVKVDLEEFFPSVHYRRVRGLFEAYGYNTEVASTLAGLTTWRAKLPDGRVAWPGCLPQGAPTSPAIANIVCRRLDARLTALCARFGATYTRYADDLAFSFQKQPERLGRFLWWVNSICQQEGFSENDGKRRVMRSGGRRMVTGLVVNQKVSIPREDRRRFKAILHNVKKHGLESQARGREDFKSWLEGYASWVRMVHPELGAKWQREVKALTRGQG

SEQ ID NO: 6629 - protein, 473 aa, unidentified
  source 1..473: note = Related to JAEUKG010000407.1; note = Myxococcales bacterium
MGLGELLVDLSRLLADPAKNAASIYAMLEANAGLAEFEVARFYVADAMTADVAERLKSVDPRERVAAVDLVRLVCPRTSAAKLLRSVIKDPDPTVRKRARATVRRMMITDVALKDPRFKPSPWARGPFAPGAYNPSGWSFGVYGRKQTGSADRGALGAKGLPLLEGADDVARLVGLADGKALRRFMRPGSASGSGYVEFDVPKATGGARRIAAPRAPLRRAQRVILDQILAKVPAHDAAHGFVRGRSTVTNAEPHVGRAIVMKLDLVDFFPSVHYRRVVGLFEQLGYPTEAASALAGLCTWRPKLGDGAVAWPGVLPQGAPTSPAITNLVCRRLDARLSALAKKMGGVYTRYADDLTFSFPAEPERIGRFLWWVDQIALQEGFVENTKKRRVLRRSAQQRVTGVVVNEHPAIPRKDRRRIKAVLANVKKNGLAAEARGNPDFEAWLHGWVAYATMVQPALGARFAAALAGVAP

SEQ ID NO: 6630 - protein, 483 aa, unidentified
  source 1..483: note = Related to JACCYD010000544.1; note = Deltaproteobacteria bacterium
MHTLVDLLIELKTLATATGDANQLARINELFSNPRAPAEFQVGRHFVARLLVPQAEAAMASFDPADRLSAIETCRTVFPRSIAARLLRRVIKDPDPKVRSSAKRAASALRLDDVAPPDIRYRVERDSPLGRHNPTGWAFGIFPTDDHPQRKTKQATRQTALDAHQLPKLANVAAVAQLVGIDPDALVRMMRPGTEAGSGYVEFEIPKAKGGTRRIAAPRTPLRKVQRKILDDILAKLPLHDACHGFVVDRSTVTNATPHARAALVIKIDLKDFFPTVHYRRVKGLFQHLGYNEEVSATLAGLTTYRPKLPNGHVVWPGVLPQGAPTSPALANLVSRRLDQRLSKLAEKYGASYTRYADDLTFSFKTQPELRIGRFLWWVDGICQQEGFSERADKRRILRAKHQQRVTGLVVNQKVNVPREDRRRFRAILHNCAKHGLESQAGSLPPGADFKAYLAGYAAYVHMVDPKLGKQYLAQVAALIGKD

SEQ ID NO: 6631 - protein, 484 aa, unidentified
  source 1..484: note = Related to JACCTC010000082.1; note = Deltaproteobacteria bacterium
MQTLVELLLELKTLAAEPDGPGKLERINAMFANPRAPAELQVGRHYVSRLLVPGVAAQLASLDPAHRHIAITTARLVFPRATAARFLRRLVKDPDLTVRVAARRAVSKLGLHDVAPPDVRYQITSDSAIGGHNPTGWAFGIFPTDDGPRRKPKPATRATALAQHGLPALATRADVAALVGVDPQGLAKLMRPGVGPGSGYVEFEIAKAKGGTRRIAAPRGPLRKVQRVLLDRILAKVPLHDACHGFVPGRSTVTNAGPHQRAAIVVKLDLKDFFPTLHYRRVKGLFQHLGYNDDVAGTLAGLTTYRPKLESGLVVWPGMLPQGAPTSPALANLACRRLDHRLERLAAKYGARYTRYADDLTFSFATMPEVRIGRFLWWVDGICQQEGFTERDDKRRILRAKHQQRVTGLVVNERVNIPREDRRRFRAILHNCAKHGVASQTREHEDFPAYLAGYAAYVHMVDPVLGRRYLDEVARLLAQEPRRG

SEQ ID NO: 6632 - protein, 481 aa, unidentified
  source 1..481: note = Related to JACCSS010001187.1; note = Deltaproteobacteria bacterium
MIGTLVELLVELKTLVASSDKNKLDKVNKLFSNPKAPAEYQVGRHFVASKLEKDVEVQISDLDPRQRKAAVQTVMLAFPRSSAAKLLRRVAKDPDMTVRSAARHTIKTLALNDVAPPDIRYAPDMGVIGHGNPTGWAFGIFAHDWRSDRKPKKPSKVTALDAHKLPKLKSVADVAALVGIELDDLPALMRPGVGPGSGYVEFEIPKAKGGTRRIAAPRAPLRKVQRAILDQIVGKVPVHEACHGFVKTRSTVTNAAPHQGSAIVVKLDLKDFFPTVHYRRVRGLFEFLGYNAEVANVLAGLTTYRPKLDDGTILWPGVLPQGAPTSPAIANLACRRLDHRLDRLAAKYDATYTRYADDLTFSFKTSDLKLGRFLWWVDGICQQEGFNERPDKRRVLRSKHQQRVTGIVVNAGVHVPRVDKRQFRAMLHNCKKHGLESQARGKEDFEAYLRGYAAYVNMVDPPLGKKFIAQVEAVLGGTPGG

SEQ ID NO: 6633 - protein, 482 aa, unidentified
  source 1..482: note = Related to JAHBVW010000051.1; note = Deltaproteobacteria bacterium
MQTLVELLIELKSLADAPHDDGKLDRINKLFANPRAPAEYQVGRHYVSKLLAPSVEANLDSIDPAQRLAGIGTATAVFSRNVAARFLRRVVKDPDGRVRAAAAKAVKHLGLTDVAPPDVRYKIDPDSELGGHNPTGWAFGIHPNDKSRQRKPKKPSRVNALKELDLPRLAGVADVAKLVGVAEGELASLMRPGCGPGSGYVEFEIPKAKGGARRIAAPRTPLRKVQRAILDKVLAKIPLHEACHGFVPGRSTVTNARPHQGAAIVIKLDLKDFFPTVHYRRVRGLFESLGYNEKVASTLAGLTTYRPKIGDKTVVWPGVLPQGAPTSPALANLACRRLDKRLEMLAAKYEATYTRYADDLTFSFKKVPDFRIGRFLWWVDGICQQEGFTERAEKRRILRSKHQQRVTGLVVNKKVKVPRADRRRFRAILHNCAKHGLESQARGHADFPAYLAGYAAYVNMVDPALGRRLLDEVARLLGESRG

SEQ ID NO: 6634 - protein, 510 aa, unidentified
  source 1..510: note = Related to JADJJK010000006.1; note = Myxococcales bacterium
MTQAATSVLSPIELILTLRTLLADRASNATLIGELLERHQDMAEYQIARFYVARHLIPQVEALLSELDPRQRLAGIELVRFGFPRTLAGKLLRRVVKDPDIAVRKRARSTVKRLGLDDVAPPDTRYDARRSSLGRGNPAGWAFGLFRNHARSDWGRRPRPATRVAALGAQGLPPLASSSDLCKLLGVEASALVRFMRPGTQTGSAYVEFEIPKAKGGTRRIAAPRGPLRRVQRVLLDQILSKVPQHEAAHGFIAGRSTVSNARPHQGAALVVKTDLKDFFPSVHYRRVVGIFTMLGYGEPMARALAALTTYRPQLPADEPPPSDAAPSPSDAARPPEPARGRVLWPGVLPQGAPTSPALANLACRRLDVRLTRLAARYGATYTRYADDLTFSFPQPPQFAIGRFLWWVDGICQQEGFLEHPAKRKLLRKKTQQRVTGLVTNQEVHVPRADRRRFRALLHNCKKHGVASQAKGRDDFAAYLAGYAAYVQMVQPELGKAWAAEVARLLGESA

SEQ ID NO: 6635 - protein, 479 aa, unidentified
  source 1..479: note = Related to JADKKI010000021.1; note = Myxococcales bacterium
MNPVELILELRGLLADAQANGAKIRELIESHQDMAEYQIARFYAARHLVPQVEALISEIDPKQRLAGVELIRFGFPRTLAGKLLRRVVKDPDIEVRKRARSTVKHLGLEEIALPDTRYDGARSIRGKFNTTGWAFGLFAEHARRAWNRVPKKATQIAALGAQGLPVLASIADVQALLGVDAAGLARLMRPGTESGSAYVEFEIPKAKGGTRRIAAPRGPLRRAQRALLDQILAKVPQHPAAHGFVAGRSTVTNARPHVGAALVVKTDLKDFFPTVHYRRVIGLFELLGYNEAVAGVLAALTTYRPKLPDGRVVWPGVLPQGAPTSPALANLACRRLDARLTKLAAKYGAVYTRYADDLTFSFSESPKIAIGRFLWWVDGICQQEGFVEHPGKRKLLRAKTQQRITGLVINRAVHVPRADRRRFRALLHNCAKHGVASQAKGRENFAAYLAGYAAYVQMVQPELGKAWAAQVAKLLGEAP

SEQ ID NO: 6636 - protein, 489 aa, unidentified
  source 1..489: note = Related to JAEUJZ010000173.1; note = Myxococcales bacterium
MSLAALLVQLKPLLAAPQENLAAITELLRRHRDLAEYEVARFWVSRFLGPQLEKELRSPDPRVRRRGAEAVRYICTRKTAGHLLRPLIKEADTSVAVRARASMRVLKLDDVALPDSRYPAPKRGRGQLGGWNVTGWCFGLYPHMHRWWRRRGKPEEPTKKTLLEKHKLPKLTSESELRAWLGIQRKKDLLRLLRPGCGTGAPYVEFTIPKASGGSRTISAPRLPLKKLQRRILDEILAKLPVHAASHGFVRGRSVVSNAKPHLGAALVLKMDLRDFFPTIHFRRVVGLFQGIGYAADVAQILAGLCTHRGKLADGYVLWPGVLPQGAPTSPAIANLLCRRLDARLSGLAKQAGGVYTRYADDLTFSFSAVPDKGIGRFAWWVDQICQQEGFVENSAKRRVLQRHNQQRITGIVVNSALHIPRSARHTFRALLHNVRLDGLAAHARGRKDFRAYLLGFASYVRMVQPTLGRALLSDVRAVLKADRSAQKS

SEQ ID NO: 6637 - protein, 488 aa, unidentified
  source 1..488: note = Related to MTCS02000024.1; note = Haliangium sp.
MSLSALLLQLKPLLAAPRENLAAISDLLRRHRDLAEYEVARFWVSRAMGPQLEQELRSPDPRTRRKAAEAVRYACTRRSAGRLLRPLVKEADTGVAVRARTAMHALRLDDVALPDTRYPKPKHAGGFGGYNVTGWCFGLFPHMHRWWRKKANPNQAAKQTLLEKHGLPVLASEAELLSWLGLKRRKDLLRLLRPGCGTGAPYVEFSIPKASGGTRTISAPRASLKKIQRRILDEILAKLPTHAASHGFVRGRSVLSNAKPHVGASLVLKMDLRDFFPTIHFRRVCGLFCRIGYSSEVASLLAGLCTHRGKLADGYVVWPGVLPQGAPTSPAIANLLCRRLDARLTGLARGLGGNYTRYADDLTFSFKAVPERGIGRFSWWVDQVCQQEGFVENTGKRRVLRPQNQQRITGIVVNSGLNIPRAARHTFRALLHNVKHDGLAAQARGRKDLRAYLLGFASYVRMVQPKVGKPLLAEVRAVLKAAGQADKK

SEQ ID NO: 6638 - protein, 481 aa, unidentified
  source 1..481: note = Related to JAEUKH010000021.1; note = Myxococcales bacterium
MNLVNLLVTLRDALVDFEANRQKILTLLKTHQGLSEFEVARYFVAAEAAPRVHKYLASRDPRERRIGVECARFLLPPNDAAAVLRRALVDPDTSTRDRADRLLAQLERQEAPLRARRSTPEAELVDAWGPTGWRFGRLLRNPPARKKAKLAPVPRAVSAVLKSEETFLKAIEVDSVSALQPLYRAGDGPGAPYVRFEIAKRGGGVRAILAPRKALKGVQRALYEKVLSKLATHDAAHGFVPGRSVVTNARPHQGAVTILKVDLADYFPTLHYRRVQGYFARVLKANAKVATLIAGLTTHRDRLADGYVTRPGVMPQGAPTSPALANLVSRRLDERLDGLAKKVGLRYTRYADDLTFSWHEAPPTRQALARVLWWVSQIAREEGFALNERKTRVLRPHQQQLVTGVVVNAGLHVPRALKRTLRAMLHEARVKGVEVAARGRADFYNTLLGHAAWVNAVEPALGARLLAEVKALAAREGAAHV

SEQ ID NO: 6639 - protein, 488 aa, unidentified
  source 1..488: note = Related to JACRDB010000065.1; note = Deltaproteobacteria bacterium
MDLASLLVELKPLIADPDAHWGRIAELMEEHSGLAESEVARHWLAERLAPTLVARSRSRDPRDRLRAVEAARWALPARDLAGVLWRLAKDPFPKVRHRAVSLTRSEGLTDVALPDRLGRGAKPKARMDPFTKKISVVALRDGEAQRGWFLLDPDKVRSLRRGRKSPAKPDLPKLKNPADVATLLGCASDKDLVKLLRVGEGPGSPYVRFTIPKATGGERVITAPRPALKRVQRALLDKILAKLPAHPSAHGFVAERSVVTNATPHKGSALVVKMDIEDFFPTLHYRRVEGFFRQYYLGPVAKLLAGLTTHRTRLEDGYVVFPGELPQGAPTSPALANLLCRRMDARLTGLAAKVGARYTRYADDLTFSWPVDPEVPLGRFFWWVDQVLQQEGFAENAGKRRVLRPHQRQLVTGVVVNHTLHLPREVRRRFRAILHNCQKHGVESQARGREDFRDYLRGFASWAAMVDPAEGRRFQEEVRALLGAAVTP

SEQ ID NO: 6640 - protein, 489 aa, unidentified
  source 1..489: note = Related to JAEUKA010000036.1; note = Myxococcales bacterium
MSLSNLLLELIPLCESLDDNWEQVVSLLDAHQDLAEYEVARFYVSRFTSRTIQQLVRSDDPRQRVKSAHMVRLTCTQRQAGQFLRLLIKDPCARVRSAAHRAMRGLRLDDVALPDSRIKKPHPYRGQLLGGWNPSGWSYGLFGNMWSIRQYRKQSRKPKTTLADLGVPKLETRKDVLSWLKLGSIRDLRKLLRAGSGPGSPYVSFTIPKASGEPRTITAPRLTLRRVQRQILDELLSKLPTHTAAHGFVKKRSVVTNAKPHEGAQLVVKLDLKDFFPTISYHRIRGLLCRYGFSPEVADTLAGLTTHRAVLSDGYVVWPGVLPQGAPTSPVLANLICRRLDSRLSGLAKRMGARYTRYADDLTFSFAKGLDHKNDLGRFLWWVNQVCQQEGFAENVGKRKILRPSAQQRITGVVVNSGLSVPRAMRRTFRAILHNCRMHGLDSQARGRRDFRAYLLGYASYIQMVQPSLGKRVLAEVRALLTASDRPST

SEQ ID NO: 6641 - protein, 487 aa, unidentified
  source 1..487: note = Related to JAEUKB010000029.1; note = Myxococcales bacterium
MSLSSLLLELIPLCESLDDNWEKVLALLDAHKDLAEYEVARFYVSRLASRQLDQLVQSPDPRRRTQAAHFVRLCSTQRQAGRYLRVLVKDPNGRVRSAAHRSMRALRIDDVALPDGRFRPSPHRQALGGWNPTGWSYGLFGNMYFVRQQKGKQRKPKPTLSDLGVLKLQTRKDVLQWLQIPSLTDLRKLLRAGSGPGSPYVSFTIPKSSGEPRTITAPRMTLRKLQRKILDDLLSKLPTHAAAHGFVKKRSVLTNAKPHQGAKLLIKLDIKDFFPTISYYRVRGLLRGYGLSFEVCDTLAGLMTHRPVLSDGYVVWPGVLPQGAPTSPTLANLICMRLDARLSGLAKKVGARYTRYADDMTFSFASGMDNHSDVGRFLWWVNQICQQEGFAEHVSKRKVLRPSSQQRVTGIVVNSGLSVPRQLRRTFRAILHNCRTHGVASQARGRRNFRAYLLGYASYLRMVSPELGTRALTEVRALLGSDESSSS

SEQ ID NO: 6642 - protein, 492 aa, unidentified
  source 1..492: note = Related to JADZFZ010000500.1; note = Deltaproteobacteria bacterium
MDVATLVSALMPLLDDPVGNSARILKLLRDHRTLADYEVARFLVAKRTEPFVCELLQSQDPKSRRTAVRWVGLTFARAPAARVLRDATKDRAKMVRQAAFRATRELRLDDVALPDTTDHAAWVHEAPQQRRMNPFTGEEMVVRGSPPRAARQRGYDVSGWRFGLYPTVNRRRDPKPAFSALRSREDVERVLGVSRAQLSRMIRPGHGSGRPYVAFEIPKATGGVRTLHAPRPALKRVQRLILERLLAPLEVHAAAHGFVRGRSTITNAIPHVGARIVVKMDLIDFFPTIHFGRLVGLFQHYGASVDAARTLAAVVTYRPTLPDGRVSWPSVLPQGAPTSPVLSNLVCRRLDSRLTALAASVAAHYTRYADDLTFSFREEPTKGLGHFLWWVNQIIGQEGFRENLGKRRILRPTGQLRVTGLVTNSGLSVPRDARRRFRAILHDCRQRGVTAEATGHEEPRAYLLGFSAYVQMVQPATGAKLRAEVLALLARR

SEQ ID NO: 6643 - protein, 490 aa, unidentified
  source 1..490: note = Related to JABFRG010000829.1; note = Polyangiaceae bacterium
MDIATLVATLIPLLGDPEGNGDEIVRLLDRGRALADYEVVRFLVAKRTESFVRRLLEDPDPRVRRTGVRWVELTFARSPAAKSLRDATKDRAKVVRQAAFRATRALRLDDVALPDLRVPFRSLPGESRTAINPFTQKPMVLEASASRQRHRGFNPTGWRFGLYPVPRRPRRPSPELSALKSRRDVEVLLGVTGEELAPLLRPGAGRGCPYVAFEVPKASGGTRILHAPRAALKRLQRILLKQLLAPLELHPAAHGFVPGRSTVTNAAPHVGARILVKMDLVDFFPTVHFGRLVGLFEHYGCAREAAEVLATIVTFRPVLPGGRVAWPSVLPQGAPTSPVLSNLVCRRMDARLAALATKVGAVYTRYADDLTFSLREAPSQGLGHFLWWVNQIIGQEGFVENLRKRRVLRPAGQMRVTGIVTNTQLSIPREARRRFRAVLHDCERRGVSPETTGHEEPRAYLLGFAAYVAMVQPELGAKLRTKVRALLARP

SEQ ID NO: 6644 - protein, 490 aa, unidentified
  source 1..490: note = Related to JACKEA010000006.1; note = Polyangiaceae bacterium
MDVATLISKLYPLLDDPVANSSTILSLLRRGGGLAEYEVARSLVSKRTEPMVRQMLADPDPVVRRRAVRWVQLTFAYSPAVRIVRNAAKDRSRMVRSAAFRAARALRVTDVALPARRLAKVPATTQREGINPFTRERMVIAARSPSVREIRGYAPAGWHFGLFRARPPSRRPAPPLAALKGRQDVLELLGVSEQEVTRLLRPGSGPGTSYVAFEIPKASGGVRTLHAPKHVLKRLQRKIATELLDPIEPHAAAHGFVRGRSTVTNAQPHVNARLLVKMDIADFFPTVHYGRVVGLLEHHGAGKEAAKLLAAITTYRPKLPDGRVSWPSVLPQGAPTSPVLSNLVCRRLDARLTALAARLGATYTRYADDLTFSFQGDPEQGLGRFFWWVNQILHQEGFIENIGKRRVHRPSGQMRVTGLVTNQGLSVPREERRRFRAILHACEQRGVSSETTGHSEPRAYLLGFAAYVEMVQPEVGKKLRAQVKRLLAKS

SEQ ID NO: 6645 - protein, 486 aa, unidentified
  source 1..486: note = Related to JAEUKI010000052.1; note = Myxococcales bacterium
MDLAKLLFTIKPLLADPRANLAKIVELLEKHNDLAEYDVARFYVSKSVRPAIEEKLSSPDPRERTAATKSIPRLMGKSEGAALLRRVYKDASPTVRAAARSGVSMLGIEDVALPDSRFPAPRNNWQRQGGWNETGWAFGLADSRARKPNRRVPEDIASIRKVFKELQTSDDVAKKLGMKKAKELKALMRPGQQAGSGYVEFTVPKATGGLRTICAPRAPLKRVQRTILRELLAKVPTHDAAHGFINGRSVVSNARPHEGAKIVVKIDLKDFFPTVHFYRVAGTLRYLGMGEAAASTLAAIVTHRNKLPDGTVVMPGALPQGAPTSPAITNIVCRRLDARLDALSKKVGAKYTRYADDLTFSFRDEPEKGLGRFLWWVDQVIQQEGFVQNAPKRRILRGSNQQRITGVVVNDGLSVPRDARRRFRAMLENIRRTSVDEQARGKADFKAYLKGFASYVKMVQPEVGKKLLAEVHAVLAEDVRKRDAAK

SEQ ID NO: 6646 - protein, 480 aa, unidentified
  source 1..480: note = Related to JAGQIK010000067.1; note = Myxococcales bacterium
MNLPALLLELRPLVADIDKNWDRIVELLSTHKRLAEYEVARFFVARHVESRVTELLRSRDPQQRARGVKMLELAYPSTRAGKHLRHLVRDADVEVARDATEAVSNLDIDDVALPDFRLKPPRDPRHGWGGWNQSSWRFGFPLADWVRRKKRVGPKKLKLPKIADKAALFELLGIADEKHYKRLIRPGAQSGAPYVEFTVPKRSGGERIISAPRAELKRVQRTILDKILAKIPVHDAAHGFVPGRSTVTNAQPHVGASLVVKIDLTEFFPSIHFRRVYGLMGYYGYEHEVATALAALMTHRIKLDDGKRMVETGLVPQGAPTSPALANIVCRRLDARLSGLAQRAGARYTRYADDLTFSFADAPPDKGLGRFLWWVDAVCQQEGFVENAGKRRVLRPSHQQRVTGVVVNSQLSVPRSERRRFRAMLHNCRHKGIASQAKQHGRDEAEFRDYLTGFASYVKMVQPELGNKLAGEVADLLKGA

SEQ ID NO: 6647 - protein, 478 aa, unidentified
  source 1..478: note = Related to PVNK01000310.1; note = Enhygromyxa salina
MLLPNLILELRGLLDDPEAKLERIVERLRAHDDLAEYEVARHYVAKRLEPVIRAWLASPDPRVRVEAIAAVRQTFSKPAAAKVLRHLVKDATLSVRGAARRAVAELGLDDVALRNTTMREPRRSSWPGGWNPSGWQFGTGRNRGRPKLAPAPVRAGLPALADVDALAVWLGYEGAGELRRFMRPGSETGSPYVDFEIAKARGGQRTISAPRAPLRAIQRKIYAELLAKVPVHDAAHGFVVGRSTLTNAAPHVGAGLLIKTDIREFFPSIHYWRVRGLFFSLGYGEEVAWALAALCTRRPVIDPEGERRVAWPGLLPQGAPTSPALANLVCRRLDARLSGFAAKIGARYTRYADDLSFSIHDPGRAQGLEVGRVLWWIDQILQQEGFAEHPGKRQVLRPHRRQLVTGIVVNDHPTVPRDARRRFRAILHNVARRGLASEARGRDDFADYLRGFAAYVEMVQPELGARWVAEVDALLQSA

SEQ ID NO: 6648 - protein, 473 aa, unidentified
  source 1..473: note = Related to JABJWV010000001.1; note = Pseudenhygromyxa sp.
MLLADLILELRELLVDPRANFEVIIDRLAAHDDLAEYEVARQYVVPAIEGLIRERLDDPDPQVRVQAIVAVRQCFSRSAAAKLLRHLVKDANLSVRGAAREAVSSLGFDEVALPNADFNPRHQRWNLGGWYFGTGDWRRPGLAPQAVRAALPSLPDVAALASWLNIDDPAELRRFMRPGSDTGSPYIDFEIPKAKGGVRVISAPRAPLRAIQRKIYAELLAAIANHDAAHGFIAGRSTVSNAAPHVGARLVLKTDIREFFPTVHYWRVRGLFRWLGLGSVAGELAALCTRRPVVERNGQRMVVWPGVLPQGAPTSPAIANLVCRRLDARLQGLAERLDARYTRYADDLTFSFHGSDGGGEPGVAVGRVFWWIDQILQQEGFAEHAGKRQVLRPGGRQLVTGIVVNERQSVPRPVRRRFRAILHNCKRDGLASQAHGRDDFADYLRGFAAYVQMVQPQLGQRWVAEVEALLAGR

SEQ ID NO: 6649 - protein, 481 aa, unidentified
  source 1..481: note = Related to NZ_PVNL01000057.1; note = Enhygromyxa salina
MLLANLIFELRPLLDDPEANLRQIVARLRAHDDFAEYEVARHYVAGKLEGVIRSWLANPDPRVRAEAIEAVRQVFSRPAAAKLLRHLVKDATISVRGAARRAVDELGLDDVALRNTSLAVPRSPRGRGGFNPTGWEFGTGAHRGRPRLEPAATRAGLPTIPDLAALTSWLRIDADGLRRLMRPGGHTGAPYVDFEIPKARGGRRTISAPRAPLRAVQRQILAEILSKVPTHDAAHGFVPGRSTVTHATPHVGARLLLATDIRDFFPTIHYWRVRGLFFTLGYGEAVAGALAALCTRRDVINPEAEAPTRRVVWPGWMPQGAPTSPAISNLVCRRLDARLSGLAAKLGARYTRYADDLSFSFHDPELVERLEIGRAFWWIDQILQQEGFAEHLGKRQILRPHRRQLVTGLVVNDHLTVPRDARRRFRAILHNCKQRGVASEANGRDDFPDYLRGFAAYVHMVQPKLGARWVAEVDALLVDHA

SEQ ID NO: 6650 - protein, 496 aa, unidentified
  source 1..496: note = Related to NZ_ABCS01000168.1; note = Plesiocystis pacifica
MLLANLILELRPLLADPQANLPQITAKLREQEDFAEYEVARHYVAKKLEPTIRAWLDDPDPRVRLEAIAAVRRTFSKPAAAKVLRHLVKDAHLRVRGVAREVVFELGLDDVALRDTTFRVPRNPAGGGGWNPSGWHFGTGSHRGHPRLAPEAVRAGLPDLPDLPALLRWLSLDDEAALRRLMRPGSAAGAAYVDFEVPKKSGGTRLISAPRAPLRAVQRKLLADILAPVPCHDAAHGFVPGRSTVTHAAQHVGAKLLLQTDIRDFFPSIHFWRVRGLFFTLGYRGDVARALAALCTRRPVIAATRTDERRVVWPGVLPQGAPTSPALSNLACRRLDARLSGLAARLGARYSRYADDLSLSFHDDEALAKLDVGRAFWWIDQILQQEGFAEHPKKRRILRPHRRQQVTGIVVNEHLAIPRDERRRFRAMLHNCRAHGLDSQAKVWAQARGHDPEHEGLRADFLAYLRGYAAYGAMVQPKLGARWLAELDAMVQPDTP

SEQ ID NO: 6651 - protein, 454 aa, unidentified
  source 1..454: note = Related to JACSRE010000167.1; note = Myxococcus sp.
MNPVEAILELERLKATKPVDLAAVARVLEGVEGLAEEDIVGTVAFELISPRAVFTLLKSPEPSERLAGVELVARLGRLHAGSFLRHVVKDPDPRVASCARRHLTRLRLPEVGLPLPLPSFARAFARPSWTVAGWRFGAAPRFSDARYPVRADLSSAARAEAHLRVPLASLPSLRRYAEFTVPKRRGGVRSLAAPHLALKQVQRRLLDAVLSRLAVHRASTAFSSGSSVVTNAAAHVGRAMVIKLDLQDFFPSIHEERVRGLWGALGADRQVAHALARLTTYRPRLASGSLSTVAVLPQGAPTSPAIANLIARRLDARLAGLSKKWKASYTRYADDLTFSFAEEPRQVGRFLWWANAICQQEGFVENASKRRVMRATGRQQVTGLVVNQRVTLPRHVRRSFKAIIHNCERHGVASQARGRPDFEQWLLGFAAWAAVAQPDVGVDWLRRVKQVLGR

SEQ ID NO: 6652 - protein, 516 aa, unidentified
  source 1..516: note = Related to CP025958.1; note = Gemmata obscuriglobus
MSASQSAPAWLLLPLPANADADAILIATIEQYATSLPQEFKKLHDALDEVRALASYEPAVNRSNTLVWEKLETLLTAPEGTARIALIRYAREHMPERACARVLRRLAKDADMNVRRTVAKAIRKAKIQEVAIPAKKDGDWDPSGWLLPDEVSKVTRHKTGKRAQERSGVPALTKLAELRKLLGIKSTNQLGFFLLASDHKGGPYTTHKIPKRDGSDRQICAPKKQLKWVQKQILKHILSKVPPHPAAHGFVSGRSTVSNATPHVGAELVVKFDLKDFFPTVHYFRVMGLFASLGYPVGNCMFGTDDGANQIAPVLARLCCYTPDPKQWGSAALPQGAPTSPAISNLVCRRLDARLQGLAETNHGTYTRYADDLTFSFPKAEGMNLGRFRWWVDQVCQQEGFVVNQEKFRVIRDSQRQVVTGIVVNDAVRAPRELRREIRAILHNCETKDLESQAKRHPRFRGNVPAFSQYLRGIAAYLNMVQPEHGAALLRRVNELLGGPIEGDTPSQDQGKAGDA

SEQ ID NO: 6653 - protein, 515 aa, unidentified
  source 1..515: note = Related to NZ_JAGKQQ010000001.1; note = Gemmata sp.
MSAPRSAPAWLLLPLPANADTDAGLIATVEQYCATLPEAFKKLHDALDHVRALASYEPAVNRANVLIWEHLEALLSATEKKARLELIRYARDHFPERACSRVLRRFAKDPDMEVRRVVARAVRKAKIEEVAIPAQKDGDWNPTGWLLPSEGLKITRHKPGTRTQERSGVPILGKLKDVRKLLNIKSPNQLGFFLLASDHKNGPYTTHTIPKRDGSERKICAPKKQLKWVQKQILKHILSKVPPHPAAHGFVNGRSTVSNATPHVGAELIVKFDLKDFFPTIHYFRVMGLFASFGYQVDNCMFGTKDDAKQIAPVLARLCCYTPDPTQWGTATLPQGAPTSPAISNLVCRRLDARLMGLAKANKGTFTRYADDLTFSFPKAEGMNLGRFRWWVDQVCQREGFVVNQEKFRVIRDSQRQVVTGIVVNDALRVPRELRRELRAILHNCTTHDIESQAKRHPKFNGNVPAFTQYLRGIAAYLNMVQPEHGGALLRRVNELLGGPIEGADETPDVKAGDE

SEQ ID NO: 6654 - protein, 516 aa, unidentified
  source 1..516: note = Related to NZ_CP053452.2; note = Frigoriglobus tundricola
MSASPSPPAWLLLPLPANAAHDAALLASVEEHCTKLPRDFAKLQKALERVRYLASYEPAVNRANALVWEQFEALLSAPEGRDRIALVGYARNHMPVRALARVLRRLAKDPDMTVRGQIAYLIKRSKIREVALPAKKDGDWNPTGWMLPAERGRPSRITRHKTGKSVQARTGVPLLAKLAQLRALLNIKSPKQLGYFLLASDYKNGPYTTHVIPKRDGSDRKICAPKKQLKWVQKQILKHILSKVPPHPAAHGFVNGRSTVSNATPHVGAELVVKFDLKDFFPTVHFFRVMGLFASIGYPVGNCMFGTDDDSNQIAPVLARLCCYTPNPKLWGSATLPQGAPTSPAVSNLVCRRLDARLAGLAEANKGTYTRYADDLTFSFKSAEGMKLGRFRWWVDQVCQQEGFTVNQQKFRVIRSSQRQVVTGIVVNAGLRVPRELRRELRAIVHNCEKQGVESQAARHPNFGGNVGAFTQYLRGIAAYLNMVQPDHGAALLRRVNELLGPAADADDAEAKGGGA

SEQ ID NO: 6655 - protein, 515 aa, unidentified
  source 1..515: note = Related to JAIOPV010000289.1; note = Planctomycetes bacterium
MSATTRTGPEWLFRPLPANADHDDAVIKKVEQHCSKLPNEFLKLQKTLDDVRAFSSYEPCVNRANELVWEQFEALVTNPDGKCRRLLIGYATAHMPERAAARVLRRLAKDPDMEVRNHVSRALRKSKIREVALPHKKGGDWDTSGWLLQSEETKVTRHKPGKRTLEKNELPVLTNLAQLRKLLNIKSTNQLGYFLLASDNKDGPYTTHTIPKRDGSDRKICAPKKQLKWVQRQILKHILSKVPPHPAAHGFVNGRSTVSNAGPHVGAELVVKFDLKEFFPTVHYFRVIGLFASMGYPVGNCMFGTEDKSNQIAPVLARLCCYTPDPKKWGSAVLPQGAPTSPAISNLMCRRLDARLGGLAEANKGTYTRYADDLTFSFPKAEGLNLGRFRWWVDQVCQQEGFTINQQKFRVIRDSQRQVVTGIVVNDKLQVPRELRRELRAILHNCEKTSVEEQAKRHPRFTENVGAFSQYLRGIAAYLNMVQPEHGAALLKRVNDLIGKPEGETPPKEGEQSKN

SEQ ID NO: 6656 - protein, 509 aa, unidentified
  source 1..509: note = Related to LR594584.1; note = Gemmataceae bacterium
MSATHTGPEWLYRPLPANADFDPAALAKVEEHAAALPAAFAKLQTALDAVRALASYEPCANRANELVWERFEALVADPDGHHRAALLRYAVAHLPERAAARVLRRLAKDPDVSVRTRVARALRASKIREVALPHREANNWDTSGWVLRTEDTKVTRHKTGTRALEKAGLPVVTKLADLRKLLNIKSTNQLGYFLLATDAKDGPYTTYTIPKRDGTDRTICAPKKQLKWVQRQILDHILSKVPPHPAAHGFVPDRSTVTNAGPHVGAELVVKFDLKEFFPTVHYFRVIGLFASMGYPVGDCMFGTADTSNQVAPVLARLCCYTPDPKKWGTAVLPQGAPTSPAISNLMCRRLDARLAGLAEANTGVYTRYADDLTFSFKSADGLNLGRFRWWVDQVCHQEGFTVNQAKFRVIRDSQRQVVTGIVVNEKLQVPRELRRELRAILHNVEKTSVAEQAKRHPRFEGNAGAFAQYLRGVAAYLNMVQPEHGAALLKRVNELLGTGDADGDPTPS

SEQ ID NO: 6657 - protein, 521 aa, unidentified
  source 1..521: note = Related to JAIEMG010000136.1; note = Gemmataceae bacterium
MASVVAEIIRERWFQLQIRANAMNVIERAPAWLLRPLPVHAVADDKLNDRIDKLAAKLPESLPRLQAVLDGVQMYREYEPAVNRASAHVWNVLDQLFAADADSVRVSLLVFAEAHMVEPARARIYRRLVKDPSTKVRNRARRLVQRCDLHEVALPLQKDGDWDPTGWLRGVVDRRLSRHAQGKRVQERHDVPVIGTLAQLRKLLGIRSSRQLGYFLLASDADGGPYVRFTIPKRDGREREICAPKKQLRWVQRQILDKVLAQVPVHDAAHGFIVGRSIVTNASQHKGAEIILKFDLTDFFPTIHYYRVLGFFASLGYSVGNGRFGTNDSSKQVAPTLARLVCYTPDPQQWGDARLPQGAPTSPAISNLVCRRLDARLAGLAKRNEAVYTRYADDLTFSFRKATGDLGRFRWWVDQICHQEGFLVNQKKFHVIRASQRQLVTGIVVNDELHVPRDERRRFRAILHNCKTHGLDSQARGHAQFAEYLRGFASYIHMVQPDEGAELLQAVEELLGPETGEDGVP

SEQ ID NO: 6658 - protein, 495 aa, unidentified
  source 1..495: note = Related to LSTD01000300.1; note = Planctomycetaceae bacterium SCGC AG-212-F19
MADVLDVPEWLLRPLPANASADAKLHAEIGRLASNLPASLAEIAKALEAIKNYSEYDAAANWASAHVWQAVAKFSAADLPGVRVGLLKFAAAHMVAKAQAQICRRLAKDPAVAVRRRARKLVENAGFHEVALPDTADGPWDATGWLRGSATGVLSRHKQGTKIQAERGLPKLSTVGELRNLIGIKSERQLGWFLLATDAEDGPYVKFTIPKRDQTEREICAPKPQLRWVQRQILDKILAKVATHDAAHGFIPGRSIVTNAAPHTSAALILKFDLKDFFPTIHYYRVMGLFTSLGYTVGRAKFSAKDDAREVAPTLARLCCYTPDPHQWGSALVPQGAPTSPAISNIVCRRLDARLRGLAERNKGVYTRYADDLTFSFLKDEVELGRFRWWVDQICHQEGFFVNQAKFRVIRCSQRQVVTGIVVNDALRIPREERRRFRAIVHNCKKHGIEAQARGHKKFLDYLRGYASYINMVHPEEGAELLEEVEALAGPETGE

SEQ ID NO: 6659 - protein, 493 aa, unidentified
  source 1..493: note = Related to JAEUIF010000053.1; note = Planctomycetia bacterium
MDPLPAAPAWLLRPLPAHAVEDEKLHARIDKLCQRLPAGLAELGVALKAVEMYREYDAAANHASIHVWRLLDQFYSSPASVRSQLLNFARQHMVPQAQHRILRRLAKDPSLALRRSVRRLIERGAVREVALPLEADGDWDAQGWLRGNSLPLTRHRQGRQAQTDHGVPRLAKLADLRKLLDIRSAKQLGWFLLATDADNGPYTTFKIPKRSGSERLICAPKPQLRWVQRRILDKILAPVAPHNAAHGFIPERSTVTNAAVHTGAAVVLKFDLTDFFPTIHYFRVVGLFASLGYHVGDGRFSSDDDSKNVAPTLARLCCYTPDPQDWSAAKLPQGAPTSPAISNLCCRRLDARLQGLAERNGGKYTRYADDLTFSFEKPELALGRFRWWVDQICHQEGFFINQAKFRVIRASQRQVVTGIVVNDELRVPREERRRFRAVLHNCRQHGVKSQAKGHKRFKEYLRGFASYVHMVQPEEGAELLRQVDELLGAEGQS

SEQ ID NO: 6660 - protein, 475 aa, unidentified
  source 1..475: note = Related to JAGQQD010000096.1; note = Planctomycetaceae bacterium
MADSPVLSIPTWLLRPLPINSKRDSKLESQIEKLAKNLPGSLAQLTTELSKVKMFREYDSAANLASRHVWVSRYHFLNSSLDEDRKALLEFAQLHMTPTAKARIIRRLSKDPQMGVRRAVHRIIQKAPPYEVALPEARDGNWDASGWTRGVQPGRLMRVRRGQKKTQKEWGLPGLSTVKQLRTLLGIKSEKQLGYLLLATDEGGGPYTRFSIQKRNGSDREICAPKPQLLWVQRKILHEILDKVPLHESAHGFVRGRSTVTNATPHRGAAFVLKFDLENFFPTVHYYRVMGLFANLGYSMGNGRFEARDKSRQIAPVLARLCVFVEDPNAWGTGFMPQGAPTSPAISNLVCRGMDARLAGLAEQVGGVYTRYADDLTFSFPETSPVNVGRFRWWVDQICHQEGFFLNQSKFRVIRRSQRQTVTGIVVNDELRVPRRERRRFRAILHNCKAQGVESQARGNPAFRDYLRGFASYLN

SEQ ID NO: 6661 - protein, 506 aa, unidentified
  source 1..506: note = Related to NZ_CP042425.1; note = Limnoglobus roseus
MTDTPTWLLHALPANAVVDEKLNATLSALAAALADNRDKPLVTAGLLTEIQGHLAHAQPFAAYEAAVNGIAGQVWQLFEAVHQRQNRPAKLAFLNLVVRHLTPGALAQLCRRWAKDADPAIRRAVGRVIETGAIHEVALPATKDGAWSPAGWRKGTVEVDLSRHKVGTAVQEANSVPPLANLRQLRELLGIRSAKQLGYFLLASDKDDGPYTRFTVPKRGGGERVICAPKPQLKWVQRRIHERILSGVPLADAAHGFVPGRSIVSNAAAHVGAAVVVKFDLKDFFPTIHSYRMIGLFARMGYSVGTAKIATADESASVAPVLARLCSYTPDPRAWGKAHAPQGAPTSPAVSNLICRHLDARLGGLARKLGGVYTRYADDLTFSFAATGIDLGRFRWWVDQVCQQEGFVMNADKFRVIRRSQRQLVTGLVVNDGVRPTREQRRAFRAVLHNCRRNGVVTEARGDPRFSQYLRGFASYLHMVRSTEGADLVRQVAELLDPPGGGEDKP

SEQ ID NO: 6662 - protein, 521 aa, unidentified
  source 1..521: note = Related to PCBK01000175.1; note = Deltaproteobacteria bacterium
MREDTQSTSSVVLHEAELKNKLPIGATFDSALLEQISTLADQLPDSMSELYKVLSDIDMLVEFDAARVFVVRLVLARLRVLTHAEEKQRLALLDMARDYMTTDECVPVCRRFAKDPSAHVRGRVKTLIRTKKPKDVALPLEEGERWDASGWSKGINADPEQETSPLFKHERGSRIQRKHGVPEIETVKDLRTLLKIKSEKQLGYLLLSNELEDGSGPYTLFEIPKKDKSPRLICAPRQPLKGIQRRILDRILSGVPPHETAHGFVPGRSIVTNAAVHQSKEIVIKFDLENFFPSMHYYRVMGLFAQLGYDVGEGFFQSDDESEAIAPVLARLTTYTSNPKEWGRGYLPQGAPTSPYIANLICRGLDARLSGLARSLDGDYTRYADDMTFSFAELPRTKIGRFRWWVDQICQQEGFAVNQKKFRVVRRSQRQMVTGIVVNDTLRVPRKERRRFRAILHNCERYGLESQARGRKDFPAYLQGYASYINMVHPDEGRKFIEQVEHILQLDREGKLPIEKDPENG

SEQ ID NO: 6663 - protein, 489 aa, unidentified
  source 1..489: note = Related to JAGQPF010000642.1; note = Planctomycetales bacterium
MAATKSSIPAWAYRPLPLNAQPATELIQQLDKLEQGLPGSSWEILRLVGEQDGSATYEAVANRAMEIIWTHLDECIANDPHTVRQFAASHLPIRVRNRVLRRLAIHPSFSTRRSVRYQINESAVREVALPSAPDGEWNAEGWLLNSNSSTLMRPRKLKAPDPRLPKLKNVKAVMKELGIVSNRQLGWMLLATDEDGGPYHTFEIGKRNGKARKICAPCWQLRRVQQRILHNILDHLPPHPAAHGFVKGRSVVTNAAPHLGKPLLLKFDLLDFFPTIHYHRVIGLFASMGYGMTSPFFDTENRSRNVAPVLARLCTYTEDPRVFRDGTLPQGAPTSPAISNLICRRLDARLDGLARKHGAAYTRYADDLTFSFDQDEISVGRFRWWVDQICHQEGFLVHQAKFRAIRSSQRQSVTGVVVNERMRVPRDLRRRFRAILHNCRKRGVAAEARGDAGFPSYLLGMASYMYMVNPDEGGPVLDEVRKLLAEQGN

SEQ ID NO: 6664 - protein, 495 aa, unidentified
  source 1..495: note = Related to PBBL01000083.1; note = Myxococcales bacterium
MASHRDRYDDRPPLPVGAETNPEDLARVAELAARLPGSVSALSDFLQARDSYNDFDPTRLAANDAILARLGAFHLAAEGTHRQLLNYAQAYMAPSEVMAVCRMVLRGGSTRLRERCVDLLRGAQPDGLTLPARQGGAWDWTGLLRGVERGRLFAKQPSQRLLERNGLPQLTTVGELRAMLKLSSPELLGYLLLSTSGSGGPYATFTRPKRSGGERLICAPNPTLKQAQRAVLENILARVPVHDAAHGFVEGRSTVTNARAHLGRELLIKFDLRNFFPSITYYRVMGLFAHLGYYLEGGVFSSRDSSRAVAPTLARLTTYTPPGATWRASYTPQGAPTSPIISNLICRRLDARLYGLAARIGATYTRYADDLTFSMNALPESGLGRFRWWVDQICVQEGFFINHSKFRVIRKHQRQQVTGIVVNEALRVPREERRRFRAILHNCRTQGVESQARGRAGFREWLLGYASYMNMVNPTRGGQALAEVQALLAAEGPST

SEQ ID NO: 6665 - protein, 473 aa, unidentified
  source 1..473: note = Related to MNYG01000250.1; note = Deltaproteobacteria bacterium CG2_30_63_29
MHDEVLLGRVRSLVAALPGSLSELGACLAEVESFAEFDSAAVLAAQAFDARLDDLLRRPPKGLFEFMRSNLPVDQQLQVCRRLVKHPNLPTRRRAVTLLKRLRPDDVALPLSAKGEWNWRGWTRGTEPGRLFKHRRGVKRQAEVGVPQLKDLEALRRRLAIDSLKQLGWFMTATAGEGAPYCSFEIPKRSGGLRRIDAPRGQLRALQRTVLHEILSKVAVHEAAHGFVPGRSTLTNAAPHLGRKLVLKFDLRNFFPTISYWRVVGLLASLGYDVGTGLNVVEDSSRAVAPVLARLLTFRDDAKLFGAGYAPQGAPTSPAISNLVCRGLDGRLSGLAARIGGTYTRYADDLTFSMDAEPAGGLGRFRWWVDGICQQEGFLLNREKFRVLRASRRQQITGIVVNDSLRVPREVRRKVRAMVHNCQKNGVEAESKGDPGFVDRLRGLAAYIHMVHPEEGRPLLDAIKLFGEGGEDD

SEQ ID NO: 6666 - protein, 424 aa, unidentified
  source 1..424: note = Related to JADZDZ010000133.1; note = Candidatus Sumerlaeota bacterium
MLDKLLPYLQIFIPLSVILLFIAQFLEKRKNETRQAAPPRRIGERSASSRRPTRSFPPAPVNAGVNTTNPRCPNKRHAYIRAPRRPQSDPSAAARFGIPALMNRGDVAKWLGMSWKHLVWLCNLFHNWDRKGVGHYHAWKVPKRAGGERVITAPKPYLRAVQRKILADILSRIPIEPQAHGFARNRSTVTNASVHIQRPIVVKLDLVDFFPTITYRRVRGVFGTLGYSEEVSGVLARLCTIAPTDMLPLANDLRRSLLLRRRHLPQGAPTSPALSNLVCRRMDRRLAGLCAKFNAVYTRYADDLTFSGDEKFAAALGDFFDIACRIIALEGFRINWAKRRIMRKGARQLVTGVVVNRRTTLPRGERRHLRALLHHWRTKGDFTAPPHVENKVAWLGGKLAYFSMIDPAKGAPMLAQFKALARGR

SEQ ID NO: 6667 - protein, 435 aa, unidentified
  source 1..435: note = Related to VGYW01000017.1; note = Planctomycetes bacterium
MFQWSFRPLKYSAQESDVKPSPPPASRIPDSRFQITDCRLRSGESSAVNAFWIIGALIAAWLVLRWLTGRGTARPAGDPFVTKRNPKTGEPVPPGSGKGRERLRATATHRPQLLAENGLPNIARRDDLARALGITRGTLDWLAFPDDREQPPHYSAFAVPKRSGGYRVLYAPKPKLKAAQHWIRKEILSKTFAEDPAHGFVAGRSIHTNAQPHAGKDIVVTLDLDNFFPSVTYRRVRGIFQSLGYGEEVAIPLAMLCTVKPAEKVREFVGGQRHRMLPQGAPTSPALANLACRHLDLRLAGLAKKFGCTYTRYADDLTFSGDDTFRRSLKRFLKLLHQIIAKEGFKLKKGKTHFARRGARQEVTGLVVNDGPRVPRAYRRRLRAILHNARRGGLEAQNREKHPHFRQALRGRIEFVRSTHPDLAEKLIAELNAIG

SEQ ID NO: 6668 - protein, 388 aa, unidentified
  source 1..388: note = Related to VGYV01000061.1; note = Planctomycetes bacterium
MSVFWIVVALIAAWIVLRALTGRRTARVVGDPFVRMRNPKTGEPIPPGSGKGRMRLRATAAHRPELLAENGLPNLASREELAAALGIPRGTLDWLALPERKKEPPHYTAFAVPKRSGGYRVLYAPKAKLKAAQHWIRREILAKTFAEDPAHGFIAGRSIHTNAAPHTGKDIVVTLDLDNFFPSVTYRRVRGIFQSLGYGEEVAIPLAMLCTVKPAAKVREFVGGQRHRMLPQGAPTSPALANLACRHLDLRLAGLAAKFGCTYTRYADDLTFSGDAAFERSLKRFLPLLQKIVKAEGFKLKKDKTHLARRGARQKVTGLVVNDGPRVPRAYRRRLRAILHNARKTGLDAQNRDKHPHFAHALRGRIEFVRSTHPQLAAKLLAELRSLG

SEQ ID NO: 6669 - protein, 369 aa, unidentified
  source 1..369: note = Related to nan
MTERRAAMGFFDWLTRRLLGRGKPAAPPEERLGRKRLRATAAHRPDLLAQNGLPSLASRDDLAAALGISRGVLDWLAFPERKEEPPHYVAFAVPKRSGGYRVLYAPKAKLKAAQQWIRREILAKTFAEDPAHGFVAGRSIHTNAQPHAGKDIVITLDLQDFFPSITYRRVRGIFQSLGYGEEVAIPLAMLCTVKPAEKVREFIGGQRHRMLPQGAPTSPALANLACRHLDVRLAGLAAKFGCAYTRYADDLAFSGDATFERTLKRFLPLLHQIVKAEGFKLKKGKTHLARRGARQEVTGLVVNDGPRVPRAYRRQLRAILHNARKNGLEAQNREKHPHFAHALRGRIEFVRSTHPQLAARLLAELKALA

SEQ ID NO: 6670 - protein, 369 aa, unidentified
  source 1..369: note = Related to nan
MGFFDWLTRRLLGAGRPTPNRPEWAEVSEEAGRSKRLRATAAHRPQLLAQNGLPPLATRDDLARALGISRGALDWLAFPDKAKEPPHYSAFAVPKRSGGYRVLYAPKGRLKKAQQWVYREILAKVKPSAAAHGFAKGRSIHTNAAPHAGKDIVITLDLQHFFPTITYRRVRGIFQSLGYGEEVAIALAMLCTVRPAEKLRGLLGGQRHRMLPQGAPTSPALANLACRHLDARLAGLARKFGCTYTRYADDLTFSGDAAFERTLKRFLPLLHQVVKKEGFELQKGKTHFARRGARQEVTGLVVNDGPRVPRAYRRRLRAILHNARKTGLEAQNRDKHPHFAHALRGRIEFIRSTHPQLAVKLLAELKALR

SEQ ID NO: 6671 - protein, 370 aa, unidentified
  source 1..370: note = Related to JABMQU010001270.1; note = unidentified bacterium
MGFLDWLAGLFGGGPTESGGRSWGVFEPPPPRERRKKLRATAHHDPDRLAAQDLPSLRDCAELAGFLGISPNTLRWLTHVDEGDEPEHYVAFAVPKRSGDYRVLYAPKAKLKQAQRRVYDAILSRVPLPDAAHGFVPKRSILTNAEPHAEQYVVMNVDLQDFFPSITYRRVRGIFQALGYGEEAAIPLALLCTVKPAGKLLEYMGHVRHRQLPQGAPTSPALANLACRRLDARLGGLARAFGATYTRYADDLTFSGDDAFSDALGRFVRHARTIIADEGFRVNARKVHIARKGRRQQVTGLVVNDAPSVPRRYRRELRAILHNARTTGLDAQNRHNHPDFARHLRGRIAFVRTTHPGLADQLQRTLDSLL

SEQ ID NO: 6672 - protein, 355 aa, unidentified
  source 1..355: note = Related to JADFXM010000017.1; note = Candidatus Riflebacteria bacterium
MQTILWLLILLAFLKVVSNIKQRIRIFLNGDFNRLHKLGLPQIEDFSQLANFLKISETELNWLIDKSSANPQTGISRHYVLKEISKKNGKKRLLHIPKAKLKEVQWIILDKILNLLSYHPAAHAFCFRKSIVTNAENHLGKAIVIRADLKDFFHTIRTHRVRAIFRRLGYSYKVAYSLALLCTSRLPNSQKRALPQGAPTSPAISNLIAFSLDRRLTGLALKLGFTYTRYADDLIFSGNRKIVKALLKNLKKIVSSERFILNKEKLLIARAERRQKVTGITVNQKLSIPRNERKKMRAILHNSLKTGLEKQNLIQHPNFKEHLRGKLSFFKMVNPDQARPLIESFNKTVKKELAS

SEQ ID NO: 6673 - protein, 327 aa, unidentified
  source 1..327: note = Related to JACPCR010000136.1; note = Planctomycetes bacterium
MAAWLAITPAKLRWLAWPRSHAPHGVRKRYFGPPDPVQHYYEAVRIKPDGRKRYLGCPKRELKEVQRKILRGILEKLPPPPRAHAYCRGRSSLTNAREHVGHAVVVHLDLSHFFNSINVRRVVGLFAALGYPRPVAVTLGLLCTYQVHPEVGWEFFNRYRRVVHRGLPQGAPTSPALSNLICQRLDRRLSGLARRFHARYTRYADDLTFSGNRDFAKGLENFLKMARRIIAEERFVLSERKLRIARKGSRQCVTGIVVNDQPGVGRTQRRRLRAILHHCGRGRPEEQNRGKEENFRGYLQGWVSYVGMVNPAQGQKLQSALERVRWP

SEQ ID NO: 6674 - protein, 400 aa, unidentified
  source 1..400: note = Related to SOJX01000071.1; note = Planctomycetes bacterium
MVKYRSPPFFYEGNVGFLKWLKNVLFGGGEEERFKSFEKEIYIERVSYRGAGKKEVSRPRRNVRASEKIPPGGDRKLLNELGIPILAGNPDIARRLGVSTGELCWLAFPKRFDTVDHYREFHIPKLNGGERRILAPKKKLKAAQRWILKNILTAERVRGLVHENVHGFRRGKSVATNARPHVGAEVVVHLDLTDFFETITLPRVRGIFRKLGYSHVAATTLAILCTVYIGRVDETKTGSRKQVLPQGAPTSPAITNLVCNKLDRRLAGLARRYGVKYTRYADDITFSGGKSFCNALRRFLPTVRRIIREERFTINEKKVHVARKGARQSVTGIVVNQQMNIPRSERRRYRAILHQLRKIPPGTEKPKKLNAHLSGVAAYLSMINPEAGRKMHEEVKSVFN

SEQ ID NO: 6675 - protein, 347 aa, unidentified
  source 1..347: note = Related to JACRIJ010000080.1; note = Planctomycetes bacterium
MGLISDFFKNLFGSPVENKGGENEPTQKSAGNDSGPSELTRLEMNRLPLIAGRAELLQELQISDKELDWFVKHPEWHYTVVSIPKKSGGARTIYAPKKRMKRIQRWILSEILSKARVEGSAHGFAKGRSITTNAFPHTGTEIIVNIDLENFFDSVKLWRVYCAFRNFGYSGELSSIFARLCCVKGALRQGLPTSPALTNVVCAMLDRRLNGLAVKFGCTYTRYADDMTFSGDLKFKASLSRFIPILKKIIRGEKFKINRSKMRITRKGSQQKVTGLVVNEKVNIPREKMRLWRAIIHNCRIKGLESQNRDKHKHFAAHLKGLVSFAAQVAPAKSERMREELSQVTKP

SEQ ID NO: 6676 - protein, 348 aa, unidentified
  source 1..348: note = Related to WSZJ01000110.1; note = Planctomycetes bacterium
MGFFDFLKDLFNPVKGGTGGPKPAGNSPARALAPRKTYASPGGPRPLAPGLPQLPTPASLAALLRIAPEKLAWLAKEKGRHYATWKIPKAKGHRTIEAPKKQLRAAQRAIHREILSKVAPNAAAHGFCTGRSPRTNAEPHVFRKLVVKLDLRDFFWQVKRNRVAGQFRALGFPPDVAAILWRICCHRGRLPQGAPTSPALTNIVCRRLDARLSGLAKKYKARYTRYADDLTFSFDAPNLAVQEPLRAIRTILSEEGFSLAREKTRFLRRMSRQTVTGITVNSKLSPSREEVRSLRALLHEARTKGPKVANRNQEEAFGARVRGRIEAVRAIDKSKGEKLLADYRRVAW

SEQ ID NO: 6677 - protein, 340 aa, unidentified
  source 1..340: note = Related to JADLHC010000024.1; note = Planctomycetia bacterium
MGLFDFLKDLFNPVKGPPPGKGGPPVSRPGSGGRPVRPLAAGLPPARDTGELAAILRTTPEKVAWLVRETGRHYATWQVPKAHGRRTIEAPKKQLRGVQRAIHREILSRVSPAEAAHGFRKGRSPRTNASPHVAKEMVIKLDLRDFFWQVTRNRVAGLFRSLGYPEDVALVLWRLCCHKGRLPQGAPTSPAITNLVCRRLDARLAAAIRSMNGDYTRYADDLTFSFREARLPMPRLARFLRRIISDEGFRVAPEKTRFLRRSSRQAVTGLTVNAKLSPPRREVRALRALLHEARLRGPEAANRDHLKGFSAVVRGRIEAVRAIDRAKGEKLLAEYRRVSW

SEQ ID NO: 6678 - protein, 342 aa, unidentified
  source 1..342: note = Related to JACPRD010000106.1; note = Planctomycetes bacterium
MGLFDFLRDLFRPVKRPAPDPPPPAGAKAKGPPNRGASPPPAGLPPIESLAVLAGRLGIPQKDLAWLMKPRAKHYHTHEIPKADGRVRKIESPKSRLKKAQRWILREILDRVPAAPAAHGFVKGRSPATNAAPHAFKAIVAKLDLRDFFWQVTLRRARGIFEALGYSGDVAKALARLSCRDGRLPQGAPTSPALTNLACRRLDRRLEALARAFGASYTRYADDITISHRTGCAPLDRLLAWTKTILREEGFHLAPEKTRIVRRGSRQTVTGLTVNARVSPPRGTVRALRALLHEAKTKGAAAANRDGLPHFAAHVRGRVEAVRAVDRAKGEKLLAAWRSVNW

SEQ ID NO: 6679 - protein, 412 aa, unidentified
  source 1..412: note = Related to JAFGQW010000342.1; note = Planctomycetes bacterium
MSLKRWFGRWLATAEHRLERQRAEKRRAGPPPWRYPDPFTGELITPPDDGDRDRLAAAGLPVLSTLEDLSRATGLSWQRLLWLAAPSSAYAGGSPHYTFFTVPKARGEPRIILAPKPALKSVQRWILRNILNRIPLADPVHGFRRGHGTRTNARVHCGKDVVATFDLEDFFHTVTYRRVRGLFRSLGYSTELSVLLGLLTTFRPAAFPYDYMRHVPTLVWLKSMSTARRSWRGHPTTPPFLPQGAPTSPALSNLVARHLDRRLAGLARRLGAAYTRYADDLTFSGHAEFRHGLARFLPLVKRIVREEGFYLATGKQRIRRKGGRQVVTGVVVNRRTNVPRETYRHLRVLLHKAAVHGPESVRLEPAAPTDPGVLRPHLEGWVAWVSHLNPARGARLRRTFEAIAWPAPSGEA

SEQ ID NO: 6680 - protein, 322 aa, unidentified
  source 1..322: note = Related to JACPRC010000174.1; note = Planctomycetes bacterium
MLGITLRDLAWLASAAPLSPPHYVLAVRKKRNGGKRLILMPKKRIKAVQREIHRRILSRHAPSPWAHGFATGRSIRTNAAPHVGKEVVAKFDLREFFHSITFPRVRGLLRQLGYAPDVARTIALLCTFHPGRIRERMRPGGVSYADLAAAFRAPGRYGFRRILPQGAPTSPALANLAARGLDRRLAALAKRFRADYTRYADDLTFSGGAEFHRDLPRFIPLLRSIVRDEGYFLAREKTRVIRRGNCQRVTGLVVNEKPNVPRGTYRELKAILHNCVTKGPESQNRAKVRDFRAHLAGRIAFVKSVHLRHGMRLEETFSRIRW

SEQ ID NO: 6681 - protein, 402 aa, unidentified
  source 1..402: note = Related to JAFDLY010000161.1; note = Deltaproteobacteria bacterium
MDDGYQFKNKRVFLENLRRINQRAGVEPEIIDLIEVRFWGNRIEINDKELQGFLHKNPHLDQRVLNFLASYFLEMKRRGLRCIFTPSHLAHLLEISLKRLHWLADDKRSHYTCFSVKKRGGGVREVFAPKPNLKAVQRQILDDLLHRVRLNSHAEGFRKRRSILTNAKRHVGKKVVIKMDVKDFFPSITFERVLGMFVSLGYPRQVAVLLTRLVTHNGKLPIGAPTSPAISNIVSRRLDRRFSRLGEKAGFDYSRYADDITISSNNKGVNRMIPFFKEILREEGFEANEAKMRILRSGGRQKITGIVVNKKPNLDKHEIRKLRAVIYNCSHKDLRQEAKRWAENEKGLTNPSSYGLREFRSSLKGKVNFVRMVNPETGKRLIEALDYKGSSFFQTPPKAEVI

SEQ ID NO: 6682 - protein, 406 aa, unidentified
  source 1..406: note = Related to QMMZ01000129.1; note = Deltaproteobacteria bacterium
MEQKMDHRYLCNNKEKFIKNLRLFNQRVEVEPEIVDLIEAYARLRLDQGKEIRYYGNRISSKNKELQEFLDKNRHLDHRILNFLASYFLEMQKRSFRCVFTSSHLAHFLKISTKRLNWLANDRIKHYTCFNIKKRDGNKREIFAPMPYLKGVQRKILDDLLQRVGLNSHAEGFRKRRSILTNARRHIGKKVVIKMDVKDFFPSITFKRILGMFISLGYPRQVSLLLTRLVTHNGRLPIGAPTSPAIANIVSTRLDKRFSRLGDKMGFDYSRYADDITVSSDNRGINKMIPFFKEIIREEGFEINETKMRVLRNAGRQKITGIVVNEKPNIDKKEIKKLRAVIYNCHHKDIKHEVKKWAKKEKSLNNPSDYTLSEFKSSLLGKINFVKMVNPKIGNRLLKQLGQLSI

SEQ ID NO: 6683 - protein, 404 aa, unidentified
  source 1..404: note = Related to JAFDLJ010000099.1; note = Deltaproteobacteria bacterium
MYDRRLCENKDVFINNLRATNERAEVEPDIVDLVEAYARLRLDQDNELRFYDNKIWINDKELEQFLDKNRYVDHRVLNFLASYFLEMKKRGLKCILNSSHLAHILRVPRKKVNWLANDRADHYVCFHTKKRDGSKREIFAPKPYIKKVQRQILDELLHRVRLNFRAEGFRKKRSVVTNARRHISKEVVIKMDVRDFFPSINFKRVLGMFVSLGYPRQTSLLLTRLVTHNGRLPIGAPTSPAISNIICRRMDKRFSKLGRKMEFEYSRYADDITISSNNKKITGMIPFFKEIMGEEGFVVNEAKMRILRSGSRQKITGVVVNKKSNIAREEIKKLRAVIYNCGHKDIKQEMIKWARNEKKLANPYGYTLSQFKLSLLGRIGFVKMVNPGIGNKLLQQFDTLSLNA

SEQ ID NO: 6684 - protein, 415 aa, unidentified
  source 1..415: note = Related to JACNHB010001573.1; note = Deltaproteobacteria bacterium
RQKMAGGLHCKDKESFIKHLRIINQRAGVEPDIIDLIEAYAGLRLNQDEEVRFFDNAVNIKHIKDKEIKEFFDKNRRLDHRILNFLASYFIEMKKRGLKCILNSSHLVHLLELSINEINWLANDGKNHYRHFTRKKRDGGTRDIFTPRARLKEVQRHILDDFLHRVRLNSHAQGFRRKRSIITNAARHIDKNIVIKMDAKEFFPSITFQRVSGMFASLGYPRQVSVLLTKLVTHRGRLPIGAPTSPAISNIVCRRMDKRFARLGEKMGFDYSRYADDLTISSNNKKLTKMIPFFKEIMRDEGFEVKEAKMRILRNSGRQKVTGIVVNKKRNIERKEIKKLRAVIHNCKHKDIRQEAITWAKREKKLDDPYAYTLREFKSSLLGKINFVKSVNPEMGGKLFQQVTALQFPEPRKMG

SEQ ID NO: 6685 - protein, 404 aa, unidentified
  source 1..404: note = Related to JAFGES010000121.1; note = Desulfobacterales bacterium
MIDKTLAGKKQECIKNIRFINQRAEVEPEILDLIEAYAGLRLEEDNEVLFYGNKITGKNRELNEFIDKNRHLDPRALNFLASYFLEMKKRGLKCIFSSSHLSHFLKISTKKLNWLASDKEDHYISFSEKKRGGGIRQIFAPKSTLKGIQRQILDFLLQSVPLNSHAEGFRKKRSIVTNAKRHIGKKVVIKIDAKNFFPSITFERVLGMFVSLGYPRKVSLMLAKLTTHQGRLPTGAPTSPAISNLISRRLDKRLAGLGEKMGFDYSRYADDMTISSNNKNASRMIPFFKEIIREEGFESNEAKLRILRSGGRQKITGIVVNQKVNVDRKQIKKLRATIYNCRHKDIKQEMIKWAKKEKNLKNPYGYTLKEFRASLLGKINFVKSVNAKAGKKLLKQLDELSLKT

SEQ ID NO: 6686 - protein, 402 aa, unidentified
  source 1..402: note = Related to JAIOSW010000149.1; note = Desulfobacula sp.
MDKKKSCGNKKQYLKNLRLINQRANVDPEIIDLIEAYARLRLDYDKEICFYSNKTSSDKLELNKMLAKNRHLDPRCLFFLKAYFIAMKNKGLTCLINSAHLAHLLNVSIDHLIWLSNDKSNQYTRFHIKKSSGAKREILAPKPKLKIVQRQILDNILQKIQLNSHAEGFRKKRSILTNAKRHIGKKVVIKMDVKNFFPSITFKRVLGLFIALGYPHQVSMTLTKLMTHDGKLPTGAPTSPAISNILSTKLDKRFANLGEKTDFDYSRYADDISISSNNRNITRMIPFFKKIVQEEGFEINEAKMRILRNGGRQKIAGIVVNQKLNIEKREIKKIRAVLFNCRNKDINQEIKKWAQKEKGLKASLFYTIDEFKSSMLGKINFIKMVNPQTGQNLLDQLNDLNA

SEQ ID NO: 6687 - protein, 407 aa, unidentified
  source 1..407: note = Related to VMSU01000220.1; note = Desulfobulbaceae bacterium
MALCTKQETYLNNLKTINTQAGVEPDLVDIIVAYARLRLERNLAITFYQEGIEKKTTKYPSLRTIIDKNQEADPRALNFLAAYYLEMDRRNLLCIFNRQHLAVTLGVSISNLEKQASTASSKYSHFFAPKKSGGQREILAPHPELKALQRKILDSLLDKVPLNAHAEGFRRKRSIVTNAQRHPDKKIVIKIDIKDFFPSTTANRVFGMFAALGYPKNIAAILTDLTTYQGRLATGAPTSPAISNILCRRLDKRFARLGQANDFSYSRYADDLTISSNHPKVTTMIPFFRQIVSEEGYTVNEKKLRIMRSGSRQQVTGIVVNQKLNIPRHEIRKLRAVIHNCKQKSLKVEIHKWAKLEKNHPNPTLYTEDDFEKSLSAKIHFVKMVNPSAGTKLLVDFKSLGLRTVVA

SEQ ID NO: 6688 - protein, 404 aa, unidentified
  source 1..404: note = Related to JADGBM010000020.1; note = Desulfobulbaceae bacterium
MALCREKEQYLKNLRLVNLRADVDPELVDLLVAYAGMRLENNRDVNFFQDDVKERAGKHPYLLRFLQKNKETDPRALNFLVSYFLELKTRGIPCVFNRQHLADTLGISLVAMDELAQNSPKYYTRFSAAKKNGAQREILAPKAELKTVQRKILDFLLIKVPLNNHAEGFRKNRSIVTNAQRHTDKKVLIKMDIKDFFPSTKAKRVFGMFFSLGYPEGVASTLTNLTTFKGRLATGAPTSPAISNVLCRRLDKRFARLGEKCDFSYSRYADDLTVSSNNTNLAGLLPLFKEIVLEEGYELNENKLRIMRSGSRQKVTGVVVNIKPNIDKNEIRKLRAVVYNCRHKDINKEIYKWAQMEKSHPEPSQYTLDTFKRSVSAKINFVKMVNHKAGEKLLADFKALSWPG

SEQ ID NO: 6689 - protein, 438 aa, unidentified
  source 1..438: note = Related to nan
MPNLASHVPVLSQVRDNSIKCPGIIFFPKNNLKIMTECTEHSIFLRNLVEVNQRAGVDSEVLDLIESYARLRLGRNREVDFYNCSRPVSEKDQDLRAFLEKNKNLDERTRNFLVAYYQELKDRHLCCIFSSDHLAHLLQTSLPRLHALTRDSRNYHVFTIKKSSGADRIIQAPHKQLKTVQRKILSTILHPVPLNKYAEGFRKKRSILTNATHHVNKKVIVKLDIKDFFPSIDSNRVFGMYLHLGYPRRVAQLLTDLSTVQKKLPTGAPTSPTIANIISRRLDKRFVRLGMKTDFTYSRYADDITISSDTDNILKMIPFFKEIIHDEGFTVNEGKIRILRSGSRQSVTGVVVNEKPNIKRREIKKLRAVLHNSKRGSLHKQAAIWAMREKGLKNYRSYSVVDFYQSLLAKIHFVRMINEKAGNTLLADFYRIPWPVIT

SEQ ID NO: 6690 - protein, 319 aa, unidentified
  source 1..319: note = Related to MVDA01000360.1; note = Desulfobacteraceae bacterium 4484_190.1
MEMKNAGLTCLFTCSHLSHILDVPLKRLRFLARDNGSYYKFSIPKANGTKRVIMAPKPDLKVVQRKINHLILQKVRLNNRAEGFRKKRSIVTNSLHHLQKKVVVKMDIRDFFPSIDFERVFGVFCSLGYPRGVSLLLTDLSTCQRVLPTGAPTSPAISNIICRKLDKRLVLLCEKSGFEYSRYADDITVSGNSEQVVKMIPLYRRIIVDEGFKVNEEKLRITRSGRRQKVTGIIVNRKMNIDRREIRKLRAVLNNCRHGSIEEQADMWASREKKCTAPFNYPVEKFKKSLHARISFVKMVNPQMGHRLLDEFHSVFSAG

SEQ ID NO: 6691 - protein, 404 aa, unidentified
  source 1..404: note = Related to PQAM01000010.1; note = candidate division NC10 bacterium
MARWDEDKEAFIRNLIQVNLRAGVEPELVDLLAAYARIRLQQGDKVTFYSEDADLPGSRRKAVRALLEANRHLDPRALSFLSTYAEAMVQRGLIPILTRTHLAKLLEVSENELSDLATCTDRYYDVFSIPKANGQRRKIQAPRPPLKEIQQRIAALLERVKLHPDAHGFRGERSILTNARLHLDRQVVINLDVKDFFPSITFERVLGCLGSLGYPHGVALLLTQLTTYHDVIPTGAPTSPILSNLICRRLDLRLSRLGDQLNFRYSRYADDMTISSEDGGIVRRLPFFKEIIREEGFEVHEEKIRVMRKGSRQQVTGVIVNEKPNLPRQELKKLRAVIHNCLTADLETQRIRWALTEKGLQDPDGFAMEAFRRSLCGRVSLARMVNPRAGVQLLDMLKRVEWRI

SEQ ID NO: 6692 - protein, 391 aa, unidentified
  source 1..391: note = Related to JAAYUU010000189.1; note = Deltaproteobacteria bacterium
MECSHEEFVSNLVEINQRAGTAPELIDLLGAYTRLCLKRSKEIEFYSDSLTLSTNKAAIRKFISQNRHIDPRSLSFLVSYAEMMLDRNLPFIFNIAHLARFLDLDKENLLRLIQNKESYYHSFYIPKSHGGKRHICAPKAELKAIQKGILTEILEKVFVHPCANGFRRGRSIVSNAQNHVGQEIIIKMDIKDFFPSITFARVKGVYLDLGYPEGTAEALTELSTYKGRLPMGAPTSPYLSNIVSSRMDRRFAGLAQKMDFHYSRYADDLAFSSNDPTFNRWIPFFRHIIEDEGFEVNEKKVAIARKGGRQKLTGVVVNRKINTQRDEYKRLRAVIHNCLNGDIQEQMKRWGVSELDRFKNSLRGRISFVRMVNREKGNKLLSGFERISWPA

SEQ ID NO: 6693 - protein, 391 aa, unidentified
  source 1..391: note = Related to JACQXB010000006.1; note = Nitrospirae bacterium
MKCSDEQFISNLIELNEKAKVAPDLIDIITAYARLCQRYGKEVKFYDKNPAISTNKPTIKDFIDKNPHLDKRSLSFLVSYAEMMRKRGLPFIFNITHLANFLEVEDVRLKQLIKYKEKSYHNFYIPKSNGGKRLISAPTDHLKTIQRKILKDILERVSLHPSANGFRIGRSVTTNAEKHTGQEVVIKIDIKDFFPSITNQRIKGIYVNLGYPDGVAETLTGLSTYKGRLPMGAPTSPYLANIVATRLDRRFANLSKKIDFVYSRYADDLAFSSKDKTFARSIPFFKKIIQDEGFEVNEEKVVIARKGGQQKVTGVVVNRKVNIEQKEYKRLRAVVHNCVNGDLREEMKKWGASSLNEFKSTFLGHINFVKMLNNEKGYRLLDGFRQISWPV

SEQ ID NO: 6694 - protein, 376 aa, unidentified
  source 1..376: note = Related to MEOY01001140.1; note = Bacteroidetes bacterium RIFCSPHIGHO2_02_FULL_44_7
MANCPDERFISNLIELNKRADVDPEIIDLVAAYARLCLKDGKELNFYKEYLALSTNKPTIQRFIEKNASLDKRSLSFLVSYAEMMRKKRLPFLFNRAHLAIFLGTKEGEIEAIIQNKESYYHTFFIPKRNGDERRITAPKDRLKEIQKTILRKILEKVSVHFAARGFKRRSSIISNAHGHIGQEILVKMDIKDFFPSITYERVKGIFINLGYPEGVAEALTELTTYKGRLPMGASTSPYLSNIIAIRMDKRFTGLAKKMDFTYSRYADDLAFSSKDGNLKRHIPFFKEIIKDEGFEVNEQKVVIARKGGQQKVTGVVVNRKVNVEKREYKRLRAVIHNCKKGNLKTEMAKWGASNPGEYELPRSKLTGYQKNVNCC

SEQ ID NO: 6695 - protein, 880 aa, unidentified
  source 1..880: note = Related to JABMMJ010000725.1; note = unidentified bacterium
MKKEKQATRTLSNPIQNDVLKNRLQSIFRSFRKADRTDIKSVEDALDRLQFLAFPEFYQACLFLLCIECERCVEANVPPSVIRAERIVQAVEAKAAAGMQGRLAYWINQKLTTSYPLGLVQRLTAYSHKINESRNTQCITLVDAGRHEEALAVAESIEDTEQQSKALCAIAADFARLSQKETADPLFKRALDLIEIFYAYTFEDADESGYGGDYDEYLQVKGKCTRYMVGKMAEIGWFKRAEELSNNIEDEWLRSEAFCNIAKDLAASGHLSESFEAAARSGPHQSIALGCIAETIAKSGNFFQALNVFSKANDLAAEQQGLWKSKCLLSVAAGLVIIGTKNKARKVAEQASEVIIDSIKFYEDDVNQPADMRIRFVMDLMEVGGFETGIKVQIEPIHETLDLLAQYKSWFRVLDRIFSSGSIDALLFKCYLNGFASSAVFGNNRALMMRLIREACHMVSSDEKPEVFLALSNELALLGINDMRDDAIVRAIVAGSDHLRMQREEYIKNPTPSLPDNQPHAEEPLIPEEWPQENTRISNILGISVEMLRLVRLKVIRAQGYDAFRIPKRRKGFRVIHSPHSDLAHIQRRIKECILDPAPGLPSCVTAFRPGVSIRDNAMVHCDKAVVVKFDLEDFFPSISFTRVMGIFHSLGFPTNEARMLANLTTVHLDVSSSGPVVKSVSRSAEAFYQTKHLVDLLHEYPVNIRLLAYRWNYGKISRALALRMLRKRRRRGLPQGASTSPQLANLAAVRLDLRLRALGESMGFAYTRYADDLTFSSNERLAKVDALTSLVDEIVVDCGFRLNGRKTKIMRAPATRRVTGLIVNTTTPKVPRSMLRKVRAMLHQQAGGKLSEADIHRLRGYLSFVRMIDKEQADLLLDC

SEQ ID NO: 6696 - protein, 384 aa, unidentified
  source 1..384: note = Related to JADLCW010000072.1; note = Thermomicrobiales bacterium
MPANRALGLPAIEHRRGNTPKRGIAPTTQQESRWRSGSSIRIRWTGDARVRSGDGFVEPLDFRSLDSADDVARMTGLDIEEIRAIAWRTEAPRGGWYRRTLIPKRQGGFRLISTPIPRLAAAQRRILAAIGPHFPVHPAATAFRLGMSVRVNAACHTGRPIVVRIDLADFFSAVRFGQIHRAFECAGCTHEAARILASLTSDVAATVRPRGHRTLVVAGRGGLPQGACTSPVLANAICWDLDEDARTLGRRLGFTYTRYADDLVFSAGNSRAPVDTLIRETRRIIQAYGFHVNEAKTRVMRAGGRQVVTGLVVNGSEPRVPRPDLRRFRAFLHHCETEGLDVMSERIGKDALNYARGYLAWVHMVSPEQAARFRARHPWLGGHG

SEQ ID NO: 6697 - protein, 310 aa, unidentified
  source 1..310: note = Related to NZ_LGTP01000055.1; note = Roseobacter litoralis
MNAAEDSLDLQDISSFLGFAPQHIFYLVEDPDKFYTTIRIPKNSDPLTYRTLDIPYSELKGVQRVINRKILQKLPLNDCAFSYVSGKSIYAAAHEFCGGKAVLKMDIADFFPSITGQRVLGLFKSLGFNQSISYILSQLCLRNNCIAQGAPTSPAVSNLIMRRFDRQMEKLAASWEMSYLRYSDDVFLYKNKNFNHPKLAFYVTRIIEQNGFAVNQSKTRFHPRGQPRITLGLLTHGDKPSIPGPARRQYRAAFHRASRDFEWAYHNEARLKGILEWYKSVHGKDDAYNHYSSIHKNINTLKIHTSYRSQ

SEQ ID NO: 6698 - protein, 310 aa, unidentified
  source 1..310: note = Related to NZ_FOTF01000017.1; note = Loktanella salsilacus
MNAAEDSLNLRDISSFLGFAPQHIFYLVENPDKFYTTIRIPKNSKPHSFRTLDIPYTELKGVQRAMNRKILQKQPLSECAYSYVSGKSIFSAAREFCGGKAILKMDIQDFFPSITGPRVVGLYKSLGFTDSVAYILSQLSLRNNSIAQGAPTSPAISNLIMRRFDRHMENLATSWEMDYLRYSDDIFFYKDRNFNHPKLEELATQIIEHSGFTVNVAKTRYHPRGVPRITLGLLTHGDRPRIPGPARKQYRAAFYRASRDFEWAYANKSRLKGILEWYKSIHGKDDVFNQYSAIYRNINTLKIHTSYRSQ

SEQ ID NO: 6699 - protein, 324 aa, unidentified
  source 1..324: note = Related to CP054599.1; note = Pseudosulfitobacter pseudonitzschiae
MRFIAWHREREEVGMGAADDCQDLASIADYLGFAPQHIFYLVEDPDRCYVSIEIPKNSDPTKLRKLDIPISELKGVQRAINKKILSEFPVDECVHSYVPARSILTAAREFCPGRAVLKMDIEDFFPSITFVRVLGLFKALDFSDSASFILARLTTFADRLAQGAPTSPALSNLIMRGIDFRLKRLAATWEVKYLRYSDDIFFHKEKNFNHPKLTAYLSKVIEDGGFTANNKKTKYHPKGLPRTTLGLLTHGEKPKIPGSQRRIYRSMFFKASRNIHWAHENREKLRGIIEWYKCVYGRDDTYTQYRAILDNEARLRIHDTYQSK

SEQ ID NO: 6700 - protein, 310 aa, unidentified
  source 1..310: note = Related to NZ_FQUV01000014.1; note = Litoreibacter ascidiaceicola
MDAAALCLDLETLSGFLGFAPQHIYYLVESPESYYTTISIPKKSDPMKVRQIDIPFSELKGVQRAINKKILSELPMSDNVHSYVQGRSILTATKLLCPGRAILKVDIADFFPTITYRRVFGLFRRLGYNDAAAFILSRLCTKDDKLSQGAPTSPAISNAIMAGLDKRMERLAETWELKYLRYSDDMFFHKERNFNHTRLADVASSVVESSGFIINSSKTKYHPKGLPRITLGLLTHGPEPRIPGPQRKKYRAAFFRASRNINWAYERQAQLKGMLEWYKCVQGRSDEYIQYQAIFENIERLKIHDSYRSR

SEQ ID NO: 6701 - protein, 306 aa, unidentified
  source 1..306: note = Related to JAHBZD010000048.1; note = Xanthobacteraceae bacterium
MIAAQIQTLEDLSGALGFAPQHLFWLAGNSDALYKEFDIPKRTGGVRRISTPIAELKGVQRTILQRVLQLHAVSDANFAYVKGKSAVAAARRLAGEKSLFKLDIREFFPTITARRVFGLYRSFGFPNPTAYLLTSLTTYRGSLCQGTPTSPYIANLICRGMDTQLSGLASSWGLEYIRYSDDLFFYRNRIFNWSKFEGVVTRIVVQNGFHLNANKSRFYRAGKDRLTLGLETGQRQIRLPRATRRLHRAAFHKASMSPRWAADNLPQLNGMLSWHRAVHGKDDTASAYGRVLQIATSIKHHDPYST

SEQ ID NO: 6702 - protein, 308 aa, unidentified
  source 1..308: note = Related to NC_023065.1; note = Magnetospirillum gryphiswaldense
MTTAALSLELRELSSELGFAPQHVFYLVKCADELYFDIEIPKRTPGEFRKISVPRTELKGVQRAILRKILSSHEPSEFAHSYIKGKSVISAAKKLLGEKAVLKVDLKNFFPAISARRVFGLFRALGFSNKKAFILTKLTTYKGTLCQGAPTSPAISNLVCRSLDKNINALAISWKLNYLRYCDDIYLYHRINFNSDKLLTRLRRTVNDHGFSLNEDKTRYYAAGNPRITLGLSTHGRVLRLPRAMRREHRAAFHKASTSPTWAEANLSKLRGMAEWHKAVYGSDATYKHYREIIKNVPLMKVHEPFAI

SEQ ID NO: 6703 - protein, 302 aa, unidentified
  source 1..302: note = Related to JAIELX010000020.1; note = Candidatus Obscuribacterales bacterium
MISSVDDFASRIGLSEFCLKRLILRSESFYSSFSLPGRSGRRHNISSPATELKTVQRWILKNVLSRFELHEACVEGRSRSTPNADSFVLKASLKSFFATLNRARVEGLFRSLLFPESVAVSLARLTTFLNALPQGAPTSVYIANLICRRLDRRVNGLCGVRNWSYRRDCGDIVICGQGRVTDKVLEQLTQIAREEGFDIEIHKRTSCNGATDGDSKTGPVTGRVSSQGADLSFRRLRRTKSQRRIVGRPARKQSRARSSFASRLPELCGLDRSFTGSARQKRVRAELRLLFNSAVGNSSNTR

SEQ ID NO: 6704 - protein, 323 aa, unidentified
  source 1..323: note = Related to JADJWK010000004.1; note = Candidatus Melainabacteria bacterium
MSIRFGIAERLVLLLVIKMIETSRSIKMDNLLETLEISELELKRYALRAEKNYHELHRLKKSGKTRRVVAPSAELKGLQRKISRRILRHHDLQDSCTGYRPGHSIVTNARPHTGKRFVLNIDLKDFFPSISFNRVVGLYQNLGMDRNAARLLARATTYKGALPQGAPTSPDIANLVCRTLDKRLEGFCKIRQWSYTRYCDDITISGDTCTDGAMDTLRTIIESEGFRINEDKTRMRMSHQRQTVTGVVDNERPNLEISERRKLRTICHQLRWNPESFEGLGKKLMGSLSFANMIGGLLRKSEFQSAWRLLKKKHHEARHASTT

SEQ ID NO: 6705 - protein, 366 aa, unidentified
  source 1..366: note = Related to JACKCM010000002.1; note = Candidatus Obscuribacterales bacterium
MFRQPDVVGNFQLTIKLLGLGSNSVMHESSNAGNERLERILPSGVKESFPVFYFCEFVHRREAGVLPVPYMYDIQTVAQLANALDSSEFELLRFIYRAEEFYTRFRKKKSTGDMRTVAAPRKPLKAVQKAIVKKFLADIPLPDECTGFRPGMSILSNAQPHCKKRFVFNTDLEDFFGSISSERVLGLYLRLGFSFPVACVLTELTTYIGCLPQGAPSSPYLANLIAYSMDADLADFCAANEWSYTRYCDDITISGNGNFSLADMRTISDIVEVEGFRMNIKKTRFHKHNSKQMVSGLVVNEKPSLPRAKRRKIRAIFHQAEVEPERYGNRVKELENHLSILSMLDPQSKEVEKYRTVLNRLISQAK

SEQ ID NO: 6706 - protein, 305 aa, unidentified
  source 1..305: note = Related to JAIERK010000069.1; note = Candidatus Obscuribacterales bacterium
MTTIRRMDIFELVEQLETSELHLRHLATRSERFYREFVVAKKSGGGRKIVAPSDDLKDMQKKIAVLLLNKVDLHEACTGYRNGKSIIDNAQPHVGQHFVLNMDLKDFFPSISSNRVTGLFYNLGWERPVAMLLARITTYKGSLPQGAPSSPAIANLLCRRLDTRLSNFSRVRGWQYTRYCDDLTISGQGTPDSDTDTIYSIIESEGFTVNLDKTRTRFKHQRQVVTGIVVNQEVRIPREQRRLLRAICHQMSMEPESFRGVSNQVLGQLSFAQMVEGQNAPETYRESAQCLLDAKKLARQAGATY

SEQ ID NO: 6707 - protein, 318 aa, unidentified
  source 1..318: note = Related to DNIL01000199.1; note = Armatimonadetes bacterium
MLIASSCRQREPLTACDGHPTLRGGARMLQTTDDLAALLGVETATLVKLADPARTRWRHHTVPKRSGGTRHLFEPPHALQVVQRAIGRKILDRYTPHDAAKAFRRGASVVDHAHQHVGQAFVYSTDLRDFFPQINIRRVRGMFLSLPGLDCSPSVAELLARLLCWRGCLPQGAPTSPAIANLIAYRLDLRLTNYCQRRGWTYGRYADDITISGRGRFTARDQRWVEGCLAAEGFPVNPAKTDLRRQHERQTVCGLLVNDRVRLPRQTRKQKRATAHALTQSTDPETRTAQAHGNLGWLKMVGNEQALVTQFQVAVDKS

SEQ ID NO: 6708 - protein, 300 aa, unidentified
  source 1..300: note = Related to JAIEQI010000031.1; note = Candidatus Obscuribacterales bacterium
MPSLSKTLPTIATLLDLAEFLSVSEFELKSFCLRPKKFYNTFERPKRSGKGCRKICAPSEKLKSVQKIIKEKILDCVDAHESSTGYKRGVSIVENAQVHVGKRALLNLDIENFFSSISMPRVIGLFASLGYTEDVAIMLGRLCCFEHALPQGAPTSPSLANLICHKLDRRLKGLAFKSHMQYTRYCDDITLSSDENISGKFVEVVKEIIKDEGFSVNEDKTRVLSQRSCQIVTGLTVNQKVNLPREKRRLIRASFHRASQQTALTDAEQKRLEGLASFMQMIEQHCQKQRRRVSPTDIKS

SEQ ID NO: 6709 - protein, 360 aa, unidentified
  source 1..360: note = Related to DPCG01000093.1; note = Lentisphaeria bacterium
MGILSWMFGIKSKKYNYSKVEKALGPWQPYAGSSVIHGTMLPKSFTIPPALKKKRDEPDLTTFSSALFPYWLRIDPSLAGFVLMKINSGEMYRQKEIPREGKAPRIISVPAPVLKFIQKRILARMLEQIEIHPAAHGFVKGRTIFSAAEPHVGKRIVLSIDLRDFFGTISFKRVAGMFKAYGIAKKQAFLLAGLCCCQKKLPQGAPTSPAISNIVCRRLDSRLAGLCKKYDFSYTRYADDLIFSGDERMLRFLKVFKEIVQKEGFAVADEKTFIRRSGSRQKVLGLNVNSKVSVPRKARRLIRAMVHRQAQEGSPDGEMVDFLLGHAAFMKPAHPEQSAKLKETLDKTWKAYLVSCIANK

SEQ ID NO: 6710 - protein, 348 aa, unidentified
  source 1..348: note = Related to MHBH01000069.1; note = Lentisphaerae bacterium GWF2_49_21
MGLLNWLFGKKSHKYNYGRVEKILGPWKTYSGTLCIPGTKLPKSFTVPPSLKKNKDDAEQTTLSAALFPYWLRIDPSLAGFVLSKIKSEEMYKQKEIPREGKAPRIISVPAPILKFIQKRILARMLEQIEIHPAAHGFVKGRTIFSAAEPHVGKRIVLSIDLRDFFGTISFKRVAGMFKAYGIAKKQAFLLAGLCCYQKKLPQGAPTSPAISNIVCKRLDSRLAGLCRKHNINYTRYADDLVFSGDGRMLRFLKVFKEIVQKEGFAVADEKTFIRRSGSRQKVLGLNVNTKVSVPRKARRIIRAMVHKQSQEKKPDDEMIAFLLGHAAFMKPVHPEQAAKLKNILENL

SEQ ID NO: 6711 - protein, 348 aa, unidentified
  source 1..348: note = Related to RFGW01000551.1; note = Bacteroidetes bacterium
MFKYLKNILGVKSRKKYNFFRINRILGDWQPYSGSKCIKDTKLPKYLDLPKDVEKWGDYSGQVPLSTVIFPYWLRLSSEIAGFLVKQVNSGKLYNDIEIPREGKDPRKISSPHPLLKFFQRRILTRLLEQMEVHPAAHGFIKNRSIFTALEKHTGKRVVISLDIRDFFDTITFKRVCGLFKGYGIKEDKALLLAGLCCRNGRLPQGAPTSPMISNLICKKMDSRLTGLAEKNGFSYTRYADDLIFSGGENILKFLPIIKQIIKEEGFTPAEEKTKIRRSGSRQQVLGLNVNSKVSVPKKVRRLIRAMVHRQALSEGRNHEMLSFLYGHIAFMSNKHPEQAEKLKRQLI

SEQ ID NO: 6712 - protein, 350 aa, unidentified
  source 1..350: note = Related to JABIYZ010000168.1; note = Lentisphaerae bacterium
MLNLLRKLFHLPPARRRFPSQAIEDVLGPWEPYAGDDVLPRSRLPARLELPPAVAEWGDVPGARRLDRVLFRCWLRLDPTLVGFLLSQIQQGELYTVHEIDRPGKAPRRIAEPDRVLKFVQRRILERVLEQMEIHPAAHGFVKGRSIFTNAEQHTQKAIVIALDARDFFPTITFKRVNGMFIKSGFAADTAGKLAGLCCFRGRLPQGAPTSPMISNLICRRLDGRLSGLLTKFGGTYTRYGDDMTFSGPEQILSLLPLCRRILAEEGFELAPEKVRICRRGSRQTVTGLVVNDKVSVPRRVRRYIRAMVHAQSRSDHPDEDMVRFLRGHLSFMRPAHPDQAERLLQQLNT

SEQ ID NO: 6713 - protein, 361 aa, unidentified
  source 1..361: note = Related to MWEK01000004.1; note = Planctomycetes bacterium ADurb.Bin069
MDFVAYLIMDLIRLLTNRKEKPYDRKRVDKTLGPWSAFKGPSAECIPGTRLPRKIVWHRPRLLFGRKREEIDFAIGVMTHWLRLEPKLMRFIAYFLRDTEKYKVREIPRPGREPRRIEEPMALLKFVQRRILRRILEQTDLPDCVHGFVRGRSIGTAAAPHAHKEVVVCCDIENFFPTITVRRVWGVFRSLIVNPRVSNLLAALTTYQGRLPQGAPTSPMIANLVLRRLDRRLAALTRSRGIEYTRYADDMIFSGGPDTPKILKAVRAFVAEEGFTLNEKKTRILRRGRRQEVCGLVVNERVGIPRLWRRRLRAEVHRLATGRDGAKAAPARLRGELAFLQCFHPEEAGKHARKLLALLKQ

SEQ ID NO: 6714 - protein, 358 aa, unidentified
  source 1..358: note = Related to JAAYDY010000039.1; note = Phycisphaerae bacterium
MGLLDFLRNLLSPQRGSDESPALNHSDTRPKTADASPSQAEAPATPAVRIRRRRPLLPRQLGSPPTFRRLMAALRLSHVRVRRVMHSKAPYHTFTIAKHNGSLRDIAAPCRSLRHIQRRILRRIVEPLDTHLAVHGFRRGRCSLTGARRHVGKEAVLAMDLQDFFPSITSQRVYGLFRKLGWPPNLASVLTRLSTWQGRLPQGAPTSPALANLIARRMDRRLAGLARHRGIYYTRYADDLTFSGPADAVRSAIPAIRMIVKEEGFRPAEHKTRLMRCGRRQVVTGLVVNRQVSVPRDYRRRVRAALHGIRTGRTTFATPADRATTLRELEGHVQYIRSIRPEHGDPLAADLYAAETGQ

SEQ ID NO: 6715 - protein, 347 aa, unidentified
  source 1..347: note = Related to JAFGPY010000175.1; note = Planctomycetes bacterium
MGFLDFLRDLFSPKSSPGEHPSSARPGERTRHKKGVRSAPLLPESLGARPTFHCLVGTLGLNHVRVRRVMHSPHAYHTFTIAKRGGKLREIAAPCRSLKHIQRRILHRIVEPLDRHAAVHGFRRRRCSLTGARRHVGKEAVLAMDLQDFFPSITSQRVYGLFRKLGWPQNLASALTRLTTWQGRLPQGAPTSPALANLIARRMDRRLAGLGRHRGIYYTRYADDLAFSGPAEVVRSAIPSIRTIIQEEGFRLAEHKTRLMRRGRRQVVTGLVVNEQVSVPRDYRRRVRAALHNLRTGRTTFAAVAERAAALRELEGHVQYIRSIRSEHAKHLEADLYAAADGIQRCL

SEQ ID NO: 6716 - protein, 370 aa, unidentified
  source 1..370: note = Related to JAADGH010000108.1; note = Planctomycetes bacterium
MGFLDWFLRKIIKPKVLDGWARARRRGQINALRKKRERARAICMLPQDGRLPTRKARNPMTGRTIEVEYDDGLKGIAKALGLKPSRVAKLSFSPKKLYTTFTRPKPAGGERTIHAPVRSLKYVQRRILDRILNWVDLPDCVHGFRRYRSLATGAAEHVGKEMVLRMDIEDFFPSIHFGRVLGLFRSLQFSTKHAFILARLTTADGVLPQGAPTSPAIANAVCRRLDRRLMGAAQKQGISYTRYADDMTFSGPAEEVKRLVPFVRKVVGEEGFTVADKKVRLMRRGRRQIVTGVVVNDKLSVPRYYRRWLRATIHHLRTRGATPDGLTAAQLRSSLLSHAHYIKMVNADQGNRLLADLREVLGQQGGKGNR

SEQ ID NO: 6717 - protein, 302 aa, unidentified
  source 1..302: note = Related to JAFGGJ010000038.1; note = Planctomycetes bacterium
MGILDWLARLLRGGGESPFAAGRKGPRLGLKLNRLWHLARNVEGHYSEFDLEMPGGRKRRIEAPDGKLRWVQRKILRNVLDRQEQGPCCHGFRKKHSIATNAAGHVGKEMVLAVDIEDFFPSITFPRVYGLFKSMGFDRGRSALLAKLTTRNGTLPQGAPTSPAIANLLCRRLDRRLGGLAAKARMTYTRYADDLTFSGSADAAKYLRLIVEIVKEEGFALNPAKTRMMRRNRRQEVTGLVVNDKVGLPREWKRNLRAALHHLRTGRPASDGPEKIHGKLAFLKMVHPEQYVRELAALKALS

SEQ ID NO: 6718 - protein, 494 aa, unidentified
  source 1..494: note = Related to NZ_JAKZKW010000001.1; note = Fundidesulfovibrio sp.
MSDLEQLLVGLDAESASGRMHAIQRSTAYDKPTRSAFLLKALEHWDRKVREKSAKILLKIGGDLELAAVCSAVDSRKVPLLRLIPWLARRNHALTTRTIYNLTQHSHKVISEAASKYLIKMDTTEALFYRWSKQSRIPKKLAAQIEACACERVASVLSDIPVSVIHTLRGKFLRYPLLKKYYHDKYSDSRPQSSKETVSPKAPKVQSEYVQSWNKLGIDWRIAGWIVRNWSDLDDVGYFEFKIPKKNGTERIISAPVTPLKIAQRVVLDKILSTVPQHDACHGFRKNFSIITNATKHTGKDVVIRIDLKDFFPSIKPARIAGIFRSLGFSDFEIRFLTRVTTRGGGLPQGAPSSPCLANIVARRLDSRLNGLAASVGGTYTRYADDLIISGHKNVVSILPAVKSIIQEEDFGIASEKLRIARKGAQQKVTGLIVNQCVNAPRELRRKLRAVFHKQSKGEVPYWGNKPMSESQMRGYQAFLSSIEKSKTDQHEKL

SEQ ID NO: 6719 - protein, 451 aa, unidentified
  source 1..451: note = Related to JAGOOG010000002.1; note = Deltaproteobacteria bacterium
MTKKANNNASDMFGAVAEKRYSAVKRVSKLPVEEALPILKKGLKHWDRKLRNMCSREIVRKLGGKAASIVLPLYVKGLLSRSSSYEQLLRKEDATLTGYVLRRSRRKDSLGQVCKGLYSQTKHYKRIQEKQTKRDQELLADNDRAGQTWVAQKISPWDLLKERFSILKELKENTAQFVLGHWYRNNTFDDLYDTFEIPKRSGGKRKIEAPKPALKLAQKAILEKLTSDVRLHDSCHGFRRAHSIVSNAKPHVGKAVVVNLDIKDFFPTISAARVFGIYRSFGYKNEEASFLTALSSFNGRLPQGAPTSPMLANIACIRLDYRLSGLSNTIGADYSRYADDLTISGPESITKYIALIRKIVEEEGFALALPKLRIHRRGARQEVTGLTVNDRVSVPRVIRRRIRAALHHVNQGKEATWKGEPMSLESLTGHINFIKSVHPDLGQALFNSLPQ

SEQ ID NO: 6720 - protein, 340 aa, unidentified
  source 1..340: note = Related to JAGFXW010000209.1; note = Firmicutes bacterium
MDKRSSAADRKGNDFVEPNGDLVKSAGNGWLFDLSRELDISCRDLGWLHGTWGTWNQWYKTYTVPKKTEGFRVICAPQGLLLAVQRKINDVILKEVVLSSCCHGFVKERSIITNAAAHVQKEVLLSLDIKDFFSTITANRVFGVFKSLGRSPEEARFLTRLCTYNGCLPQGAPSSPAIANRACNHMDKRLAKLAEYHRAAYSRYADDLTFSGDKPVLRLLPLIKAIVAEEGFAIAEHKTRVAKQNQRQVVTGLTVNSEIKVRRPEKRRIRAILHHAACRRSTTSHQVPIGVQEIRGYYSFLKNVEPEYAAKLYLDLHEKYLMLDLAPETNPFWLSQRSSR

SEQ ID NO: 6721 - protein, 324 aa, unidentified
  source 1..324: note = Related to JACOTF010000024.1; note = Planctomycetes bacterium
MIEILEYILAPIGGLIVLVVIAISIFRFTRATNGHFWHWLRAMLGWGKDIREVAARLGMTEQELRNVSPSFREVFVPKKRGGQRRLLVPDADLKSLQRRILHRLLKKLRAHPAAHGFERGRSIVTNALPHKGQRVVIKIDLVDFFTGTKANRIEQYFRRIGWNADVAALLTRLCTAEGSLPQGAPTSPRLSNLVNFNMDSRIARVVQQRNGQYTRYADDITISFPEDYPSRIRGVIQRVKRIVKQFGYRIHVRKKLQILRSHQQQRVTGLVVNRKVQLPRKVRRWLRAVQHRLKTRGSSTLTAKQLAGWRGMQIMIEQQRQRTG

SEQ ID NO: 6722 - protein, 324 aa, unidentified
  source 1..324: note = Related to VGZI01000118.1; note = Planctomycetes bacterium
MIELFEYIAASAGALVILLTVAVTALRFNYAINGRYWHWLRALFGWGKDIRELAGRLGMTEQELRNTTPSFREVFIPKKRGGQRRLLVPDAGLKTLQRRILHRVLKKLRAHPAAHGFERGRSIVTNALPHRGQRVVIKIDVVNYFTSTTAKRIEDYFRRIGWNADVAALLTRICTAEGGLPQGAPTSPRLSNLVNYNMDSRIARAVQSRKGQYTRYADDITISFPENHPKQVRGIIQLVKRLLRQCGYRIHVRKKLRILRSHQQQRVTGLVVNRKVQLPRKIRRWLRAVEHRMKTKGSASITPVQLAGWRGVQAMIDRQREGSG

SEQ ID NO: 6723 - protein, 330 aa, unidentified
  source 1..330: note = Related to JACPPF010000124.1; note = Planctomycetes bacterium
MNTLFADANVVLLWGLALGGGFVVLVASLWVSYRVVRATNARPLEWLRVRLGRGKDLTTLAARLGVSVQELQGVELFYRESLIPKKRGGQRRLLIPDQPLKAMQRRVLRRLLRRLRAHPAAHGFEQGKSIVTNALPHVGQCVVIKMDLVDFFPSTTAQRLDAYFRRVGWNAQAAALLVRLVTHAGVLPQGAPTSPRLSNLVNFNLDARIARFVAKRKGAYTRYADDITISFPKDHPRKVRGTIQKVKRIVRDFGYRIHVRGKLQILRKHQQQRVTGLVVNARAQLPRKLRHWLRAVEHRLRTRGEASLSPQQLAGWRALQGMIAKQAKTD

SEQ ID NO: 6724 - protein, 361 aa, unidentified
  source 1..361: note = Related to PSRB01000276.1; note = Acidobacteria bacterium
MRPVRPVRPREPKAPWAFAPAKQGVAGPEYSGPVFLVNSLFTFPSRLFPRRRRLASLVKKWLRSVWRLFRVKKRTADELARRLDVSLAELLDWTPSYRETIISKKRGGTRRLLIPDAKLKALQRRILHKVLRRLRVHPAAKGFERGQSIVDNAGPHVGRSVVIKMDIVDFFPSCKAEEVTAYFRKIGWDEAAGVILTKLCTHEGRLPQGAPTSPRLSNLINWPLDARIARWVAYRKGAYTRYADDITISFPKDYPRKVRGVIQQVRRAARKLGFQIHEQGKLRILRHHQQQRVTGLVVNEKLNLPRRLRRLLRAVVHHLQTGKPASMTAEQLAGWQALANMVAKGAAKYPAPASPKSPGKP

SEQ ID NO: 6725 - protein, 351 aa, unidentified
  source 1..351: note = Related to NZ_JACHGY010000001.1; note = Algisphaera agarilytica
MMQRHVFAHAEQGGPIPGNPAKGFLWLFAIIFAVLTVVVICVAIVLWLQRLALLPKPHETHRTDRRRTRLGRGKDLAELARRLDTSAQKLQTANRRYHRFTTAKKRGGTRVLHAPNPELKHLQRLIHRRLLRKLQVHWCATGFEPGVSIAHNAAFHAGQAVVIKLDLKDFFPNTTAERVEHYFRRIGWDAESAALLTELCTHEGGLPQGAPTSPRLSNLINHVMDAQILRYVEAHHGTYTRYADDITVSYPEDWPKYVRGTIQHVRRTAKRHGYTVHTRGKLRVVRRHQQQRVTGLVVNDRVNLPREKRRWLRAVEHRLKTQGRASLTAQELEGWKALSQMVDRHANPEAG

SEQ ID NO: 6726 - protein, 348 aa, unidentified
  source 1..348: note = Related to JAHQVV010000229.1; note = Phycisphaeraceae bacterium
MGTQSIELLAGIDPLAKVCFVSCGVPLITVVVILLVGSKRGWFKPYKETHKVERKRAAKGLGKDIEALGHRLQTPPDELRNFEPKYRLASISKKRGGRRRLDIPDHKTKTLQRTILRKLLRNLKTHSCAMGFDPGISIAHNAAVHTGQAVVIKLDIKDFFPATTKERVEQYFRRVGWDGECAALLTGLVTHNDGLPQGAPTSPRLSNLVNYVLDCQIQRYVLKHKGTYTRYADDITVSYPEDWPKYVRGTVQKVRRVCRRHGYTVHTRKKLRIVRRHQQQRVTGLVVNEKVQLPREKRRWLRAVEHRLSTTGEASLTEEQLAGWEALQQMIDQQARPGRGSMNEGDPE

SEQ ID NO: 6727 - protein, 338 aa, unidentified
  source 1..338: note = Related to PAIY01000242.1; note = Phycisphaeraceae bacterium
MGNFGRKRNADIFTWLVLCLLAIILIFAFPIFILIELINCFFPDRLAKKRYRHVFRHICGMGLKSDELARRLGMTVEQIQATPQDYTTRKIPKRSGDQRELNIPNEQLKSLQRCILKGLLSKLKTHPAAMGFEEGYSIAHNAMLHTQQAVVIKMDIKDFFPSITAATIEFYFREIGWNKRAAFLLSELCTHAYQLPQGAPTSPKLSNLVNYMMDYQIEQAVKHYHGTYTRYADDITISFPKDYPKHVRGIMQKVRCITKFHGYELNHKKTHILRQHQQQRVTGLVVNDKVNLPREKRRWLRAVEHRLQTQGKASLTQEQLDGYKALQQMIASQTQPKA

SEQ ID NO: 6728 - protein, 371 aa, unidentified
  source 1..371: note = Related to WGMU01000064.1; note = unidentified bacterium
MFRRSGRFVTASDSRVRVRQFRAEIPDTKQDVTGTGLPVPVFPSGGVMLAFNLLSQLVSFALVVACLFGVGVCLHIRYRRVTNSNLRHWLRARRGQGLGIDELARRLDVSEDELRSVDVGYREAFISKRSGGSRRLLIPNSELKRLQRTILRRLLGRLRTHDAVTGFERGLSIVENAAPHVGQAVVIKLDVTDFFPSTRADRIDAYFRRVGWDAECAALLTRVTTHEDGLPQGAPTSPRLSSLVNFGLDRAIERFVCDRRRGVYTRYADDLTISFPKDYPRRIRVVVQFIARRLRCDGYALNRSKIRILRQHQQQRVTGLVVNDCVNVPRHIRRKLRAVEHRLNTGRSATMTREQLAGWKALLQMVEQRRP

SEQ ID NO: 6729 - protein, 336 aa, unidentified
  source 1..336: note = Related to JABMPE010000648.1; note = Rhodopirellula sp.
MIDAVFNGIEIAAKACLSITGVIFLAVGVLIAYFLWNLSTLKRARPANLKHWNRVRRGDGFGVEELARRLGVTSDELAAVSPNYTERFIEKRSGGTRRLLVPSPELKELQQKILRRLLARLSVHPAATGFEPGTSIVHNAAQHVDQAVVVCMDVSDFFPQTSEARVTAYFQRIGWNRETAELLTRLTTWEGGLPQGAPTSPRLSNLVNHVLDARIERFVECRKGNYTRYADDISVSFPKDYPKRVRGTVQVVGRHLKAFGYQLNAKKTRILRQHQQQKVTGLVVNDRVNVPRNIRRKLRAVEHRLNTGQRATMTREQFNGWKALLAMVEQQRDGSQ

SEQ ID NO: 6730 - protein, 372 aa, unidentified
  source 1..372: note = Related to JAIOPE010000166.1; note = Planctomycetes bacterium
MAELKKTEPKKTSKWSGCLAIALGLAVVGWCLYSIVRGVVGLFHMGPVTFGVVAGVIGLVIAWFVARSWWRKGGRNAVRRAFWIAPGVAELARRLDVTPERLRTFSPVYREVRIPKRSGGVRVLHVPDANTKSLQRKILHRLLARLKSHPAAYGFEAGRSIAHHAAQHTKRAIVLHFDVVDFFPSTRAERIERMFLRLGWNREAALVLTKLTTHKGGLPQGAPTSPRLSNLVNAGLDRALTKRVGELRGRYSRYADDISVSFPKDRRGSVERTKARVMHELCLRGYEMHVRKKLSVRRAHQRQVVTGLVVNEKVALPRHLRRKLRAARHHLATGRPATWTDEQLRGWAAFEKMVRDQGAPPPQDGDGTTPKA

SEQ ID NO: 6731 - protein, 345 aa, unidentified
  source 1..345: note = Related to JACDGX010000179.1; note = Planctomycetes bacterium
MTVGCWFALLVMLGSVVGAILVTPWSLAATPAAVALLLTFHGLRHRYGAYPWRRLRAHLGYGHGIDELARRLDRPAAELRSAAPVYRAVDIPKRRGGTRRLHVPDAATKALQRGILHRLLKRLRAHGAAHAYERGRSIATNAAQHVGRAVVLKMDVVDFFASTSAARVERYFRRIGWNREAAALLTRLTTHEGGLPQGAPTSPRLANLVNRHFDVLIDRTTRRFRGTYTRYADDLTISFPEDWPRKMRGMVQRVRKVAKAFGYRVHGKPKLGIFRAHQRQLVTGLVVNQRVALPRETRRWLRAVKHRARHGKATITSAQIAGWDAYAAMIGGATSPAPGPADRGG

SEQ ID NO: 6732 - protein, 348 aa, unidentified
  source 1..348: note = Related to JAGQPJ010000270.1; note = Planctomycetales bacterium
MRDTRGPVWKLLTAIGMVLALLVLIPLFVAALILALPFVVILSGYSRYRLATNGRPIRWLKLKLGWGLGVRELARRLEMPADELRRFQPVYRVARIPKRSGGQRTLFIPDAATRALQRRLLRRVLRRLKAHPAACGFEAGRSIVDNARPHVGQAVVIRLDVVDFFPSTTAARVERYFRAIGWNRAAAELLVRLTTHEGGLPQGAPTSPRLSNLVNYFLDVKLDRHAQRRRGAYTRYADDITISFPRDHGRRARGTVQYVRRLLKAHGYQLHRDKKLSIRRRHQRQQVTGLVVNETVQLPRATRRRLRAVLHHHETGRPATMTLEQLQGWAALQAMILRQRDGNPDEAS

SEQ ID NO: 6733 - protein, 351 aa, unidentified
  source 1..351: note = Related to NZ_CP036267.1; note = Thalassoglobus polymorphus
MPAKATFQMATGCCLSAATAVVTFFWLLNSDSQISFAIMSVLLVAICATMLFGWWTAFLQLTSKHPWHWIRTKFGWGFEIEELANRLGYSVNELTEHQPQYVSAFIPKRSGGTRELRIPDKKTAEIQKRILQRLLSKLRSHPSACGFETGKSIVHNALPHVGKAVVIKLDVIDFFSSTTASRVEAYFCRIGWNRKSAKLLTKLTCDQDALPQGAATSPRLSNLVNYLLDEQLVRCATKYRGEYSRYADDITYSFRKDSPKRMRGIIQRTRHLLNRSGYQLNTEKQRILRQHQRQTVTGLNVNTKVSLSRKLRRELRAARHRLENGKESTWTAEQLQGWAALEHMIQEQTKS

SEQ ID NO: 6734 - protein, 351 aa, unidentified
  source 1..351: note = Related to NZ_SIHI01000018.1; note = Thalassoglobus neptunius
MSARSTFQMTSGCGCTLMVLAGGILLANQASGAVVIFVLSVISVFVFAGWLTALFQMTSGNPQHAIRSWMGWGLTVSELARRLDLSEQQLINHFPKYIDRPIPKRSGGTRILRIPDATTADIQKRILQRLLPLLTSHRCATGFEAGLSIVDNALPHVGQAVVIKLDLVDFFPNTHRDRLELYFRRIGWGKEAASILVRLTCDEEGLPQGACTSPRLSNLVNFLMDEQLDRLAKSRKGVYTRYADDITFSFPKDYPQRVRGIILKTRWIVRRFGYQLNSKKQLILRQHQRQSVTGLNVNTKACLPRELRRRLRAARHRMKTTGSATWTEEQLQGWASLESMVESQTASESER

SEQ ID NO: 6735 - protein, 331 aa, unidentified
  source 1..331: note = Related to CP050848.1; note = Planctomycetales bacterium zrk34
MISQHFIAVSGSDIFQWAWKLMLLVFVIYIIRVLLDLRALKHAGNRKTARRVARGQGLDMAELARRLDIAERDLELFKPVYRSATIPKRRGGTRKLRIPDPPTRAMQRRILHRLLKRLQAHPAACGFEPGKSIVDNALPHVCQRVVIKLDVVDFFTNTTAPRVQRYFQWVGWNRPAAEWLAMATTDEGGLPQGAPTSPRLSNLVNFYMDVQLSKFAARRKGEYTRYADDITFSFPKDYPRRVRGVIQFARRILRSKGYELNGRKLRALRRHQQQRVTGLVVNDTANLPRRTRRWLRAVEHRRRTGGQPTLSDDQLAGWQALRHMINTQRTG

SEQ ID NO: 6736 - protein, 344 aa, unidentified
  source 1..344: note = Related to NZ_CP017641.1; note = Fuerstiella marisgermanici
MVSVPFLIGLSVAAVVAVLIGLRLGRKRDSSFDSDWPNDSPGPLAQERTAQPSAQTKKSKKQPGYAARFDLAELARRLDVPEQQLLAAEPTYRIAKIAKPSGGTRRLEIPDDDTKALQRCILRRLLATLNAHPLACGFEEDTSIVDAALPHQNRAAVIRLDIRRFFESTSADRVQNWFIAIGWQPGAAEVLTRLTTNDGHLPQGAPTSPRLSNLINSPLDEGLLRLAKQYGGAYTRYADDITLSFNFDRGRKLRGIIQAARRIVKSYGYTLHGGKKRKVLRRHQRQQVLGLVVNEQVALPRSKRRWLRAVRHRIENGGEASLTAAQLKGWESFCSMVQEQRDEG

SEQ ID NO: 6737 - protein, 329 aa, unidentified
  source 1..329: note = Related to DUCQ01000262.1; note = Fuerstiella sp.
MFSVPVLIGLAISAAAVVLFGLVAATRRRAAHGHDRGTPHPLPPERGRSSPLPQYDLSELSRRLGVSRAVLERFETGYRIAEIPKPRGGVRRLEIPNEETKKLQRTILRRLLTALDVHPFACGFEPGTSIVDAATPHEGRLVVVKMDIRRFFESTTAARILEYFQRIGWDAASAEVLQRLTTYNGHLPQGAPTSPKLSNLVNAPLDEALLRLARRHNGAYSRYADDITMSFDIRRGRVVRGLTQVVRRILKSYGYTMHGGAKLKILRQNQRQQVLGLVVNEKTALPRKTRRWLRAVRHHARVGRPVSLSKQQLDGWESFLKMVETQRDE

SEQ ID NO: 6738 - protein, 342 aa, unidentified
  source 1..342: note = Related to JAGQQL010000145.1; note = Planctomycetaceae bacterium
MLTIPVLIGIAVVGGLAILIGMIVGTRQQHRSDDDASAPPAGNRPATESPSGNVPQRDTSTASLTLTDLSARIGISVDDLQNHQPVYREVRISKPHGGVRCLEIPDDRTKELQRTLLHRLFAGIRAHNCACGFEAGTSIVNAAVPHVRKRVIVKLDVRRFFESTTAKRVSAWFRSIGWDDEATAVLTQLTTHNGHLPQGAPTSPRLSNLVNAPLDEGLLKLATHHGGDYTRYADDITMSFHIRSGRRIRGIIQATRRILRSYGYKLHGGRKQQILRRHQRQQVLGLVVNDQAALPRHTRRRLRAIRHRTSQGIAPTLTPAQLEGWEAFRTMVETQRQPSSDH

SEQ ID NO: 6739 - protein, 340 aa, unidentified
  source 1..340: note = Related to JAGQPY010000452.1; note = Planctomycetaceae bacterium
MFTVPVLIGIAVAGLIAILIGIILGSRKPSPEQTAERQDETVSSTDSASKSSTSPAAPPLKAVSGGLEIRDLEERTGLSADELRSLKPEYRVVEIAKHGGGKRRLEIPDERTKEIQATVLRRLFSAIRSHSAACGFERATSIVNAATPHVGRRVVIKLDIRRFFQSTTDDRVLAWFQSVGWSQEAAQLLTHLTTWDGHLPQGAPTSPRLSNLINAPLDEALLRLAEKHKGAYTRYADDITFSFNFRSGRRARGIIQAARRILRSFGYAMHGGRKLKVLRKNQRQSVLGLVVNDRIALPRHKRRWLRAVRHRRDQTGQCSLSDQQLQGWESLQQMIENQRD

SEQ ID NO: 6740 - protein, 313 aa, unidentified
  source 1..313: note = Related to JAGQQE010000041.1; note = Planctomycetaceae bacterium
MAWIIAAAVAMAIAVAFVLLKSTQDSKSTPPRRKPEPFTLADLLERLQLTEEDARQLESPQWRKAFIPKSSGGTRLLEIPDDVTLALQRRILHRLLSGLKSHPAAIGFENGKSIVDAARPHSGKQFVIRIDIERFFESTPVTRVEEYFRFIGWTDDAIRLLTTITTCEGHLPQGAATSPRLSNLVNIRMDHALQNVAERFHGHYTRYADDITFSFHFRSGRKARGIVQVIRRILRQSGYRMNSEKTRILRAHQQQQVMGLVVNEKVAIPRSRRRQLRAARHRVRQGKPATFSPEQLQGWTAFEKMVEDQASID

SEQ ID NO: 6741 - protein, 306 aa, unidentified
  source 1..306: note = Related to JAEUIH010000049.1; note = Planctomyces sp.
MNSLMIVVAFIVSLVVVATGLLVRRIIRNLRNRFTLADLVNRLGMTAEEWSQLKPPTYRTAMIPKRNGGQRMLEIPDPDTMVLQRRILRRVLKRLRSHRAAIGFESGKSIVHAASPHIGQAVVVRVDIENFFQTTTERRVGEWFRAIGWNQEATEFLLMILTHNGHLPQGAPTSPRLSNLVNARLDAGLNRIAQSYGGAYTRYADDITFSFPVDQPRQIRALLQMVGRYLKQAGYQMKNSKTRILRAHARQSVLGLTVNQKVALPRSMRRRLRAIRHQQSQGKPTTMTAAELHGWTAFEQMIASQK

SEQ ID NO: 6742 - protein, 302 aa, unidentified
  source 1..302: note = Related to JAGQQI010000087.1; note = Planctomycetaceae bacterium
MAYVIAGIVVVIAAAGLAAAMRFRKPRRSYTLGNLIDFLELTPDDARVLKQPSYSSHRIPKRSGGYRLLEVPDEQTKMLQRRLLRRVLSKLSAHPAAVGFETAKSIVDAARPHTSKGVVIRIDITDFFQSTTTERVAAWFRGIGWDADSVDFLTKFVCHDGHLPQGAPTSPRLSNLINAGMDTVLQRIATERGGTYTRYADDITISFRRLSGRRARGVVQHVRRTLTAFGYRVNTRKTRILRNHQQQTVTGLVVNRTISIPRKQRRKLRAIRHRIANGQPATMTTDQLAGWDAFLAMVEQQR

SEQ ID NO: 6743 - protein, 396 aa, unidentified
  source 1..396: note = Related to WTPX01000039.1; note = Alienimonas chondri
MNDGAAYGRMDRHEVEPAPIRPYSAWRDLIALLLTGCGCFSILFVLGLTAAMFGPPLAQRIAPWLTVPILFAIGINLAQWYFFKRLKRVDRYSLFRAKHRIRAARGKGMDIEELARRCGLTTHLLQNHEPKYREAEIPKRSGGVRRLHIPDPATMDLQRTLLRKVLAKLHADPAACGFEKGKGIVDHAAPHVGRAVVITCDLKDFFPSVTAKSVDYYFRRIGWNAEAAALLTRLTTHAGEGGEPGLPQGAPTSPRLSNLLMHGVDYALAKSAARRGFRYTRYADDLAFSSAEDDSQAVRELLQQIDRVVKRAGFRLNPRKTRILRQHQRQMICGLVVNDRLNLPRKVRRELRAALHRRRTGMHATYTDEQLAGWAGVLTMVARGPRAEPGVPRGVG

SEQ ID NO: 6744 - protein, 384 aa, unidentified
  source 1..384: note = Related to CP036265.1; note = Alienimonas californiensis
MVSSDTPPPDSNASGLGCGGIVWSALAAVLLLTGLTAVAVLAVRAFGALVAALGASALIAIGLNFAQWYFLKRLKRVDRYSLFRLGHRWRAWRGKGFDIEELARRCGLTAHRLQNHQPSYHTATIPKPSGGERTLTIPDPATMDLQRTLLRRVLARLHADPAACGFERGKGIVDHAAPHVGRAVVATCDLKDFFPSVTAKSIDYYFRRVGWNAEAAALLTRLTTSEGGLPQGAPTSPRLSNLLMHGVDYALAKAAGRRGFRYTRYADDLAFSSAEDDGQAVRDLLRRVEAVVRRGGFELNSKKTRVLRRHQRQMICGLVVNDRLNLPRKIRRELRAALHRRRVGREATYTAQQLAGWAGVLTMVARGPRAFHGETPPDSAPSSA

SEQ ID NO: 6745 - protein, 574 aa, unidentified
  source 1..574: note = Related to PAPJ01000007.1; note = Planctomycetaceae bacterium
MNDGIILALDGGEALCFISLVIFMIVFFVAVIQFFNKLKILVPDGQRSISKAEYLERKRKEAITKYGKPSDKSRIYRLVPELEKLDPQWDPSYEIVRIPKRSGGVRELQIPDELTKKIQYALYHKLFSYYIVHPAACGFVKGKSIVDNARQHVGQEVIVKLDIREFFPNTKKMRINRYFVTTGWTPDAADLLTKLVCYEQGLPQGAPTSPVLSNIVNKSMDDRLFSLSQSFNANYTRYADDITFSMEKYNRELVHALLQRVGVILRIYGYNLNRKKKRIIRRHRRQEVTGLVVNSKVNLSRKRRRWLRSIQHRIKTGQKLTVTMAEYRGWISLLNMVDPESNLIHLHKQLVKTDAPVLTPMSDPNDNSPTAELQGSDVDRSSRDENKTRVSSEMLDDNASELRTVDEDNPTRPSGSQDETHTADTSSTRAPLNNDQHEEQSELPELQSSPDNSGVFHEDRLEDKVQALKVAKPYSTEAKSLISEFTKSSYTIQLQLESSKRTFSFRLPEGYQKGRTVTGSLSDGTEVELYFHDSLAETVENAEFPLKSEVTIEVIQWNATFKRVEAIVTGGLFH

SEQ ID NO: 6746 - protein, 365 aa, unidentified
  source 1..365: note = Related to JABHSU010000643.1; note = Planctomycetaceae bacterium
MQNSNMLVADGAGAAICFGILLLVLAFIACVRFLNGHAKNVIQDKVVNLDGFKRLSRVQKALLAQRKREAAPEAYGSVSGTSRIYKLVPELEGLGSEWTPSYQVARIPKRSGGFRELQIPDSQTKKIQLALYHKLFANYETHPSVCGFVKGRSIVDNARPHVGHEVVIKLDIKEFFPNTYRIRVNRYFSETGWDPAGADLLTKLVCYGMGLPQGAPTSPVISNIVNKAMDIRLFALAEKFNANYTRYADDITFSLKSYDRNVVHRLLQHTGVILRDYKYTLNKKKKRIIRYHRRQQVTGLVVNDKVSLPRRRRRWVRAIQHRLKTGKDTTVSFSEYQGWISLIKMVDPASPLLIVHQEIIQNRMA

SEQ ID NO: 6747 - protein, 577 aa, unidentified
  source 1..577: note = Related to PBCP01000062.1; note = Planctomycetaceae bacterium
MPASGTETNLIIWGLAATIAAGFILLARYRQHVSANDRKRGSNSAGSRKPSRYGRQNSYGKSAQGPLSDVDRLYRLIPGIQELVKSGGTQYTNSRIPKRSGGFRDLDVPNQATKKVQHALYHKLFSKYRIHESACGFVKGRSIVQNALPHLRHEVVVKLDIREFFPNTSRLRINRYFRSTGWTSKAADLLTSIVCYKQGLPQGAPTSPVISNIVNKTMDWRFAALADAFGAQYTRYADDITFSLKSYDRGKVHRLIQNAGMVCRSYGYKLNNKKKRIIRSHRRQEVTGLVVNEKINLPRSRRRWLRAIQHRLRNGLETTVTNSEYEGWMSLLKMVSPESPLLESHQQLILEGILHRKNQSTLTEEKKHADSQLESETAQSGADVVTTVEIRSEGSDDQAGNTSPTSLDTNSEPEADGSIQLAADKREPQGGSKTHDTIANGVESQAESDGVPDSKSDLFYEDRLIDFVQRLKNAKPYSAEAREIENDFAGAKYATVVELESYKRTFSFKLPAGYQKGRTVSGRISDGTAIQLYFADQLSDPIEAAAFPFKGEVSIEVIQWNSTFKRIEALATGGMFD

SEQ ID NO: 6748 - protein, 560 aa, unidentified
  source 1..560: note = Related to NZVD01000016.1; note = Rhodopirellula sp.
MIVRGIDVGLCACLFSIAFTIVIVLGIKRLTSPKRNRMKKTGQSKRRRSPYRPAKANQTSSPKHPKSDVDRVFRLIPEFEKLDPEWRPSYSITHIPKRSGGTRQLQVPCQTTRQIQVALYRKLFARYETHPKACGFISGKSIVDNAKPHVGNDVIVKLDIKEFFPSTSRRRILNYFRTTGWTNKASILLTQLLCYEQGLPQGAPTSPVISNIVNKSMDRRLDSLANEFNASYTRYADDITFSMAVYHRDKVHALLQSTGAILRTYGYKLNNKKKRIIRGHRRQEVTGLVVNDVVNLPRSRRRWLRSVQHRISTGMHTSITPSQYQGWISLLQMVSPDSPIIARHKELLAAGMLKSNGKSGIKETGGHEESVLDETTDRISAANSNSPQTDIADSLNESESTSIVSSDGGSESESLSETPLKEVTQELELESQHAVGGSADELFHETRLTDKIYALKEVRPYSDQAKQLQEEFKGSQHTTSVILESLKRSFSFKLPEGYQKGRTLSGLLPDGTEIELYTTDISAELFDQVDLPIQGDAVIEVIQWNNTFKRVEAILLDGLM

SEQ ID NO: 6749 - protein, 552 aa, unidentified
  source 1..552: note = Related to PBHI01000033.1; note = Planctomycetaceae bacterium
MVDVLVNGFGIIFLIFIFVGICRVAELVKDSASHKKTGSRTSRGRGYRGRRFLKKSTEKSERSKPARIHKLLPGLSKLGEDWQPVYTVTHIPKRSGGTRELHVPXQTTKAIQSALYHKLFVNYKNHPAACGFIRGKSIVDNAMPXVGKEVIVKLDICDFFPSTSQYRVRKYFASTGWDDSAAGLLTRLVTYQGGLPQGAPTSPVVSNIINKTMDRKLAYVAETLKADYTRYADDITFSLTSYDRRDIHRLLQWTGAVLRTYGYKLNNKKKRIIRKHRRQQVTGLVVNDKVSVSRQTRRWLRAIQXRLAKGDAITISKSQYQGWISLVHMVSPGSPIIAKHRMLVESGVLNPEPKAVETSKKKLPENTEKINSEPTTSATMQRTRSEAVDPXEPHLSTSDVVETELXGDADIAAVDTTPNIDNSKXDSEEELFHTDRLVDYLXALKMAKSYSAEAKKLESEIQGXTHTAIVKLESSKRTFSFRLPEGFQKGRTVSGALPDGTEIELYFRXTLAEDXEAADLPXXGEVVIEVVQWNGTFKRLEXIVXGGLFHNX

SEQ ID NO: 6750 - protein, 573 aa, unidentified
  source 1..573: note = Related to DQCQ01000231.1; note = Planctomycetaceae bacterium
MVSSPNTVSGVDRLSEMLGMSVQELENFSPQYKHAVIKKRSGGNRLLQMPNDETKRVQRLLLDKLIGRYKTHASCCGFSKGLSIIDNARPHVGRETVIKLDIQDFFPNTTVDRIHEFFCKTGWTDDAADVLTKLVVFDEGLPQGAPTSPAVSNVVNCFMDLRLDALAKKYGMTYTRYADDLTFSSEIYSRRDVHKILRITGVILKSCGYSLNKKKKRIIRKHRRQSVTGIVVNERLNIARPTRRLLRSVHHRLESGGNSTLSENEFNGWISYLHMVNPKDPLVTSVFGESDSDKSKRRRSPKYVKQNASQSASSNSGQFNPIADISFRPINRGDVSTLSQLGLSPTSNAVTPSEYFSAQLFYNFGKNVNVVARRRNLKRKTVWKHLAHAVEHSLVACHDLISKEDLSQLLSQLKQHSPTAIPSVGDAYRMCMGQIDYGRIRVGLAECRRRKRKLQSDRGNEIITKLNNFSSTREEAVLKTVFGKRLNCSCAVESVSITANADLPPDYTEGRTVHATLPEDPSISLTLFTPAAQNDNVDSLSSAQNVFVRGAIQGMDDASGCIELLTEELQLRT

SEQ ID NO: 6751 - protein, 558 aa, unidentified
  source 1..558: note = Related to DTSG01000044.1; note = Planctomycetaceae bacterium
MSPLFVADNPRRIAGSLLIICHATAIIDSGGGEYMDEFLEALFSLQIVSLITVLLIILFFFRKKNSDATRGSYRTQRSRKTREQRRRKLTVRDLGMKLEMSKSELVRHNVQYETTTIPKRSGGKRILHVPDRASKHLQRTLLKQLIERLPIHDDVHGFRKGRSIVDNAAEHIGQEVIVKLDIVDFFPATNSERVESAFKGAGFDKSSAKLLTRLTCYEGGLPQGAPTSPALSNYVNKNMDVKLADAALRRSARYTRYADDITFSFPEYSREKIHELLISTGKILQYYGYRLNDRKKRIIRQHRQQLVTGLVVNERVNLPRKTRRWLRAVKHRMETGGEATLTAAEFRGWLSLLKMVDPAAPLLNFLDGLNSREEIIDKPLPKNGDLKKLVGRQSQNVKTVEIPVTTPGSDIADDALTDNAQQETLRDSEVVNARNANTGVENVSLVAMVEALNQTDNYTESRKTAELQLAGKEYLLEISATSVGRTFSFSLPVAYQNGQTLRATLRNEGLALELYCDEQVGSELASIQFPKNLKVLVRVVQWNAIFKRIEAVVLQASR

SEQ ID NO: 6752 - protein, 321 aa, unidentified
  source 1..321: note = Related to JABHUV010000311.1; note = Planctomycetaceae bacterium
MSRLQRANADRKRERPKLTLADLVARLGMSKADLVEHEVQYRATTIPKRSGGKRVLHVPDRLTKTLQRKLLYQIIGRLPLHDNVHGFRKGHSIVDNAANHTGQEVILKLDIVDFFPSTSSKRIAGAFEGAGFDKSTAVLLTGFTCWEGGLPQGAPTSPALSNYVNKNMDKKLAAAASGRGARYTRYADDITFSFQRYSRDNIHQLLISTGKILQYYGYRLNNKKKRIIRRHRQQLVTGLVVNDRVNLPRKTRRWLRSVKHRMETGGQATLSSAEFHGWLALLRMVDPDSALLEFVDVQNANKKNMARSRMKDSNSQSVVAG

SEQ ID NO: 6753 - protein, 517 aa, unidentified
  source 1..517: note = Related to JABHTD010000124.1; note = Planctomycetaceae bacterium
MLDSIGEVLFSPLVVTAIIVLVLILRCFKGRGGRRELSIGDLADRLKMSKTNLVQHDAQYRTATIPKRSGGKRILHVPDDATKQLQRKLLQQLIERLAIHDCVHGFRKGHSIVDNAAEHTGQAVIVKLDIIDFFPSTNSDRVKNAFRGAGFNKSAATLLTGLTCHEGGLPQGAPSSPALSNYVNKNMDEKLAEAANKRGAVYTRYADDITFSFVTYSRHNIHNLLIATGKILRHYGYRLNNKKKRIIRQHRQQLVTGLVVNERVNLPRKTRRWLRAVKHRMETGGEATLTNSEFRGWLSLLKMVDGDSPLLTFLDSPKPKAEESVTRTRHIGDNISDSDGHSSLSDSDSSVVHQGKSATEGESLPTNTPPETPPVVASGTILPTDGRRQFLRLARLGADGNLALLQLVEALNQTEKYSTNRNEAEKDLVGSEYLIDISVSSIGRTFSFSLPEDYQDGQTLKGTLRDGGLSLELYCDKLVGSELAGLSFPTRLKVLIRVVQWNSIFKRLEAIVLHTTL

SEQ ID NO: 6754 - protein, 328 aa, unidentified
  source 1..328: note = Related to RFKR01000219.1; note = Deltaproteobacteria bacterium
MVRRPGGLELAENQLEVTEPARGVRHLQGGRGTGRCSFLSTSTRFAVGLFDWFRKRKDEGLDTGELARRLGVSESDLDCSPRYNVRTIPKRNGGRRRIAEPSRELKQLQRVILRRLLSRLKAHPAAHGFEKGRSAVTHSANHCGKKLIVVLDIEDFFRNTTERRVRDYFRSIGWNEKASELLTRLTTFEGGLPQGAPTSPRLSNLVNYTMDLRLSRFCDMRSITYSRYADDLCFSTDDESWTGQLLRTVPEILSDFGYRVNRAKTRFLRAHQRQLVTGLVVNEKVNLPRSTRRWLRAVEHRMLLGGTPTISEQQFRGWLAYRQMVERR

SEQ ID NO: 6755 - protein, 307 aa, unidentified
  source 1..307: note = Related to JAGOCE010000260.1; note = Candidatus Ozemobacteraceae bacterium
MSILDWVSGLLGTGSSGTGDSRRNEGNDLRELARRLGVSVEELTSIRPAYREIRVKKRSGGTRLLLEPSPELKKIQRCILHKLLKRLSSHESVHGFESGRSIVTNAQQHANKDLVICVDLKDFFQKTQVRRIREYFTFIGWNTDAADMLMHLTAWNGGLPQGAPTSPRLANLVNHALDARLEGLAKHHGGTYTRYADDLTFSFPTRKELPKKETGTFLEMVSRIVKENGYSMHGKEKLRVMTYARCQSVTGLVVNQKVDLPRRTRKWLRAVEHHRVTGKPATLSDEQLNGWRSLRQMIIDQRRERSR

SEQ ID NO: 6756 - protein, 326 aa, unidentified
  source 1..326: note = Related to JAFGPC010000052.1; note = Sedimentisphaerales bacterium
MGFWDWLRQLLQGPGPQERKPDLTPPVDGKKLEELAKRLDFSVDQLHAVQVSYRQFSIPKRSGNGFRTISVPNPELKEMQRRILRRLLGRLQTHPAAMGFEPGQSIATNAAYHVGADVVVRMDIRDFFGATVTNRVRAYFYGIDWGKEATDVLVRLCTYERGLPQGAPTSPRLSNLVNFELDARLDGYAQKIGARYTRYADDITFSFNFAEIKQTLTGQNSKILEHIKDKSKSSYVIHQTIRMTKRILFEYGYQIHTKRKLNIRRKHQCQKVTGLVVNHKVALPRKTRRRLRAVEHHLANDRPATLTHEQLAGWKALQYMIETQTK

SEQ ID NO: 6757 - protein, 326 aa, unidentified
  source 1..326: note = Related to JACZKQ010000026.1; note = Phycisphaerae bacterium
MGFFDFLKRLFSSEPERRAPRLVAPEPGLGPDELARRLGLSVQQLESTPCDYHEFAIRKRSGGTRQITAPNRQLKTVQRKILKRLLGRLCCHPCATGFEKRHSIVTNAAVHVGADAVLRMDMIAFFRMTTAERIRGYFYGIGWGKEATDLLIRLCTHNGALPQGAPTSPRLSNLVNIEMDTRLACWARKIGAAYTRYADDVTFSFPDLDASAPGPAFDQNPKTLESIRRDEGDALITSTIRMTKKVLGEYGYELHNKRKLNIRRRHQQQRVCGLVVNEKVALPRRTRRWLRAVRHHHATGRRATLTAQQLAGWDALEHMIALQAEE

SEQ ID NO: 6758 - protein, 326 aa, unidentified
  source 1..326: note = Related to JAFGBA010000254.1; note = Sedimentisphaerales bacterium
MGLFDRIKSMLGGGAKASVNTDRWNLDELARRLDITPDELQNIKPIYNKFTIPKRSGGKRTILAPAPELKQLQRRILRRLLARLRTHPCAMGFEKGRSIVTNARPHVQADVVIRMDIRDFFGKTSAQRVNAFWRFIGWDKPCADILTRLCTHDGALPQGAPTSPRLSNLVNYGLDARLEKWGQPIGAIYTRYADDMVFSFSRVTISNMPAFKNWSRFYDSPTEALDDFLRKAVTSTIRVTKKILKDYGYKIHHHKKLSIRRKHQCQKVTGLVVNEKIALPRQTRRWLRAVEHYHTAGKPSTLTPQQLQGWRALRNMVEQQPATDFT

SEQ ID NO: 6759 - protein, 1908 aa, unidentified
  source 1..1908: note = Related to JACRUV010000373.1; note = Planctomycetes bacterium
MGILDLLFQIGDRPGHLDISELARRLDMSVKALRETPLEYKRFRIAKRSGGKRTIKAPNPNLKAVQRRILRRLLAKLTAHPAATGFERGESIATNAVRHTGCEAVLRLDIIDFFHNTTVQRIRRCFHRIGWNRNAANLLVRLCTLDGGLPQGAPTSPRLSNLVNYPIDIRLNAWAEKNNVNYSRYADDITFSFERETEDDIGTAIRLTRTVTKEYGYRIHRDRKLSIRRKHQRQMVTGLVVNQGVALPRKTRRWLRAVEHRLDTGQTASLSKEQLAGWRALERMIDLQAGRRAKTHRDSPTARPPKKRAPETDDMVRAQLQLAREQLLDLTMRNRLLNFQRTRRTTIRIIDELPGQLWELFVEKQKKLAFLAAEEHELFQAAGDDLPPTDEPGEEEPDEDAIPGDLAKLFHQPRPETALEDGQTELPARYTDLFLQTDLRDEDLQINLLRIDQQSHSALEERGVNLLFLAMGFLEWRPDDDEPKTRRAPLVLVPAGLERASARRRFKLRALDDDPILNPCLVQKLREMGIGLPAEPQSWVDFDTETFLRDVGKAVAEMPGWQVHEDVYLGFFSFTKYLMYLDLDPANWPEGRRLLENRILRTVCGDAESIEQMGSWPDVASEDRERDPAETYQVLNADSSQQKAILAAREGRSIVIEGPPGTGKSQTITNIIAECLAAEKRVLFVSEKMAALEVVKRRLDATGLGDFCLELHSTKANRRNLATELGRVLDKGRRTARDEMGDGERLRLLKRRISAVAAAVHDRHDPLGMSPYEAVGRFSLLADVPDCFCDIPGWQDWDRGQLEEMKGRLDRLGRQEQNVGPREDHPWRGVRRTHVSSQDRRDAERHCTRLAGMLADLPRFLKAVADDIQTPVPGSLDDASKALEAARLVADSPGPPRRLLLGSEWEGDRPDRKAFLGLATEFFEGQDWMATRYREGALNGVNWEGMHRRCLRYWASPLRWFRPQYWSDRGLLKGFRESSYRPDFAAQAADLKRLADLAKLKMEIDSRREDGIRYFDEAWQGSASAWGRLSAMADWLTRFRTLHRDGWLGDKAVTTASYAGDHAATAKKARALGEKLDAFHSGLDELNGLLDLSADEMFDVPVLQVDFDVIESRFKRMAAAGEELVVWTQYQEALQQCEDSPLKSFLESAMEDDRPMDSSVRPLAIEKQFLRLWIEDCFERREELRQFNCGDHEAAILDFAKLDVDWIRQSRQRLHGRLSSRRPDGRMQAAPSSQMGIVQSEVRRKRGGRPIRKLLADAADVIPRLKPCFMMSPLSVAQFLDPAGIDFDVVIFDEASQVEPADALGAIARGRQLILVGDPNQLPPTSFFHSGPAPRSSADAEDAVGLVDMESILDRCAVVLSNCRLRWHYRSRHESLIAFSNREFYDSRLVVFPSCHTGDAELGLKTIFHPQDRYGRGKGQTNREQAARVTDFVFEHARRRRDVSLGVGAFSRRQQQAILDEIEKRRIEDNSLEAFFDRNRPEPFFVKNLETIQGDERDVILLSVGYGRSRPAERLSMNFGPLNQAGGWRRLNVLITRARRQCVVFSSILGEDFDLSATQARGVHALKGYLDFARDGMLPPTVDEAEEDSSALERAIYNALVAAGHTVCRRVGCGADAIDLAIEDPLRPGRYLLGIECDGAKYRDTVTARDRDRLRQQVLEGYGWRIHRVWSAAWFLSPRKEMERLTAVIAAARAGTLQARFLPIASAATQEIDDEMDLIPADDSSPIPVKAYRRYRPRRRRSSERFYTDSLTELAALVTEVVEVEGPVHEDQVSRRMLDIYRFSRGGSRIDEKISSAVRVAVYGGKINRRGDFLWPADMETPPLRRRDDDDIRDIDLICHAEIRRALRLLLETQFGMSRNDLTTQAARLFGFQVSGSRIRDRIGQAIQGLLESGKVAESGAILNVSSQ

SEQ ID NO: 6760 - protein, 319 aa, unidentified
  source 1..319: note = Related to JABGPF010000087.1; note = Phycisphaerales bacterium
MGLFDWIKRLLGIAPKPKNMFVEVDFRGRPQRQSTPEKPLGDLMELSRRLAKPVTDMQLTPVRYDKFTIPKRSGGQRQIMAPCPKLKEMQSRILHRLLGGLRAHRSAMGFERDRSIVTNALPHVGAAVIVRMDIRDFFPSTDAARVHAYFRGIGWDTEVVDLLVKLTTLDGGLPQGAPTSPRLSNLLNYLMDARLDGLARSQGGVYTRYADDMTFSFPTDKGNHKTAIVSATKDIVGEYGYRLHLRRKLSIRRSHQQQLVTGLVVNEKPALPRKLRRKLRAIRHRLETQGQATLTEQQLAGWDALTQMIETQRTPKNKQ

SEQ ID NO: 6761 - protein, 309 aa, unidentified
  source 1..309: note = Related to JAIORC010000001.1; note = Phycisphaerae bacterium
MGLGDFFRRLFSVSNDEMFAQDLLPSQGSRDVSSKGKLGVNELARRLGISVEQLQAVPIAYSEFTIPKRSGGKRTILAPRDELKSLQRKILRRLLGRLRCHSAATGFQRGQSIVTNARPHIGAAVLLKMDIKEFFPSTTADRLKKYFKYIGWDKQACKLLLEWTTHKGALPQGAPTSPRLSNLVNFAMDARLAGLAKKFNAAYTRYADDMTFSFATDDRQSIYGAIASTKKIVGQCGYKLHQKRKLRLARKHQRQCVTGLVVNEKLALPRRTRRWLRAVEHRLATGGQASLSPAQLAGWKALQAMIESS

SEQ ID NO: 6762 - protein, 311 aa, unidentified
  source 1..311: note = Related to JAAYZK010000376.1; note = Planctomycetes bacterium
MGLWDALRSLLGFNARRPARPDPGLPATRAMAEPGRDTGQLAQRLGVPLGYLETIQPQYRTFTIPKWSGAPRTILAPQDDLKQLQRTILRRLLGRLASHRAVTGFERGHSIVTNARVHIGAAVVIRMDLKDFFPTTKAARVGEYFRLIGWNDEAAALLMRLCTHGGSLPQGAPTSPRLSNLVNYRMDARLAALAAKLGAAYTRYADDITFSLGQDCRWLAAAAIRGTKAIVADYGYTLHQKRKLIIRRRHQSQRVTGLVVNERVALPRSTRRRLRAIRHCLDTGRPATLTASQLAGWDALEHMIRTQSRSE

SEQ ID NO: 6763 - protein, 370 aa, unidentified
  source 1..370: note = Related to MGMJ01000134.1; note = Chloroflexi bacterium GWC2_73_18
MGFFKDLGKKLEEARRLAEELQQQAQEQAQKLGQQAGVPIPGAPAQPPGTGAPGQPAWGGQPAQEARGGAAPAPTMAPGEREPARRSPPPARFGPDELARRLGTTVDALRAVQPDYTAFSIPKRSGGQRRILAPDPVLKSLQRQVLRRVLGRLRAHPAAMGFERGRSIVTHARGHSGRAVVVHMDIQDFFPSTRAVTVREYFRQLGWDDAAVDLLAKLTVWEGSLPQGAPTSPRLANLVNRRLDARLAGKAARLGATYTRYADDITFSFPTADPKAVIDAIRLTRDTVAREGYALHLRRKLHVRKQHQRQLVTGLVVNRGVGLPRERRRWLRAVEHHLSTGKPATLTQAQLAGWYALAHMIETQRNAPPS

SEQ ID NO: 6764 - protein, 322 aa, unidentified
  source 1..322: note = Related to MWDR01000017.1; note = Planctomycetes bacterium ADurb.Bin126
MGLGDILRRIFLGKDASPASPRAHVNPYAHRPDSISDVPVRDQPSRDLHELSQRLGMDAGELAACPIEYSVFRIPKRSGGTREISAPSASLKTFQRIVLRRLLARLKVHPAAEGFERGRSIVTNARRHVGRSVVLHMDIQDFFGRTTERRVRDYFRGIGWDKQAAALLTRLCTHGGALPQGAPTSPRLSNLVNYVLDTRLHALAARMGAAYTRYADDLTFSFEADRPGAVGSVIRAAKGIIDEYGYRLHTRRKLHVRREHDRQVVTGLVVNRKVQLPRPTRRRLRAVRHHLATDRTATLTPAQLAGWDALQSMIRTQADAAS

SEQ ID NO: 6765 - protein, 331 aa, unidentified
  source 1..331: note = Related to JAJFUU010000041.1; note = Planctomycetaceae bacterium
MGLWQIIRGLLGSSEANPYRAAGAPDGPVGRGSAAAAPSPPKRSRRRPPKFFLADLALRLGRDSNALSQIAVEYETFSIAKRSGGRRTIHAPQPGLKALQRDILRKVLGGLKAHPAVNGFRRGRSIVTNALPHVGHSVLVRLDIRDFFPSTTARRVEEYFRFIGYDDSSAALLTRICTHQGALPQGAPTSPCLSNLLNYRLDARLSALAAKMGATYTRYADDMAFSFSEPADAARVNMLVSAAQLVLSGFGYRTHHRRKRSVRRRHMAQCVTGIVVNDKANLPRATRRRLRAVRHHLMTGKEASLTAAQLAGWDALQHMIKVQSVPPSVPQ

SEQ ID NO: 6766 - protein, 305 aa, unidentified
  source 1..305: note = Related to DNAS01000030.1; note = Phycisphaerales bacterium
MGLGEWIGRLFGGKSQDRGGSVAPGRLVLVELSARLGVSVAELQAARVEYAQFTVPKRRGGQRKISAPSDGLKTLQRRILYRLLGRLKSHPTVQGFERGRSIVTNAVPHVGRAVVLRMDIRDFFPTTTAKRVEMYFRRTGWDAESAALLTRLCTHEGGLPQGAPTSPRLSNLVNHPMDARLEALAATAGATYTRYADDLTFSLPQDTPGTTARLIGSTKAILRSYGYRLHQDKKLRIWRRHDRQMVTGLVVNERANLPRRLRRKLRAIEHHLLTGRPATLTADQLNGWKALQNMVDAQALPPAQE

SEQ ID NO: 6767 - protein, 322 aa, unidentified
  source 1..322: note = Related to WGMA01000015.1; note = Phycisphaera sp.
MGLFGFIKGLLGGGAGDPRKDPTASFKRERPPTSERAAPPRRRGSRRPRDIAALAAWIGVGERELTRVSPSYQTFFIPKRNGDRRRIDAPSAELKTLQRRINRKLLRRLKTHRAATGFERGRSIATNAAAHTGNAVVVQMDIRDFFPSTTTQRVLDYFRAIGWEDDAARLLVDLTTHEGGLPQGAPTSPRLSNLVNHQLDARLDRLAARCHAAYTRYADDITFSFADGDPLVVRRVIRATKSILAEHGYRIHHRRKLHIRRRHERQVVTGLVVNDRANLPRHTRRWLRAVEHRLMTTGSATLTESQLAGWRALRQMIDRERG

SEQ ID NO: 6768 - protein, 316 aa, unidentified
  source 1..316: note = Related to BJHL01000001.1; note = Phycisphaerae bacterium
MLAWLFQLLLRSLIGTSPRRHFRLAESYREPSPNRYKPKWVKQRTLADLAKRLNVSIETLQSHKPTYAQLSIPKKSGGTRMLHVPDAATKRLQRALLRRVIGPAKSHDAAMGYERGRSMVDHAKRHADRAVVIGIDLQNFFPSTRAAWVRDYFIAAGWDKEAAKLLTHLTTHENALPQGAPTSPKLSNLVNHLMDARLTGLARHFGARYTRYADDIIFSLPTDDSLLVKSLVNLAMHVIANCDYRPHWKKKLFIRRSHQRQQIAGLVVNNGPPRLSRETKRWLRAVRHRLANGKQATLTPSQLAGWDAFEHMVENT

SEQ ID NO: 6769 - protein, 319 aa, unidentified
  source 1..319: note = Related to JAIEUA010000002.1; note = Phycisphaerales bacterium
MGLIQWIAGFLFGRPNEPISQAQIDAAFPKRRRVRRLSFEELSRRLDVNEATLKGFRPRYTRFQIPKRAGGSRRIDAPDAATKKLQRAIDKRVFGGVRLHAAAMAYVRGRSYVHHAALHADRAVVVSMDLENFFGSIRRWRVEALARWLGWDEEAAGRIADLCTLDGRLPQGAPTSPRLANILSIPMDRRLAGLARSRGAVYSRYADDLVFSFDADEQDVVHEVVHIANLIIWESWGFEMEVHHKRKLHIRRAGWNRQEVCGLVVNDGPPRLPRETRRALRAMRHRLENGGDADATPTQLAGWESLERMIQRQGSSTPR

SEQ ID NO: 6770 - protein, 351 aa, unidentified
  source 1..351: note = Related to JADLCM010000016.1; note = Phycisphaerales bacterium
MGLFRWLKKKLAPPDPFAAFESPAARSNAAGGVPGGVEDAAGAARRSPLRRSRAPHRDGRDAGIGAARFGLDELARRCAGPGIDPLTVEPGYRTFTITKRNGRPRRIDAPDESTARVQRAILRRVLGGIPSHGAAHGFERGRSVVTNASVHVDSAVIVKMDIRNFFGATRAERVLGFYRRFGWDEASAARLTELTTLRGGLPQGAPTSPRLANLVNYRLDASLHALADSVGARYTRYADDMTFSMDEDDASILNSIIGITRDALIDFGYEIHWRKTLHLRRTHQRQTVTGIVVNDGVSLARDTRHWLRAVEHHLRTGRAATLTPTQLAGWRAYEAMIDRGVNDDGTIADEG

SEQ ID NO: 6771 - protein, 317 aa, unidentified
  source 1..317: note = Related to JAAYCJ010000271.1; note = Phycisphaerae bacterium
MGLFSFLHGLFGGGRYGSEDLAQRLGLMVKWLDETKPHYQRFTIPKRAGGIRDIDAPNDELKKLQRLILHRVLAGLKAHPACNGFERHRSIVSNARVHARPDVVLRMDIRDFFGSTGAARVKRYCRAIGWDRRASNLLVKLCTWQGGLPQGAPTSPRLSNLVNYQMDARLAGLAQSIGARYTRYADDITFSFRADEANEARSSLARNPKTLDPAECRDDHRLPTAFAIRMTKAILADYGYKIHHKRKLHIRRKHQRQDVTGLVVNHKVNLPRRTRRWLRAVEHHLATGRPATLSAAQLAGWHALQHMVATQSQPGSP

SEQ ID NO: 6772 - protein, 389 aa, unidentified
  source 1..389: note = Related to nan
MPWGPDPASLFVDSTRARRHDVPAALAAPFAGRRTALRRPGPVAGLETQLPTWHVGQGGAGAGRKARARPRAPFTAADPMGLADLLRGLFGRSGPEPDRGAGIDELARRLGVSVEALQATPVAYRSFTIPKRSGRGERRIDAPEPALKALQRRILRRLLGRLKAHPAATGFERCHSIATNALCHTGQAVVLRMDIRDFFPSTREARVHRYFQKIGWNRDASGLLTRLCTYRGGLPQGAPTSPRLSNLVNVLLDTRLEALAKSIGAAYTRYADDLVFSFAKDERVSIHAAIQTTKTILEDEGYALHQDRKLQIMRRHERQRVTGLVVNDGVRLPRETRRRLRAVEHHLRTGRPATLTAAQLAGWEALRSMIDRQVDAARGGGGAGEGRGV

SEQ ID NO: 6773 - protein, 306 aa, unidentified
  source 1..306: note = Related to JAGNEZ010000007.1; note = Phycisphaerae bacterium
MGILNWLLGRRLRARRPAEYGPPRFGLADLVRRLGLSEAELRAVRASYREFEVPKRSGGTRRLAAPEPALKALQKRILRRALGRLKAHPAATGFERGHSIVTHALFHAGKAVVVRIDIQEFFASTAACRVEDYLRRIGWDAEATAALVKLCTHNGGLPQGAPTSPRLSNLVNRGLDARMQRLAAGLSACYSRYADDLTFSFDRDQSSADVRRLIGGAKAIITACGYRMHLKRKLHVRRCHQRQQVTGLVVNGQPSLPRETRRRLRAIEHHLRTGRPASLTPEQLAGWDSLRSMIETQRAQSPGGTG

SEQ ID NO: 6774 - protein, 324 aa, unidentified
  source 1..324: note = Related to WJLR01000725.1; note = Armatimonadia bacterium
MSGGPCAGHFGGAGARPRPQSLHKGGSTVGLWDRIRRLLGGGTPGHDLPSLAERLELTVDELRAVEPRYRTFDIPKRSGGHRTIDAPDDRLKELQRRVLHRVLHGLRAHPAVHGFEDGRSIVTNARLHVGKAVVITLDILDFFSNTTSRDIYRYLRFVGWSRSGAREIVRLTTYEGVLPQGAPTSPRLSNLVNYRMDARLAGMANSFGGDYTRYADDLTFSLTSDERVAVQGLIRTACEIIRDEDYEPHADKLTVRRRHQRQEVTGLVVNERIHLPRETRRWLRAVEHRLRTTGSCSLTEAELDGWLALTSMVHEQGEGVGVPD

SEQ ID NO: 6775 - protein, 300 aa, unidentified
  source 1..300: note = Related to JAGRKV010000051.1; note = Hyphomicrobiaceae bacterium
MAGLFAWISNRLDPGRSVEDLARWLKIEVADLQSVEPNYTTFRIPKRSGGFRTIEAPDERLKEVQRLILRRVLGGLKAHPCALGFERGRSIVTHAQAHVGKALVIRLDLVDFFPNTQADRVLEYFRSIGWNRRAAQLLVKLTTNNRHLPQGAPTSPRLTNLVNYKMDARLLAMARKVGGTDATYTRYADDLTFSVAHEGEHTSRDIIRGASTIVRDTGYLLHRKKKTHILRSHQRQTVAGLVVNDKVDLPRETRRWLRAVEHRERLGREATLTPAQLSGWRSLRHMIDTQRDPPARVRRR

SEQ ID NO: 6776 - protein, 309 aa, unidentified
  source 1..309: note = Related to JACRIL010000082.1; note = Planctomycetes bacterium
MGLMDFIRRRFGGGSGRSSLPAPDVGMDEKHLAGRLGVLPGKLELLNPTYKVFEIPKRGGGRRKIEAPAPMLKEMQNLILRKLLRRLKAHPCAYGFERGRSIAGNAAVHAGKAVVVRLDLKDFFPSISADRVRRYFRRIGWNGPAAELLVKVCTHEGRLPQGAPTSPRLSNLVNYSLDAGLLSAAKKYRADYTRYADDITFSFAIDDPGRIRSLIGSAKAVLSGEGYRINLHKKLRVARSHQRQKVTGLVVNSGVKLPRATRRRLRAIRHRLAAGKQATLTAAQLAGWTAFEAMIAAHDDPAAAGGQAS

SEQ ID NO: 6777 - protein, 317 aa, unidentified
  source 1..317: note = Related to NYZD01000065.1; note = Planctomycetaceae bacterium
MGVFDLIRRFFSNRDYDIPRDDPRQVPHDLSLEVRYPPALSVATLAERLGIAEGRLRNIEPNYNTFSIPKRSGGTRRIHAPSRELKAAQRRILRRLLARLNAHPTVCGFERGQSTVTHALLHAQQAVVVRLDIKNFFTSTDASHVAKYFRQIGWNREAIRLITVLCTHDGALPQGAPTSPRLSNLINYRMDARLAGLAQNQGAWYSRYADDLTFSFAEDSGERIHTVIRGAHRIAEQHGYEIHQRRKRHIRRRHQQQLVTGLVVNQTVRLPRHIRRWLRAVEHHRRTGKPTTLSDSQWQGWQAYAAMVERQSGATPQ

SEQ ID NO: 6778 - protein, 318 aa, unidentified
  source 1..318: note = Related to JAEUIE010000005.1; note = Planctomycetia bacterium
MGLFNWISKLFRRTLPPSVFKYPEPRWDKKELLRRLNLNEINLIYTVRGFNPRDTNLLAPHLIPLGYWWHKIPKRSGKPRMLYSPNPRLKLLQKLLLRKVFAKLAVHSACKGFRRGQSNCTHARLHVGKAVVVRIDIKDFFHSTSGNQVYDFFRRIGWNHEAASLIQAICTRKNRLPQGAPTSPILSNLVNYRMDARLAGLAGKSQAIYSRYADDLIFSFEQDNRRFIRGVIRRVVSILFESGYTINRTKLNVMRQHNRQVVTGLVVNRKVHLPRSTRRWLRSVEHHLNTGKSATLTREQLAGWKAYQQMIQTQSTGN

SEQ ID NO: 6779 - protein, 323 aa, unidentified
  source 1..323: note = Related to JAAYAY010000070.1; note = Planctomycetaceae bacterium
MGFLSWLLWGSGKSVGDLAEWLGVDVRQLKRLKPEYREFTIPKRSGGVRRIAAPSDELKRMQRRIGRRLLRGLRAHEAAHGFERNRSIVTNARVHCGQDVVVRMDLVDFFPSTSARRVHRYFRRIGWNRPAARLLTRLCTHEGGLPQGAPTSPRLSNLVNYRLDARIAGLVAALGGRYTRYADDLTISFAAEDAEDDWVIRSGPALPFVLEGHPEKIRYLRSFIRRVAGQEGYRVHRRKKTSVRRRHHRQMVTGLVVNEVVNLPRETRRRLRAIAHRAEQQKRPLLDADYRPFSYGRRQPTLTPAQLEGWEALQAMIVRQRVE

SEQ ID NO: 6780 - protein, 331 aa, unidentified
  source 1..331: note = Related to DUDC01000032.1; note = Planctomycetaceae bacterium
MTMGLIGWLLWGRGHGVGELARRLDIERRDIRRFQPQYREFTISKRSGGRRKIFAPNDELKKLQRRILRRLLARLRAHPAAHGFERRRSIVTNASAHQDQDVVMRFDLVDFFPSTSEHRVKRYFRRIGWNRPAAKILTRLCTYNGGLPQGAPTSPRLSNTINYLLDSRLAGMINAIGGAYTRYADDITISFSQEAEEDWGIRSGPAPPFTLRKHPEKIRYIRAFVRRAVREAGYQVHRGKKMNVRRRHHRQEVTGLVVNDHVNLPRKTRRWLRAVEHRARLLSQDREQSRYVMRKRPTLTPLQLAGWRAYRAMVLNGTGKTANATATRSHK

SEQ ID NO: 6781 - protein, 392 aa, unidentified
  source 1..392: note = Related to JACRUV010000658.1; note = Planctomycetes bacterium
MIRRPGPDGLAERRRVGHLYFRRRRAGPQIQVADTKQDSQGAAKANGRRGALCFAKDLFPFSTQYSRRSVMGFLSWLLWGRGFGLGELARWLDMDARELRRFQPEYRRFTIPKRSGGTRRILAPDDELKKLQRRILRRLLARLRAHPAAHGFERGRSIVTNARAHQGQEVVARFDLVDFFPSTSIQRVKTYFRRIGWNRRCAKILTRLCTHEGGLPQGAPTSPRLSNLVNYRIDARLAGMADALGGVYTRYADDITISFPKDEPEEEWVMRAGEPPPFSLARCPKKIAFMRAFVRRVVGEEGYRVHRRKKQSVRRRHHRQMVTGLVVNDGVNLPRKTRRWLRAVEHRAKMAKETPFDFANPSAKRPTLTPSQLEGWRAFQAMIANQSTGGEE

SEQ ID NO: 6782 - protein, 339 aa, unidentified
  source 1..339: note = Related to PBFX01000035.1; note = Planctomycetaceae bacterium
MGIRDPVVKLFDWIVNGTGHGTTELARRLGIPEQELRTVDPVYHAFSIPKRSGGTRKILAPEPRLKRFQRLLLRRVFAKLSVHPAATGFEPGRSIVTNARTHQGQAVVLRFDLIDFFSSTSTKRLRKYFRQIGWNRPASKLLLRLCTQQGGLPQGAPTSPRLSNLLNYRLDARLAGLIVKLRGRYTRYADDITISFATRDLHAAGKSDFPARNSAGGTPNHPTQTPTGQDTIRSITRAVQKVIESEGYRMHHRKKLSVRRQHQQQVVTGLVVNQRVNLPRSTRRWLRAVEHRTQMSQPLSLTSYQPGSYSRRKSPTLSPAQLEGWRSFRAMVQRQAIDD

SEQ ID NO: 6783 - protein, 328 aa, unidentified
  source 1..328: note = Related to MHYN01000254.1; note = Planctomycetes bacterium RBG_16_64_12
MGLIGRLIGWLTKGRGHGVEELARRLDSDLLDLSRFQPDYRPFTIPKRSGGQRRILAPERHLKRLQRRILIRLLARLRAHPAATGFERGKSIVTNARAHQGRAVVLRFDLVDFFPSTTAERLRKYLRRIGWNRPATEILLRLCTYEGGLPQGAPTSPRLSNLVNYRLDARLAGMAARLGGVYTRYADDLTISLPDEEQEKDWTIRSGPPPLFGLETNRDKIRFLQAFVRRVVEEEGYRLHRRKKLSVRRRHHRQEVTGLVVNDRVNLPRSTRRWLRAVAHRARLARQEGPGPSRPPSGGLPKRPTLTPAQLQGWQALESMIARQRTEG

SEQ ID NO: 6784 - protein, 327 aa, unidentified
  source 1..327: note = Related to JAFGAY010000394.1; note = Pirellulales bacterium
MGWLDRWFPGEGHGIDELARRLHVDPEQLRRTAPRYREFSIAKRRGGRRRILAPQTDLKNLQRRILRCILARLKSHPAAMGFERGRSIVTNALPHQGQAVVLRLDVKNFFASTRAGRVRRYFRLIGWNRPAAALLTRLCTHEGGLPQGAPTSPRLSNLVNYPLDARLSAMCERLGAVYTRYADDITISLSDEKEDRPLRNPPPRRGNVSPPPLSSEPNRLRYLRHFVRRVFDQAGYTLHWRKKASIRRRNHRQLVCGLVVNHRANLPRETRRWLRAVEHRTLLEKQAKTAPLSSLDRGRRKSPTLTQTQLDGWRALRLMITQQMEEG

SEQ ID NO: 6785 - protein, 365 aa, unidentified
  source 1..365: note = Related to JACOUH010000027.1; note = Planctomycetes bacterium
MKDLQRRILRRLLKRLRCHAAARGFQPGESIVTHATLHAGRAVVLRLDLRDFFPSTGSSRVYQYFRRIGWNRPAARLLTNLCTHQGGLPQGAPTSPRLSNLLNYRLDARLAAMAARLGAHYSRYADDITLSFGQDDRDRIRYIIRFVKRAAADEGYRVHGRRKLRIRRRHQQQRVTGLVVNAGVRLPRQTRRWLRAVEHHLRTGRVATLTPEQFAGWQAFRQMVEGRPRTASPAPLPPPLVPVPVELDGAWVLVALQKNGHAIPVNMPAEGIGPAEWTFASGELRIAQGDHEERADCSVDASTEPPRITIRPAGQEAGTAQGIFRLEGDKLTICVSEEGQPLPSAIPSVPGTGWTVYHLRALARR

SEQ ID NO: 6786 - protein, 305 aa, unidentified
  source 1..305: note = Related to CP066225.1; note = Planctomycetes bacterium
MGIFNKLKSLFSSNSSEPQHQTPTTPARFNLLDLEHRLDISHRQIKLIPLDYHTFTVPKSNGHKRLITAPNPELKKLQRTIAKRLLTKLAVHPNAVGFRKNHSVVTNAKAHTNSPMIIKLDIRNFFQSTPAQRVNHYFRFLGYDADSAQLLTSITTHIDHLPQGAPTSPILSNLLNYKLDTALTTLAQNHKAIYTRYADDITFSLDTKDSEAARNLVNAAAYLLHQFGYKLNNRKKRIIRNHRQQRVTGLVVNEKVNLPRETRRLIRAIQHAHDNNKPTTHSPQQLQSLKAYHQMIITQSEFETH

SEQ ID NO: 6787 - protein, 301 aa, unidentified
  source 1..301: note = Related to JAEIOG010000060.1; note = Phycisphaerae bacterium
MGLFDKIKGLFGSGSSGGVSGLTIDDLAQRLDMPVERLEGVEISYHSFTVPKSNGHQRRITAPDDKLKQVQRAILKRLLNKLAVHPNATGFRKGYSVVSNARLHVGSEVIVKLDIRNFFESTKINRVNKYFKFIGWDRKTANLLTELTTYKGGLPQGAPTSSALSNLLNYKLDSSLTTLAKKKGARYSRYADDMTFSLDGSDSKVINSIIWGAESALHDLGYRLNNRKTKVIRKHRQQRVTGLVVNEKVALPRKTRKLIRAIEHSQQNGRPSTHSADQLRSLKAYQAMVEKQGEDGELDEG

SEQ ID NO: 6788 - protein, 312 aa, unidentified
  source 1..312: note = Related to JAGKQQ010000001.1; note = Gemmata sp.
MWPIFTPLWRTLSGGRSAPEAGIAPLPFESNWAERLARLGLSPENQRAIVASGALHPHLHYWRFQKPKRAGGRRAIAEPDRRLKRLQYAIVSWCFSAERSHPAAIAYQKGRSTADHIWAHAGAEIVITADIRDFFPSTRAERIETWWRERTDSDTARLLTLLTTDRDGLPQGAPTSPGLSNFVNTELDARLTRHAAPSGARYTRYCDDLAFSWPISSGPPSGFERGVRAALHEFGYTLHPEKGWRVSHRRDEPEIVGAVLTRSGGVRLPDRLRRVIRALARSASPGDVPKLAGYRGYAAQVTNRPGRRNPKT

SEQ ID NO: 6789 - protein, 309 aa, unidentified
  source 1..309: note = Related to NZ_LR593886.1; note = Gemmata sp.
MWPIFTSLRRTLTGGRSGRTGDRPPVSSEADWAERFARLGLPPETLRNIIAADSLHPYFRYRRFHKPKRDGGRREIAEPSPRLKRLQREIITQYFATEQPHPAAVAYQRGKSTADHVWAHAGAEIVITADIRDFFPSTRADRVEMWWRERVDSETARLLTLLTTDCGELPQGAPTSPGLSNFLNTEMDAKLTRRATGACARYTRYCDDLAFSWPTGFGPPSDFERGVRATLHEFGYELHPKKGWHVHRRGDEPEVTGAVLTRSGGVRLPARIRQMMRALARRATSADTERLKGYRGYAAMIATRPRRRG

SEQ ID NO: 6790 - protein, 316 aa, unidentified
  source 1..316: note = Related to JAIOHM010000031.1; note = Anaerolineae bacterium
MNNPLSTLWYKLTNNWVAIYRQRYGYSDDYLTLGQMLGWGAIGALNVPQVPYPTLLRVLRRNSIYPDFRYRHFTRPKADGSLRELVEPDEKLKRIQRKILKTLLKNALIHPSAVGFRRKKSTADHAWAHAGAATIITADIEDFFPQTKTYRVEAWWKSYFIEQPEAESAARLLTLLTTYKGSLPQGAPTSPALSNILNYEMDAALERRVVASGGQYTRYCDDMAFSWGGIGDVPADFETAVRSIVQEYGYHLHRWEVWNAHDEPELTGIILARHGGVELPDDVQQTIRRLARSTSASDMARLQGYRAYESMVKKRR

SEQ ID NO: 6791 - protein, 327 aa, unidentified
  source 1..327: note = Related to JAHBVJ010000016.1; note = Anaerolineae bacterium
MLNDLPNTLRRLVGLPPAYRYTSPARNEGEWSMVTLCYRLGLKVEDAHQIMDSAAFPSGFRYREFTIPKRDGSPRQLLEPGPKLKQVQRRILTMLLRKAQPHHAAYGFRRKKSIADHAWAHANSRIIITADIQDFFPNTTRQHVKQWWHEQGFSTPEVRLLTALTTLHGSLPQGAPTSPPLSNLVNAQMDTALERHIQASGGIYTRYADDLCFSWPEGYAPPADFEFAVRSVLHEYGYALHPDKGWQVWDRDEEPTITGVVITKHGSVDIPDSMKRIMRTLQQHGTAADDTRLQGYQGYQRMITREPRPEKASAGLGKAPIKSPRLR

SEQ ID NO: 6792 - protein, 304 aa, unidentified
  source 1..304: note = Related to JAFGMM010000127.1; note = Anaerolineae bacterium
MWHRLPYALRKLRQTLIPIRYEPPDYALWNLQARLGLTPAEVSRLAMPGPFPPRFRYRHFTVPKKDGGRREICAPGPRLKEVQRQILRAYLDPRAPHPAAMGFRRALSIADHAWAHAGAAIIITADIEDFFPSTRARRVAAWWAAQGFNDAEVHLLTRLTTYRGSLPQGAPTSPALSNLVNAELDAALHRRAQQSGGVYTRYCDDLAFSWPDGGRPPADFEPAVRAALLGAGYRLHSGAEKGWQMWARRDEPEVTGLVLTRRGGVALPPPLYARMRSLARSDDPHDAARLAGYKGYELMIRKRR

SEQ ID NO: 6793 - protein, 316 aa, unidentified
  source 1..316: note = Related to JADZFG010000029.1; note = Anaerolineae bacterium
MLNKLPAPLRNLFGLYTSYMQPVKHPGEYALYMMAYRLGLNRYPVYRFLEPGPLPPYYRYRHFTVPKQDGTRREIVEPGPNLKAAQRRILQLYLNNRKPHPAALGFRRKKSIADHARAHAGAALIITADVEDFFPNTSRQRIKSFWRQQGFSTLEVRLLTALTSYRGALPQGAPTSPPLSNLVNYELDAALDRRVKPSGGTYTRYADDMVFSWPDLASPPADFEQTVRALLREVGYTLHPRKGWHVWVRRDEPLVTGVILKRDGSVDLPDSMRRIMRELARSDDPNDRARLAGYQGYEAMITGDATPVSRRKAQGR

SEQ ID NO: 6794 - protein, 318 aa, unidentified
  source 1..318: note = Related to JAADYZ010000077.1; note = Chloroflexi bacterium
MLRDILPAPIVDLLTQSLGVSLRRPRGFSPPAGDTWIIYHFFRYTLAMRDEDARAFLAGGKPPKGFTYRHFTVPKKDGSDRQLVEPGYALKAVQRRILRLLEARGVTNPAALAFRKGRSIADHAWTHAGAAIIITADIEDFFLSTSHRRVREVFHSIGYVDDRAHYLTRLTTYRGSLPQGAPTSPILSNLVNAEMDKQIARRTSESGGRYTRYADDMAFSWPDRFRPPGDFEQTIRGILREHGYRLHPRKGWRVWLRRDEPELTGLILTRRGGVDIPDSMKVIMRELEKGQSEDQAQRLSGYEGFRHMVQATRRRYRA

SEQ ID NO: 6795 - protein, 314 aa, unidentified
  source 1..314: note = Related to JAADYX010000020.1; note = Chloroflexi bacterium
MTRLDQILPDTLVRVLRMIATGYEHIPYRGHDDPYRSIYWMVGYRVGIDPPTIRAIMEGGDLPAVWRYRHFTVPKKDGSPRQLMEPGRDLKAAQRELLRRLNSLDPHPAALGFREGLSIADHAWTHAGARTIITADIEDFFPSTQATRIYDFWVRQRWVYDEIAARFLTRLTTYRGGLPQGAPTSPALSNLVNVGLDTKLAARARSAGATYTRYADDLVFSWPDEGRPPADFQHGVHAALHEFGYRLQPRKGWRVWHRRDEPEVTGLILTRGGSVDIPDSMKALMQTLERTATTEEDFQRLAGYEGYRQMVVRE

SEQ ID NO: 6796 - protein, 302 aa, unidentified
  source 1..302: note = Related to JAFGFI010000446.1; note = Anaerolineae bacterium
MASVLARLMGIFSVSTTKMCREDIFETPQVFRLSLLMDVPSATLLRFRSGWPGGRYYYRPLRCEKRDGSPRHIYAPSPPLKALQRALLSYLNSLTVHPAALGFRRGFSIADNARAHQGQAVVVTADIEDFFDSTPAQRVRDFFRAEGWDTTAVSILTRLCTFHSVLPQGAPTSPVLSNLVNTHLDADLTRVILQSGGRYSRYGDDLTFSWSTRAVPSGFEATARAILLSYGYHLNAQKGWRIWRVYAGDVAYITGIRLGLDGRLHPSSEIQQNMRELRHQRNDPVAAARLQGYQGFIKMLRS

SEQ ID NO: 6797 - protein, 313 aa, unidentified
  source 1..313: note = Related to NZ_JAALJI010000003.1; note = Paludisphaera sp.
MSPWRPLGRLIPTALRSILPRFEHDSGAMGRLSTILGLSEDELRAFRLGPRYHYRPFTIPKPDGRNRRLLAPSAALKRLQRSLLDEYLGRLPVHPCATAFHPGASTVRHALPHARGTRIATVDLRDFFESTTAARVRRFFVSKGWRGESLGVLMRLCTYRGCLPQGAPTSPCLSNLVNERLDDRLRVLARRSGGRYTRYGDDLAFSWVERPMPAGFQRSIEAALERSGYSIQPRKGWLVREARGRPQVTGVVLAGDGRLHVPWRYRLRTAWLRWRGFWSRDPHVRAQWRGRQAYRRMVERGKAGPRRRPGRSS

SEQ ID NO: 6798 - protein, 313 aa, unidentified
  source 1..313: note = Related to NZ_CP011273.1; note = Planctomyces sp.
MNPGHPLSYLVPPTLRRLLTPAGPSSAHAQALAQLLGVAEDELDAIRLGRRYHYRPIRGAKPDGRERRILAPSPPLKRLQRRLLDEHLGRLPIHPCATAFHPGASPVFNALPHARGATIVTLDLRDFFEATRAWRVHRFFREQGWSGEPLRVLMRLCTFRDGLPQGAPTSPCLSNLVNVRLDEKLRRLAARSRGIYTRYADDLTFSWVDGGMPGGFQRAVENVLEREGYEIQPRKVWRVSRARDRPRVTGLVIAGDGRVRVPWRFRVRTVLLRWRSWLTGDPVARARWRGCQGYLRMVDRSREGARSRPRKGG

SEQ ID NO: 6799 - protein, 300 aa, unidentified
  source 1..300: note = Related to MKTT01000068.1; note = Planctomycetales bacterium 71-10
MTPRHPLVRLLPPWGRDVDEALQREAVADLLGVAVDELDAIRMGPRYHYRPLAGTKPDGRERRILAPSPALKKLQRRFLDAYLVDQEVHPAAMAFRPGGSTLAHALPHARSRLIAAVDLRDFFESTRGGRVARWLAAQGWDREATRILMRLCVFRDALPQGAPTSPGLSNLVNRRLDERLDGLARRTGGVYTRYGDDLAFSWPDERLPGGFTASVEDVLARSGYEVQPRKGWRVGAARDGFEIVGLVLAGDGRVRVPRALRWRAALLRWRAALVGDPATTRRARGLAGYLKMVDRAPRTR

SEQ ID NO: 6800 - protein, 301 aa, unidentified
  source 1..301: note = Related to JAEUIF010001079.1; note = Planctomycetia bacterium
MDLNPGELLTRLLPNCLLGQAATPSAQRLADLLGIDVRELPAVRLGPRYHYRPFTIRKPDGRERRLLAPSPALKVLQRRLLDRYLAALPLHAAATAFHAGASNVLNARRHAHGRLIATVDVRDFFESTRAARVRAFFVRQGWHDAELHTLMRLCVYRNGLPQGAPTSPCLSNLVNRPLDERLENLARRMQATYTRYADDLTFSWDRDHLPDGFRPAVEDALHAAGYEVQPAKGWRIHGIGDRPVVTGLVLAGNGRVYVPWSLRWRLWRWRWQAWWSGDASAPLRLHGLESYVRSCAAVPEA

SEQ ID NO: 6801 - protein, 398 aa, unidentified
  source 1..398: note = Related to JAFGLD010000107.1; note = Anaerolineae bacterium
MEHLLSRFIPRSLRNLLPRQSSPSVSAMEMRLVGLLGVWPSEFSTIRLGRKYHYRPFSVTKRDGRERRILAPSPPLKKLQRMLLHRYLDTLPVHPAAMAFRRGCSIVDNAQRHAGQKLVATLDLVDFFESTTADRVRGFFLKQGWHGEALSMLMRLCVYRNGLPQGAPTSPALSNLVNYEMDERIADLARRADAVYTRYGDDLTFSWRTEHIPAYFVPALVSILTDAGYAIQPRKPWRVRPMSDEPKVTGLVLGRNGRIRAPLNLQWEVVKLRWHLFWHSGDAHARARLQGYQAFLQALEVKYDNHNHINWPDNLPGLRWEIFKLRWRLLLRPGDSDARSRLAGYQSLLYYYQANRKNSASTYRYISEGNDDYNDYDDEDDYDDFEDYDNDDLDELPF

SEQ ID NO: 6802 - protein, 300 aa, unidentified
  source 1..300: note = Related to JAFGMS010000346.1; note = Anaerolineae bacterium
MHNPLAHFVPRCLRELLSIPSTQASEWEAQLAYWLQVPVGELPNIRMGPRYHYRPFSITKRDGRERRILAPSPALKQLQHRLLHNYLYTLPVHPAATAFQRGCSIMDNARRHAGQTLIATLDLVDFFESTTADRVRRFFVRQGWRGKELAVLMRLCVYRDGLPQGAPTSPCLSNLVNYDLDEQMASLAQRADAIYTRYGDDLTFSWRNDRVPAYFEPKLRGILTDAGYAIQPRKAWHIQHINAGPQITGLVLGHDGRIQIPRRLYWEAFKLRWRLWWRPDPHTAARLQGYESFFNTPGLR

SEQ ID NO: 6803 - protein, 301 aa, unidentified
  source 1..301: note = Related to NZ_AP019860.1; note = Candidatus Uabimicrobium amorphum
MVKYSWQKILRDILPQKNIMAANTDDTNLEMLSSIFAIRIDILQEVSRSIHRHYTTFEISKKNGGTRNIYAPNPTLKKVQYEIFHYLQNFAIHPTATAFIPGGSIIVNARQHLNQELFLTVDIKDFFTNTSTKRVRNFFRDQGWEKQSLDMLVSLCTYQGGLPQGAPSSPQLSNVINMELDEEIYQAASASSATYTRYGDDITFSWSTSCMDSGLKNKVTQILTNFGYEISPQKGWQLFCAEQQPEIVGVVMGSDGKLRVPQRIHEKLDKLHQKNNPDLQGQIRGYENYIKGVESASVSIA

SEQ ID NO: 6804 - protein, 319 aa, unidentified
  source 1..319: note = Related to JAFGWW010000022.1; note = Planctomycetes bacterium
MGLFDFIGKFLGTSAPETASTKAASNAPASPYANQNYYIKKAVYLKYYLGQNENQLKEFRPEYNTFQIPKRSGGARTINEPKPETKALQHKILRMLRNGNTHKCAVGFRRGRGIVHNAIPHVGKAVVLKMDIRNFFPSVTREKCVTAIMQTGWEKGAAEILADICCLNGGLPQGAPTSPLLSNIANTRLDCRLYGLAKKLSTGTQKVDYTRYADDITFSFATDEPGLVRGVITLIFQILHEEGYQVNKKKTRVMRQHQRQTVTGLVVNETINIPRKQRRKIRAAMHRISVGEEPTLTNEQLQGWMGMLSLVQKGKEEYL

SEQ ID NO: 6805 - protein, 323 aa, unidentified
  source 1..323: note = Related to JAEURL010000499.1; note = Anaerolineales bacterium
MNWLSQLTRGLRRERTPADLARWLGLPEAELRPWLASGPAWARGYEYRRFTIPKRRGGVRVIDAPTEKLKDLQRRVLRRLLAPLAPHAAATGFRRGHSIVDNARPHTGQAVVINLDLADFFPSIAAARVDALFRAVGWNAEAARILTAICTLDGALPQGAPTSPALSNLVCRRLDARLAALARSQGGAYTRYADDLTFSFPAFGRNRRLRRHAGRPTPGRRPAPSWVTPRSLLGWVRAILEAEGFRIQFKKQVRVQRPHQRQTATGLVVNQAVNLPRATRRLIRAMQHHERLGRLDAAGRRRLRGLEALAGMVARQREEPQRR

SEQ ID NO: 6806 - protein, 319 aa, unidentified
  source 1..319: note = Related to JAGOBN010000015.1; note = Anaerolineales bacterium
MSLFNWIKQALGRARSPADLARWLQLPEAELRLWLDQRPAWTRGYEYRSFTLPKKRGGTRVIDAPTEKLKALQHRILRRLLNPLRPHPAATGFVPGLSIVDNARPHAGQGVVINLDLENFFPSITPARVEAVFRAHGWDAEAARILTAICTYENALPQGAPTSPALSNLVCRKLDARLAALAEYFDGAYTRYADDLTLSFPSFGRNRRLRRHAGRPTPGWRPKPGPAAPRTLLTWVRAILEAEGFRIQLKKKVRVQRPHQRQTATGLVVNEVVNLPRAVRRRIRAMQHRERLGQLDEAGRQRLRGWEALAHMVANQREG

SEQ ID NO: 6807 - protein, 323 aa, unidentified
  source 1..323: note = Related to JADZEK010000016.1; note = Anaerolineales bacterium
MNFLKAFGRLGGRERGLAELARWLGLPETELRPWLSSAPAWARGYDYTRFTIPKRRGGARTIDAPGDKLKALQRRVHQRLLAGLKLNPAATGYVRGRSIVDNARPHTQQAVVINVDLADFFPSITADRVKAVWRAHGWNDEAATALTHICTLDGRLPQGAPTSPALSNLVCRRLDKRLSELARRCAGAYTRYADDLTLSLPSLGRNRRRRPGPPRSGPAQPRLAQRARHSRKIITQLREIIEAEGFRIQWKKRLRLQRAHQRQTATGLVVNAVVNLPRATRRLIRAMQHRDRLGQLDEAGRRRLQGLVNLQQMVLKQRNSTGR

SEQ ID NO: 6808 - protein, 348 aa, unidentified
  source 1..348: note = Related to JADLEU010000283.1; note = Anaerolineales bacterium
MLRRPGTAAAAEVGLLDYVQQAELPGFLMPVFASLNRLLKRARSPKDLARWLDVPEGELRGWLSGPAPWARGYDYDHFTIAKRRGGTRTIDAPGDKLKVLQRRVLHRLLGPLPARPEATGFVRGRSIVDNARPHVGQGVVVNFDLADFFPSITANRVEAAWRALGWDAEAATILTRICTLDGRLPQGAPTSPALSNLVCRRLDARLGALARSLRGQYTRYADDLTFSFPGLGRNRRRRPGPPRSGPARRRPRGPSRRVLATVRDIVMAEGFAIQWKKRVRIQRAHQRQTATGLVINRKVNLPRATRRLIRAMQHRRRLGRLDDAGRRRLRGLEALAAMVDRQRAAPGR

SEQ ID NO: 6809 - protein, 317 aa, unidentified
  source 1..317: note = Related to JACPWC010000114.1; note = Chloroflexi bacterium
MNLFKSLFNTVSGGRSPADLAKWLDLPEAELREWLTNKPAWARGYEYARFSIPKRRGGVRAIEAPNKKLKALQRRILRRLLNPLKFHPAATGFVPGRSIVDNARPHAGRGVVINIDLAEFFPTITAERVTQVFRSLGWGAEAATILTNICAYEGRLPQGAPTSPALSNLICRKLDERFSALVKRYKGQYTRYADDITFSFPGLGRNKRLRPKPKGRPPLARPAQGGPGRTLLTLIKTIVEEEGFRIQMKKKVRVQRPHQRQTATGLVVNRQVNLPRTTRRLIRAMQHRQRLDQLDAEGQRRLKGLEALMDMVSRQRG

SEQ ID NO: 6810 - protein, 336 aa, unidentified
  source 1..336: note = Related to JACQNR010000440.1; note = Acidobacteria bacterium
MVQNADRKKAGRAVRREYPVVGVFKSIARILDRGRGPDKLAAWLGLRQDEVEAWAQGRPPEPSGREFYYNRFTIPKRDGRTREIDAPSDALKSMQRRVLHRLLNPLPAAAESTGFVRGRSVVHNAQPHTDQDVVINIDLENFFPSITAQQVRASLVACGWSNTSADILTNICTYQGRLPQGSPTSPPLSNMVARRLDARLAGLVKGYDGHYTRYADDMTFSFPAFGAALDWKASTAVKQARCKLLSMIQMIIEEEGFKIQRKKRIRIQRAHQRQTATGLVVNSRVNLPREFRRRIRAAEHREKLGKLSAEDKARLRGWQSWRAMVSHQGAQAASPP

SEQ ID NO: 6811 - protein, 791 aa, unidentified
  source 1..791: note = Related to JAFUWU010000052.1; note = Oscillospiraceae bacterium
AAKLAGLPEDIAREDVSIAGLDGLRLSWGETLFAPDLAAITPLTDQAGRFAGSVLGCEAPAWCFLPVGRMATRLRFSSELESMPESMRRQLADAYIETHPQKVAPGQGGMHWLTAKSFECPEWEDLCALQTSKPTPELLQAMANTRQRRAVKEAMRYLRLFRDRNYENCVTRFMGTELWRKAGGVRLHQDLAEDLEKFLGMPGAVLSAPERQRFAAAAILDAEDREELARNFSRLIGSRVPAEFVLEHVCAGGRKDAVQLLLDSAPDAIRRRYIIDFIGTHLWERAGGASLHEDFAQDLAQALASPSRQLAESELCRMALRMADERHDASLVAAVLPALTRSDKTWAAAEQGVETPLLVEAVRAIDESDILDRVLSFAKQPDIELAAHDALLQFLMFDEEILEEHLWRAEHRCSAKRLPECETTLAQLTAIAIREHGNLRRMARLLSAHAEKCGLKGRQAEGLVAQALRSAARLVSRHGRHRAAALELLSCIGLECATALKYVLANLDRKAGSGRELDHVYHLWELPKKSGGKRTICAPPMPLKIVQRAILHRLLEPLGAHKAAYGFVPGRSIGQNAALHVGSEVVANTDISSCFPSVRWQLVLGVLRRDLGKTLLSGTVSLVTDICTGQGGLPTGAPTSPAILNRVLLKTDEILTAAAARRGCTYSRYADDLTFSGGRGAVEMLGVARSTLERIGLKLDPKKTNIFRRGRRQTCTGLVVNDKVAVPRAIRRRLRAAVHAVEQGREPAWHGREDTVAALGGRLNFLASVQPEKAAPLKERLARALHGGKDR

SEQ ID NO: 6812 - protein, 1108 aa, unidentified
  source 1..1108: note = Related to JAGZDF010000029.1; note = Sutterella wadsworthensis
MTANGEARFAEVIKAFPTLSEAEVLRLSYAFFKSEPENQAILLSIAKRGALASVAQDIEAQYPPSSEAATYLLKGETLVLPGFCTALPTEIQLRYLLAKWAHSSTPNVLQLVQKLSSFKGLKSLMLQAELQVLVGYLKAHSIWVTKCEPEATLLLPKDLISGFMHGDVADEFFLGGSALQHLEDLANCGLRSILVSVNNAWEKLEFDKLNELFERVPNALIDHPLQPDLQAALKKRMISSSKHTLAKRLKRKKNQTWNFMDQRVATALSHLLGFKVPRWAIGDHEAFSQILVDQNLLQCFDDRQLQKLINEIGMPVMTACAAQSATQKLVKNYPEAYAPLPLSTIWRAVNREDMFKVVGWPKITLESLTLALNAGIAQQKLVWLSGYMKAVDASQKEAIQTLLLTKHLKLAARVIESTDPCWLQVPIKACVENGLWSVVLQADAKRVMDEVPRRFLVDKVLGNCRRKAFSRDPFDRIYDDQLLEAYRALTSNTALRRHFVTSLLERSWCTDHKGTGYLILGGRRFSYVALATELLRCTAFVGDRDYRKEVVVQGLKSAKSQSHRQTLLRLIQQDVIETDMPEAWIKAVLSWPKEVLKTLLPKMTGKLLDAYVDRVGVRGLNACYATSPKALSSRHFFALRVTRLKKGGVWPEDRLLKRDDHGYDEVIETASNFLGIREARCLDMCLERMADKGEAVLQYLCEHAKDVMSHELTRWVDVVLARYAIAPEARLKALTSDVTTADVKFWPQQGPDGDEGDVYAYLRVHHSLKALSEVWSARGVVPDNVRTIMASKWPNDAAWFELMLVLGPSYVSLIRQVMGMMDFKAPFGSRFDAHYRHSTIPKKSGGVRDIYAPERALKALQTLINVKLLQPLGAHDAAFGFVPGRNITGNAERHVGQSIVTTADIHSCFPSVGRGLVVHALKRDLGERLSYGAILKIADICLSQGVLPTGAPTSPALLNRVLLRTDELLTDAATSKGCTYTRYADDITFSGGEGAVNLLGVAKGVLKPIGLMLDPKKTNVFRRGRRQCCTGLVVNDRVSVNREKCRRLRAAVHALEMGRPLLWDGKPETVAQLRGRLAFLASVKAEEGARLMARLEAALRQKTTVCAQ

SEQ ID NO: 6813 - protein, 1226 aa, unidentified
  source 1..1226: note = Related to JAKNCT010000004.1; note = Mesosutterella sp.
MKNFRQAKDESSFSLEIRDAVNSLDFAIPRALPRGDPFAPSVPEEYWKKIRSAVEQLWPARVRPLFKGKDEARAYQEAWISAAYSPFWDCLRISALWCAGQPGRQALLEAVRQADAVPRQYPPAASPLLKAVERGPHNPYLDEESALDKYREVFPIGSFTPPIDTCMKLGRLVVESRRKRPACVSAWDVFRCLPPTLPHLSCRWLTRTLLGFADACARLGIRIKKIPAACAAFLGRDASIAIRSPAVRSFFLLPPKKDFSIDVRAPAGMTLLGYLFYAFSKTGEYEAVFIVSESLLRAFSGEPKLLRRFKESPGYQLFLKAAVQEEPTPKGRRDWLGERRSLEGNPRVGALLRHLFGKILPGWNRSGQASFLVELAKGARANCYFPREYQRFLLLVSSERQKRRLEESGHWLQLFDLEDGCRKGAANWKFILLQESWDTVWNAKDRLQEELTAEKDASAYLRFVARHHPSGDLSLDFYNNKKIKERFIYDFHGSPLWEKAGGACLEPQQAEALCFAWGSASFRGRAGSLAPALEEVGPYCLEDLLALMLTPAGLRRCRGALLRVLPRASADAVRHIADRCEEGDVLRAIALHGPEEARVPAALRAYDQLAPGKAAALGRKLFLAGLPVRLAPGWLDRGSWSAEKLFLALCELCGDPDRAGLRQALEACAPEPAGSRRLSRKARLIVARLAARAARRFEPGEAGAAPGALSAREVGLAEWLLREARCCAWGAASYNGPGQSIAPALNEIGPNCREDLLALMLTPAGVRRGGGALLRVLHKAPAEAVLEIIDHCTDVEVLQAIALHGPKEARVPAARQAFDRLRPQKAIELAKKFFLAGLPVRLAWGCRDVKSWTREKLFLALCASCDKRDANELCEVLDVFARSFQGPDAEAAARGTLEEVARLAARAGRLLVSAEAGLVAGLWPGKQARIVKWLISAMDWKAAPGCRLQKSYRRFHIPKKHGGKRLISEPIKKLKFLQRGVLERLIAPLGAHPAAMGFVAGKSIADNASVHSGQPVVAVADVHNCFPSVAWPVLYRVLERDLGPRLGAPACALIADLCTLDGGLPMGSPASPALLNRVLFKADEILASEAKRKGCRYTRYADDLAFSGGEGAVGLIARAGSVLSAAGLRLDPKKSSVFRRGRRQVVTGLTVNAKPDVSRDYRRRVRAAADRWRKGLEPSWLGCPVTREQLLGRIAFVNMTSAEEAVRLRKWMREGDRLRGKKGKAA

SEQ ID NO: 6814 - protein, 999 aa, unidentified
  source 1..999: note = Related to RGQD01000262.1; note = Betaproteobacteria bacterium
MTAPDPRQRRAEDLCALLEQQGADLFAAPRMAGLDPYAHDFGACWLSEFSAGLAPLWPACLSLFGRQLPKQAVLQQCWSVAMERPLWLGMLYRAACAAGLSPAASPLLWAEASRLKAITAARWRTDAMAVALMAADAAAVVVPDLGPQTALKGSLRLRYRLAHLCATGAALQGLIDAAAHQSGVTDYQRRVELARAVHGAQSGGRRWRPLREVEYLLLTPKSRQLVIGTPALWPLLLGAALQRLAALPDHLAGRIAERDSLSRWLASMMLALRERRLDQAGADIARLDDSALLRQLVLVLRREQAGLRRLDADFGLATLHGSDGRAWAPMEAVALARLSSLCGRAMPVWWAMSAGKVAQQLAVGALQSSELPLHDLVLLRRGWCEADELLLIAAGKGGLLLADAVGWRSAPLTDLVRVANEPGKFGNFGRQKLADRLLALPDARPWLLCMAGPQAPVLRALADRAISDCAQTFARSWGRFVSSSIGTPEWQGVIDAVQDQPGTYPLVFMYGLALLADGRTPVAPQGFGQAMLASLCVAVGDGAAPLSSSAGLPGPLPEQAAQAAALSLSTQRLLRHLLPAVLRWLELDPQATDGLVDEGPEPLLMALAAHPESPLPLLDRLRFSSRPVLQRAAWRQRLHRVSSLDDLRDLTLHLPPQVGLLPWRTRWLSLAADDALQRAVTLLACARRNGWWLRALHKHLGEPLWLDGLQGAITLLKGSAAREAAMLELVRAVGAELAPPLMAVFAAARRSAAPGHKLDASYTRSLRPKKSGGQRVILAPGRALKRVQRAVLDHLLLPLGSHACACGFVPGRSICDNAAPHVGQPVVVNADVSNCFPSVKWPLVLGALRRDLGHSLAPVAVSMLVDICTAEGGLPVGAPTSPTLLNRVLWRSDEVLAQAAEQRGLRYTRYADDLTFSGSDTAVQMLGVARRTLAQIGLALDPKKTNIFRRGRRQMVTGLVVNQQVSVPRHIRRRLRAAVHRVEQGGVAQWDGAEQSAAA

SEQ ID NO: 6815 - protein, 977 aa, unidentified
  source 1..977: note = Related to RFVU01000247.1; note = Betaproteobacteria bacterium
MLDVLKLLNAQQDRLRTTLTELDPLAPQFAETAWQAIAALAEPLWQPLRQMVDTERDVYVLQQAWAVCWKSRLHVALLYRAGMANPATREEALRLRGITLERWQKPLSPKDDVRQHDLVAFLMAADETEAGVPHLGRNAYYKGSIRLRYALAHAYRSGAALPALLHLASVQACVTAYQRRIEFSRVVQQGAIDGRMWRRLGATEYALLSLSAQELLVDAPATWPQVLLRPLNDGNFLQLAAQLTEERKRLNGLLSDLMHAIRMRHLGKADAILAQVPDTPLAHALSQRLKREPWGLDDAMTHPSMRPAFGPWVPMSKASLARLRPWAPQALPAWWGLSATEVAQAIGSGELVPQEPASAITRYITRQDLAPLQRTWTRDEQLTIIKAGAGNLLPMAAPAWDDVPLHELVPTLQAMRFGTHSILARRLAALPDASEWIALMADAPDADHARKLRELAQAAIDTCWHGNRISCWSEWIVSAWGCAGWDRVQQIALAHTTPLKAAVAMFASSRMPLLPGEFQAVLARSLHHAELLPPRPLPWIRRWLSYDPLAARALTLHAPLLWLERLARNVATPTQTLDALLACQYESVVRMAWRNRLKRVTRTEELAELAMRRPKGAGPAGSVYRWLQLPGADRNATLVLIHRHDVRRLRLLHEEWGSTTFDAACQSAQQQLISRADAGEPQARREAAMLELQTRLGLDFAEHMHQVLMLLTRDAPSGHKLDASYRSFEIPKRHSGMRRISAPHASVKAAQRIVLNAQPHVGQPVVVNADIRNCFPSVRWQLVLGTLRRELGRQLSPTAISLLTDLCTAQGALPVGAPTSPALLNLVLRRTDEVLSHAAQRVGAQYTRYADDLTFSGDHRAVGLLRLAKRTLGCIGLELDPRKTNVFRRGRRQMVTGLVVNDRVSVPRALRKRLRAVVHSAEQGIAPHWNGRACADDLSDVRGWLAFMGLLHAPQAARLRARLNAAAPLDQGVRDAY

SEQ ID NO: 6816 - protein, 461 aa, unidentified
  source 1..461: note = Related to RFZY01000240.1; note = Betaproteobacteria bacterium
RRWLSYDPLAARALTLHAPLLWLERLARNVATPTQTLDALLACQYESVVRMAWRNRLKRVTRTEELAELAMRRPKGAGPAGSVYRWLQLPGADRNATLVLIHRHDVRRLRLLHEEWGSTTFDAACQSAQQQLISRADAGEPQARREAAMLELQTRLGLDFAEHMHQVLMLLTRDAPSGHKLDASYRSFEIPKRHSGMRRISAPHASVKAAQRIVLDKLLQPLGAHLAACGFVPGRNIAHNAQPHVGQPVVVNADIRNCFPNVRWQLVLGTLRRELGRQLSPTAISLLTDLCTAQGALPVGAPTSPALLNLVLRRTDEVLSHAAQRVGAQYTRYADDLTFSGDHRAVGLLRLAKRTLGCIGLELDPRKTNVFRRGRRQMVTGLVVNDRVSVPRALRKRLRAVVHSAEQGIAPHWNGRACADDLSDVRGWLAFMGLLHAPQAALLRARLNAAAPLDQGVRDAY

SEQ ID NO: 6817 - protein, 498 aa, unidentified
  source 1..498: note = Related to JAJTGH010000210.1; note = Comamonadaceae bacterium
SFRQVVARSLHHIELLPPRPMLYIKRWIARDPASATALADHGPVHWVQRLVANTTTPLAALDALIASEGLPAPLRRLAWRNRIARTRDAQTLAELSARMPANTGHFDQLNQWMVQGTQASTAMALVLTARRDGPRLLQLHQRFGDEVFITACREAAQLLRQMAQDPTSGTRQSGRHDAAALELLGHLGAQAAPHLMPALALCRSQQPAGCKLDGAYAQHRIPKKNGTLRLIHAPHPALRKAQRLILDQLLAPLGAHPAVCGFVADRSIVHNALPHVGQAVVVNADIKNCFPSVRWPLVLGALRRELGHSLSPAALSLLVDLSTAGGALPVGAPTSPALLNLVLRGTDETLHSSAERAGLRYTRYADDLTFSGNSQAVGLLRLAERTLAQIGLTLDPAKTNVFRRGRRQMVTGLVVNNQVSVPRAARRRLRAAVHRVELKEQPHWNGQPQSMAALRGRLAFVSMVCKPQAQPLVDRLQRALAQDERPDSEPPSPQGSLA

SEQ ID NO: 6818 - protein, 821 aa, unidentified
  source 1..821: note = Related to JAJTFN010000084.1; note = Verrucomicrobium sp.
MALRPARGNLPLPTLEVLRPILLKSFGPQGGRRSFLNSIPRVSGLATCLEEGFLQGLSPLSRTEFDELPSAVRRWFLGCPALVSVGLDEGFRRDVASHPDSPEMVALEHWEQKVLPKALHAMRSGILSEADGFPAGFFRNPLALRQQEPIRQALRSRKHLFGPSADFLGQELPQAAIRRFDPRTRRLLQFHGARADQRLLGGPGDDLESLLQLVRDTTVGQLADAIHQCSSEGPLLDLVRLHPTEPAVREAMERVLGIPGLRWGLLRMLGRPVLQAAGEDALVSILRANPDVVTCCDVELANRPEFGRALVRCFRSRDGAARVLHRLPGRAVSALLSETHPVVGLGGEIAQAGARSRNRPTRCAILALLVRHAPRLIEGTYGWVIPAGIHQDVARRALYHRRHGGLGALFRFTDRKGRPHWQETVRKTGATPALRRVLRRDRPDLIPELHRWDALRALKTPGFRRRLVAFLEGDFEVDLGLAPAALRHLVPWVRKRWIRQPTVALAYEIALALSPRDARYLLALCTQRAGIGLMPPGGTAFDSLYRTVHIPKRSGGTRALQVPNPSLKRLQRRFLAHGFDAIPLHDAAHGFRKGRSILSNAGPHAGKPCVVNVDIEGFFPGTTYRNILRACSELADGALSPAARHVVADLCSYQGALPTGAPTSPAIGNIVLRAADAAISKAVHRFGVAYTRYADDLTFSGGTGCVGALRFVEKVLGELGYRLNAKKTNIFRRGRRQMVTGLVVNQAPHLPRRTRRLIRAAAHRAATGGEIQWNGRPMSRPELEGRIAFLKMVHPEEARELLGRLGGDGAPGGVPGGKGSA

SEQ ID NO: 6819 - protein, 1037 aa, unidentified
  source 1..1037: note = Related to DNQI01000253.1; note = Verrucomicrobiales bacterium
MGVDPKVDRAALALASSKMQVDVSAATLKLEDEAVSDVDEIHARLAEILISNGTNGRRLREEARDLARDRQRCWRGRAKSRGISVDGYARNLIASAPRHCLCELIFVYLDAEKASEEGFSKEVAEYLKRSRTRRSNLFRQLLETNRVPTSGALLRVLEFSAGKITPVLAGEAFEGKCPEKEIAPRLSALYQYARSPEEADAFCMKFGHAVFDREKFDSLSRKLKSRILSQKKLSRRLLTSDFRREIENDPLSHPDTPESLHLAATPKRNREAFRRIASGSWQHEEVEELILSGAVHQFASRIDKLLARKASWVEHSRSSGRYSWDAESGWKTNPFELVSSPTSKTVREAIEAIRPLALHDDLFILQLETLDERAKFLGDLPSGRRRRICQRLGEKPYLEILEKAVGLDRGLAEKLLRCREKSRETLREQFIPRRSSETAMIDLWLECFDSQEIFREFFKLKRLQGRWRTVLEYFVRAPYTHLGTWRQKEKRGTKGPLPSRFLNAVLESGGDWRTFQTVMTRLKAEDLARLVEHAPDRMLTWLTGISEGLSSGNRNQEFACFLDAMVPAIPKRLGDVLPREMSDTMFRTTLEKLAGPIRRGVLTPSGYRWLLNRNTRGGDPAWLELLEASRERNLSPSEDPALHVLASGILALGGRDRFRVLFEAYPTLYFGEALERLDLWTVVRQTFDHPSLARWLERKTERSKLVVLIPKVRREYRSRPTVAAALEVALRFSLSDARYLKWLALKRWQARPCAEGTAFDDLYRTHRLPKRAGGSRVITAPEPRLKRLQRRLLRNGFDELPQHSASHGFRQGRSIVSNAVAHTGREMVVRADITSFFPSTGYAHVLRSCRLLADGQLSEGAVRLVAEVCCYAGALPTGAPTSPVIGNLVLKPVDASLEAASKKLGIIYTRYADDLAFSGDDGTQKILPFVRKVLSDYGYQSDPKKEHIFRRGRRQVVTGLVVNEKAHVPRRIRRRLRAAVHHASHGKNPHWHGHKMNETELLGRLAFLQQAHPEEASELRTQLQQREHQRDRKGQEE

SEQ ID NO: 6820 - protein, 305 aa, unidentified
  source 1..305: note = Related to RFON01000065.1; note = Planctomycetes bacterium
MSDLREMDHLRAIAWAGRGATNLQAGCLLDSRYRTYELPKRSGGVRIITAPDPRLKRLQRRLLVGAFEAVPLHDAVHGFRSGRSIATNAARHVGQRLVVNVDIAGFFPNTKFQQVLSACKRVDGGRLSPYAARLLAEICCYAGALPTGAPTSPAVANIVLRPADTAIANAAATHGISYTRYADDLTFSGEGDAKRIIPFVRRVLAQAGYRLDQRKTQLYRRGRQQLVTNLVVNERVNLRRSDRRRLRAAVHHRCVGRPAEWHGRAMDDHALEGRIALLAMVDRKEADLLLARLRSQASGWRSRDA

SEQ ID NO: 6821 - protein, 940 aa, unidentified
  source 1..940: note = Related to JABITJ010000441.1; note = Gammaproteobacteria bacterium
MSSRFSLPSLLLSSNEDSYFAFLRALPVEQNLTSQDILALCKKLDWRSLDSASKCQALLTQLVKDSSADFEELAHDIDISSQSFWRNLLACSEASTRPGLQFLIEANEAWGNEVLGSNQAKIMDDLPANKIVNALMTLLVDPARLTSTQLGLIAPRQRAACLHHYLRQRVPAARKKKNLELLPIFRSARKIYGPEANPRVVLLAVQRALIRQSLSAKKIGKREFLMLDDGLQSALTASPVLLDRFVASQYRHVLISMRRQIVRVKKLPILDLTHTIQSLESGNLSNKLIPALEFWRFVRPDFSKLVVNSLLKIADTSEITQSTALAQWCGTTSYDMSIGFLSVLSAFAPLEKFLSYPDRTRRDIAYKMNAKLLLLVLRAGPVPEIGHVAKLAAKKPGILRAWLTEWDRWQKDEDISYGMSLMSEIIANSRQVDVHWRVLERQIASLPLSTLSIFLSSDNSKFHNGTRNQSRLIKLMLQSWRRGQKHDNAQRLLKICRRHGRTILEVAGDSLTAMEIRCIAGSKYLGELRKIIASRSQKIPGWRQFVTVSLLKAERAPYLLNRIIEGNPHLVAEAFHVRPDLVRWKDVELVDPNDLVHAATHSKKFARKLDLRLTDRRRRSLLPVIRALYGNKPRSCAAYELAMLTELKLSRTFVSLALMLAHANQVPEGNTFNAFYKTYKLPKKSGGSRTITAPSTMLKAVQRGLLKKAIAPMDNSPSATGFRKGSSIVKNAQEHVNQKIVVNVDITAFFPNTRYSLIRQVAAQAVDGHLSPIAQWLLAEICSYQGALPTGAPTSPAVGNIVLKRADATIAKAAEHRRIKYTRYADDLTFSGEDGVVDILPLVVRTLGAWGYELDNKKTNIFRRGRRQIVTGLVVNEKPNMAKPLRRRLRSAVHRRLSGRQPSWHGKPMSDSELLGRIAFLAQTQPAEAKKLRDQLEAVQ

SEQ ID NO: 6822 - protein, 1327 aa, unidentified
  source 1..1327: note = Related to QWPT01000007.1; note = Planctomycetes bacterium
MLVVVEVAKWRTQKEANMLNGYRRPNSMASQQGEQCIQSVPFCSTLPNITSGLKHWEMDCVRPSTYFKSIALQLWTELQIDKNFAKELQRNHRSANGLQCVRYLHATAKSDADRALTWLFATHLLPSWKLPQPMLPMLLAQLQREYKDVALVQAIMRMADQSVKAGEAGRAFDHELDHEFDHAPEALVFVDSADAHLFLEAANKKCSADAPLWMCLSTCVRPDRNAANGACACPCHALEPLSQLRRLYSLLARAHRRVPQGKNAFELETLLSVTDLSTPNPTAHGPVDLRQTSHVAHNRIDRFGLDFIINQLPFGSVIAGPLRRAMLDTVFLGEFAPFLDSIANEAPPAGRMRQLTDRQISHAHSLRVRHRNEWDSAIGATLDLVTARSTDAIPADSNAIQEDCWNHLRIVDAILHEANPRRRIGEYLRRIVAREGPALQPDAATKCQPTEPLLEAMELIGRALILRELRSTVGGPKPLTSTSTMGLLGRFAMPSESISNSLKLNLPDPPIAATPSAPEGPWYRRQANDPKHTNLDSIKHCLRCLYGCRSDAIMLSIASVFDGPTKAVAMATSGNWLKPGALARWMRTSSIPSSNRFDFVRQLTLTHGDKLDKLLPMFARERTWDDHRPLFKGQQRPTNATEQWLVQSIELPPKSLALLSPRARKAYLANFIRRYGDLATKFLAPNFQSRIQREKNGQLDFAGNALGTVACAVNELPWRTVRAALPLHVIETVISESKFGAARVPASVPPSVPPSVPLADVKKLFSYHGESALVVWARAWHRIVSSAATTQSGKARATKALIRNISKGKFNLQCFCELASQPPSASKSKKRFVSDFATTILAIPAIVQALVSQSKSLDQTWFLLQNSRGHALADLPRSQLENFVLSIDSDLRDISDGPPGDSPADAKKLNRPYRKALRSPLNFVAQFVDVIARRLCTVSASDDAAITAQKIDLARLLLRVIATRELRAPASVETIELLTQRLSTRRDAQLTRKAAQGRCKPLKEPAEETTVLAVALELAKQGLADEFQQVLMITRTASLDDRYRAHRIPKKRGGMREIHQPDADLMRLQRKVLARFLARAPISEHAHGFVRGRGILTNALEHTGKRVVLNVDIRNFFGSLPIEHIRAALNQTRLRSQVPKTENQGWAVRDRESLSPAALDVLVKIVTRAGSLPQGAPTSPAITNIALRHTDGILAKACRRIGVSYTRYADDLTFSGADGPVQGIVPFVRELLTRIGLELHPDKTHVYRSGRQQLVTGLVVNSWPNLPRRDRRRMRAAAHRLGTTGKALRWKGSPMSLAGFQGRLSLLNMVDESRADSLRLLAKMEPR

SEQ ID NO: 6823 - protein, 321 aa, unidentified
  source 1..321: note = Related to PBOU01000026.1; note = Planctomycetaceae bacterium
MPTALTPPTLPDSXRPLAAEAGSKYHVYPLVSGKRVKKTRWIEAPDTELKAAQRWLLDNRLYHLAPTSFAHGFVPGRSILTNASHHVGRRWVVTTDIRNFFPSITASRVNDCLAGLDLXTEDRRTVVQLVTRRGRLPQGAPTSPHLANLVARTLDLRLAGLAQSHGWTYTRYADDLTFSAGSPDAPDSHRDLLPPRELLWIIKRIVTDEHFQLADDKTHVMPHHQRQTVTGLVVNQRVSLPKPRRRILRAMLHRLDTSGPEALDLHQLQVAQGHLALARLIDPGGYEQACRDLSXLIRQAIHPEPTSCKXESGTDFATTID

SEQ ID NO: 6824 - protein, 317 aa, unidentified
  source 1..317: note = Related to PBOJ01000102.1; note = Planctomycetaceae bacterium
MSTITSFTLPTSLQALAPGVGKRYHVYPLVSGNNKKKKRWIEAPDSELKAAQRWLLDNWLYHLPPTGFAHGFVPGRSILTNAAEHVGRRWVVTADVRDFFPSITAGRIATCLAELELDAADRSTVVQLVTRRGRLPQGAPTSPHLANLVARTLDLRLSGLARQHDWTYTRYADDLTFSAGSPTSPDTGMPPHELLWAIERIVSDEDFQLAADKTHVMPHHQRQTVTGLVVNQRVALPKPRRRTLRAMLHRLETSGPETLDLRQLQVAQGHLALSKLIDPDGYDLACRHLGELIRNSVAGSALGTAVDSGSTATTRLD

SEQ ID NO: 6825 - protein, 345 aa, unidentified
  source 1..345: note = Related to PADE01000125.1; note = Planctomycetaceae bacterium
MSTRAQRAHPGPLFLLRDRTDPRCHRRALIDAHRKHRPNPLTTTLTSLPDSLLALAGDTERRYQVYPLVNGSKRRWIEAPDRELKAAQRWLLDHWLYQLAPTDAAHGFVRGRSIVSNAGHHVGRDWVVTADLSNFFPSIGADRVSQVIAGLDLNANASDAVVRLVTRRRRLPQGAPTSPHLANLVARRLDLRLIGWARRGGWNYTRYADDLTFSGEGNPRTLLLTVERIVQDEGFTLAPGKTHVMPRHQRQLVTGMVVNERVTLPKPRRRLLRAMLHRLQTTGADAVDPGQLQIAQGHLALAHFVDPERFQAECRALADLLRGEASPQADTPNPTVCTPIDKKVD

SEQ ID NO: 6826 - protein, 312 aa, unidentified
  source 1..312: note = Related to DLVN01000025.1; note = Planctomycetaceae bacterium
MPTEYMSDFMPTTLPCPPAAVLALADSAEQRYRVYPLMSGSKRRWIEAPDQELKTAQRWLLDQWLYQLAPTDAAHGFVPGRSIVSNAARHVGCAWVVTADLRNFFPSIGASRVAQVLTEFEQPADVTAALVRLVTRRQRLPQGAPTSPQLANLVARRLDLRLLGWARRSGWNYTRYADDLTFSGAGNPRPLLEALKQIVRDEGFTLAPGKTHMMSHHQRQVVTGMVVNERVALPKPHRRLLRAMLYRLETMGVDKVDPQQLQVVQGHLALAHFVDPARFEAECRALATLLREASSSLPATASSSFVPAVTKT

SEQ ID NO: 6827 - protein, 307 aa, unidentified
  source 1..307: note = Related to JABJEN010000114.1; note = Planctomycetaceae bacterium
MNRSAFDPGVNETSGDLIDLVESLNVPLQRLSEIAATANERYDVYPLVIGKKKRWIEAPRDKLKQLQRRLLDSVFYRLVPHESAHGFVRGRSIVSNARRHCGRRWVVTMDIRDFFPSIGAERVNRQLLSLPMTDAEREIVVKLVTRNARLPQGAPTSPHLANLVSRRLDIRLRRLADEAGWTYTRYADDLAFSGEGRPKQLIRIVEQIIQDEGFQPARQKTRVMSRHQRQIVTGLIVNEKVALPRPKRRLLRAMLHRLRSTNEPLSSLPDIRVIHGHLALATFIDPDGYRETCNQVAQLIEGRCSFV

SEQ ID NO: 6828 - protein, 307 aa, unidentified
  source 1..307: note = Related to JADHUC010000127.1; note = Pirellulaceae bacterium
MGNALSESENGRTAGDSIRLAEILSAPPERLNEILASADELYRVYPLIKGRKKRWIEAPRSELKRLQRRLLDSVLYRLVTDESAHGFVRGRSIVTNARRHCGRAWVVTMDIRDFFPSIGAERVDRQLVSLPMTEVERENLVRLVVRNGRLPQGAPTSPHLANLVSRRLDLRLKRLAETTGWTYTRYADDLTFSGEGKPGKLVQIVENIIVDEGFQPACRKTRVMSRHQRQVVTGLVVNDKVALPRPKRRLLRAMLHHLSSANQDSVCLPDIHVIHGHLALAALVDPDGYRLTCRQVAQLVENRYDDA

SEQ ID NO: 6829 - protein, 354 aa, unidentified
  source 1..354: note = Related to PBMI01000048.1; note = Opitutae bacterium
MTKANLPTNGCDDLANLLDLDPNRLTQLAGEAVNLYERFPLKTRRRRPRWIEAPKPFLKLVQRRLLDRLLYATPPHSAAHGFYPELSILTNARIHVGSAWVVSYDLEDFFPTTDLDKVRSVLNKRYDVEEGVLESIIRLTCRNGNLPQGAPTSPHLANLAFYQGDELLSELAKQHDLGYTRYADDMTFSGKELPAELDDEVRQIVHRVGYRLAEKKTKRMGRHQCQKVTGLVVNEGVRLPRKQRRRLRAIRNDIAMMGMESALARSGYGSVCQLQGHLAFERMTNKSNGVSRGLQNLRPKNALAGQPPVEPEDKDGGLPPPSCPSVRRRQSADHGGTPQQMPDSELESTVQTVG

SEQ ID NO: 6830 - protein, 306 aa, unidentified
  source 1..306: note = Related to JABJCN010000134.1; note = Opitutae bacterium
MRTTETHSVIVQDMDIYPEADAVPPPLTSADLAKSLHLSEERLVSLLSSAEKSYNRFPLKCGRRRPRWIEAPNPFLKHVQRCLLDKILYTVVPHPSAHGFQPGRSIVSNARMHSCREWVLSMDMKDFFPTTDIHMVEKMLQEHFNFTQETIEAILRLTCRRNALPQGAPTSPHLANLVFMEGDRRLTAMAIEHGMTYTRYADDMTFSGDTLPEDIEEQVELIAQEAGYRISRHKTRRMGQHQCQKVTGLVVNEGVRLPRGKRRRLRAILNDVRKNGMDAALARSGFRSADELSGHLALARMVGTVQ

SEQ ID NO: 6831 - protein, 312 aa, unidentified
  source 1..312: note = Related to PBMT01000070.1; note = Proteobacteria bacterium
MLKDLQHPLELSTAELQPFASRIGFPTDVLFDILSKKEDQYYRFPISKRNGKNRWIEAPKNELKSIQKQLLLQILYEQKAHSAAHGFVPNRSILTNAKPHVGQNWVVNFDISNFFSSTQIHLIHKVLQTYPTLSKREQHIIFTLISKDNTLPQGAPTSPHIANLVLYDFDHFISDYAQKHQLAYTRYADDLTFSGDQIPKELPLIVKKRLKEDGYHLAQHKTSWTGKHKRQLVTGLVVNDKINLPRPMRRQMRAIIHSIKTNGSIKAFATSSWSSDQLYGRIALQAMWDSEAAEKQLRELLGAQELDWTAYI

SEQ ID NO: 6832 - protein, 391 aa, unidentified
  source 1..391: note = Related to BK058704.1; note = Siphoviridae sp.
MPVIDKVDEFKMMFNGVKDPVGIFDFCGVNAERALTEKSKDAELVEKLNQFLDGQFFTSHSIDRLARVVGEGTDIIRLAKVGYRGSIYMLNESVDQFAELSEAIGFPKEIIQQYVSDTASHYSRFFIWKDEAKTKKRWIEAPDDTLKQMQEAILRNILYKIAPTKFAHGFICGRSIVTCAKAHTGKKFVLKLDLKNFFPSITREMLLGAMAPYINESNFKFVLPAMELCLMEGRLPQGAPTSPAASNIVARQLDLLMYGISSQFGCEYTRYADDLIFSSNERDIYTMIPIIKKAIAKFGLVVNEKKVKVLKSHQRQTVTGLVVNSDGQTSVARRKRMKLRAFIHHILTGRYPLDRVNFARLKGNITFIAMANPNQGRWFLEKWDEIQAMRG

SEQ ID NO: 6833 - protein, 308 aa, unidentified
  source 1..308: note = Related to JAHJLU010000432.1; note = Myxococcota bacterium
MFGWWRRRKERRQLTEKLLFINRNIAPHYHSFPLKKATGGYRTIEAPVEELKEAQRLILKRYYYGLECSTAAHGFVRGRSITTCARHHCDRLVVVAVDIKDFFPSITRDMVEKITRDMVPELAKNKELFDLVLGAITSNDALPQGSPASPTLSNLVFNGIDNQLVSLACAFKARYSRYADDLFFSSRYNRNLPGIISSVERILNAHGFSINRKKVRVMRRGQRQVVAGLIVNGKTPAVGREQLRSLRAAIHLLEKELQGAGPQSPSVAKLMESIQGKISFFHMVNPQSVRRLARTFKAICRQQAARSS

SEQ ID NO: 6834 - protein, 308 aa, unidentified
  source 1..308: note = Related to JACPTZ010000105.1; note = Planctomycetes bacterium
MVDLLPLLVKEGAMEESRYRMYRIRKANRRFRTIMEPDPALKSLQRSILRWLMARRIRASKYAHGFVKGRSTTTNAALHVGKRVVVRIDIQDFFPTITERQVKYALTREGLLSDDAARIADLCTVEGKLPQGAPTSPFLSNMIFRVLDYRLAGLAKKWGATYSRYADDLIFSSDRDDLQAIYHPVASILEEDGFEVNPDKFRVYRSTRRQRVTGIVVNHHPTLPRESRRRLRAALHHVRRSIVTGEEVPAERLDSIEGSAAYLTGIDRERGRRLLVEVRDLKALLALRTRMVSRRRPRRTSGIAAAPS

SEQ ID NO: 6835 - protein, 320 aa, Proteus sp.
  source 1..320: note = Related to JAEHOZ010000020.1; note = Proteus mirabilis
MNAAPLLVSFYTLSKFLDALPEKHRNSYQRQIENLFAQSLPPCVSEICLAVLFGYSVDFVYALSKNQHKFYRSFQIRQGRKTRTIHSPRVALKVVQKWLGVHLSDAITFEPHVCGFVKGKSFADAAKIHQGAKWVYSVDIENFFPSITILQISNALEKLGYTKESAELLANICSLNSTLAQGSPASPVISNIVMKDIDLQLKELADKYELQVSRYADDIVFSGTEPFNEGIPKDLNTLFNSTSFTLNKNKTYFSDSEKGQRLKVHGLLVKKDKIRLTKGYRNKIRAFRHMLEKEKVSENDLQRLKGHLTFAEFIERKNQV

SEQ ID NO: 6836 - protein, 320 aa, unidentified
  source 1..320: note = Related to NZ_ML064597.1; note = Parashewanella spongiae
MNAAPLLVSFDTLKKFLDALPEKHRKSYQQQIEKLFTQSLPPSVSETCLAVLFGYSVDFVYALSKKQHKFYRSFKIKQGKKVRIIHSPRVALKVVQKWLGTHLSNAISFEPHVCGFVKGKSFADAAKIHQGARWVYSVDIENFFPSITVVQISGALEKLGYSEESAKFLANICSLNGTLAQGSPASPVISNIIMKDIDQRLIELAEKYVLKVSRYADDIVFSGKEPFSTDIPNELSSIFGLTPFLLNKNKAYFADSQKGQRLKVHGLLVKEDKILLTKGYRNKIRAFRHMVAQGKVSEGDLPRLKGHLTFAEFIERNNQV

SEQ ID NO: 6837 - protein, 320 aa, unidentified
  source 1..320: note = Related to SIHM01000015.1; note = Alteromonas sp.
MNAAPLLVSFNSFNKFLEALPVNHRTACKQELEEIYGKSLPIGISEVCIAVLFGYSLDFVYALSKKQHKFYRSFQIKQGKKTRTIHSPRVALKVVQKWLGAHLSSALVFEDHVYGFVKGKSFVDAAKSHQGAKWVYSVDIENFFSSITDLQISEAFKELGYSHGSATLLSNICSLNSKLAQGSPASPVISNLVMKDVDAGLKAMANKYGLQVSRYADDIVLSGKAEFKSEIAGELHSIFEATTFSLNTDKTYFADAEKGQRLKIHGLLVKEDTVILTKGYRNKIRAFRHMVEQGKVSADDLPRLKGHLKFAEYVQRQNDT

SEQ ID NO: 6838 - protein, 372 aa, unidentified
  source 1..372: note = Related to VFRR01000008.1; note = Maribrevibacterium harenarium
MQKRSGEELSRGCASCPFAKARHRNTDGQTSIRASPGWTFVHRCKFFEKYSVMNAAPLLVSFNSLSKFLDALPEKHRENNGDQIESLVDKSLPPVVSETCLAVLFGYSLDFVYALSKKQHKFYRSFKIQQGKKVRTIHSPRVALKVVQKWFGAHLSNAVSFESHVCGFVKGKSFADAAKIHQGAKWVYSVDIEDFFPSISTFQISNALESVGYSKDAAQLLADISSLNFKLAQGSPASPVLSNIVMKDIDKQLKELANQYDLQVTRYADDIVFSGKGVFQEALPTELEAIFEGTTFSLNKNKTYFADSEKGQRLKIHGLLVKEDKITLTKGYRNKIRAFRHMVEQGKVSEDDLPRLKGHLRFAEFIASKNEN

SEQ ID NO: 6839 - protein, 321 aa, Vibrio sp.
  source 1..321: note = Related to NZ_CP025796.1; note = Vibrio owensii
MNAAPLLVSFNSMDKFIESFPRSQVEKYRQNIQFLYENSLPPAVSAPCLAVLFGYSTDFVYALSKNQYKFYRTFQIKHGKKLRTIHSPRVALKVVQKWLGYHLSSAISFDSHVCGFIKGRSFVDAAKMHEGAKWVYSVDIADFFPSVSSEQVTEALVSIGYFSESAELIANLCSLDEVLPQGSPASPVLSNLVMKDMDKELLHLADKHGLKVTRYADDIVFSGRDNFIEELPEALDSIFEQSTFSLNRDKTFFADAEKGQRLKVHGLLVKDDQVTLTKGYRNKIRAFRYMLDQGKVSEEDIPRLQGHLKFFEFINEKNKND

SEQ ID NO: 6840 - protein, 321 aa, Vibrio sp.
  source 1..321: note = Related to RDPS01000003.1; note = Vibrio anguillarum
MNAAPLLVSFNSMNKLIESLPLSQVEKYQQNIQFLYEKSLPPVVSVPCLAVLFGYSTDFVYALSKSQYKFYRSFQINHGKKLRTIHSPRVALKVVQKWLGHHLSGAISFDSHVCGFVKGRSFVDAAKVHEGAKWVYSVDIVDFFSSISKQQVSEALVNIGYLPESSELIANLCTLDNVLPQGSPASPVLSNLVMKDIDRHLQYLADKYGLKVSRYADDIVFSGTDAFSDELPLDLEALFEPTAFSLNRDKTFFADADKGQRLKVHGLLVKDDKVTLTKGYRNKIRAFRHMLEQGKVCEEDMPRLQGHLKFFEFIESKNINQ

SEQ ID NO: 6841 - protein, 339 aa, unidentified
  source 1..339: note = Related to PGZF01000003.1; note = Gammaproteobacteria bacterium HGW-Gammaproteobacteria-15
MDACPSSKLIYEICVMNAAPLLVSFDSIDKYLEALPEKHRTAHSAALSDLFSRGIPPITSAYCLAILFGYSLEFIYAMTKRPDKFYRVFSIKNGKKTRRIQAPKVALKVIQKWFGAHLSNNLTFHPHVYGFVKGRSFVDAAKHHIGARWVLAVDIDNFFPSISKERVLLSLIAQGYSNDASKLISDLCCLNDSLAQGSPASPVLSNLCMQSIDDSLIKLSEKYKVTVTRYADDITFSGIGEFDEGLKRDLQELIKSSGFQLNDDKTYFADSTTGKRLKVHGLLVKEDSVRLTKGYRNKIRLYKHLQKSGRISEDDYHRINGHINFADFIDSMSGIKDAI

SEQ ID NO: 6842 - protein, 321 aa, Acinetobacter sp.
  source 1..321: note = Related to JAEDYI010000001.1; note = Acinetobacter bereziniae
MNAPPLLVSFASIDKYLEALPPQYKTQYEDEIKRLYTNGFPPIVSKLCLGVLFGYSSDFIYILAKKPSKFYRSFTLKQGKKTRKIFAPKVGLKVIQKWFATHLSNVIEFHPHVLGFVKGKSFADAAQLHIGARWIFSVDIVDFFPSISKEAVIEALIQTQYYTSKAAELISDLCCLNDALAQGSPASPVLSNIVMKPFDEKLLELSKKYNIVVSRYADDIVFSGKDEFDTNLHKDLNELFAESCFTLNSQKQYFADRNKGQRLKVHGLLVKDENIALTKGYRNKLRAYKHMLNTGKVSEKDVERLVGHVKFSEFIESKNVN

SEQ ID NO: 6843 - protein, 318 aa, unidentified
  source 1..318: note = Related to JACBJC010000018.1; note = Serratia fonticola
MNAAPLLVSFLKVETYIRALPIKQSEQYKDEIITLVEKKLPPVVSPYCLAVLFGYSLEFVHALSKNQHKFYRRFEIRQGRKTRKIDAPKVALKVIQKWFGFHLSSALEFEPHVFGFVKGLSSAKAAKLHVGARWVYSVDILNFFPSISQIKIKEALIKEGYTDNGASLLIGLCCLDGALAQGSPASPVLSNIFMRDIDKKLSELARKYLITMTRYADDIVFSGRDNFPQKLKDEVSQLIIEAGLVLNENKQYFASVDKGQRLKVHGLLVKEEAVRLTKGYRNKIRAYNHMLANGKISEKDIPRVLGHLKYAKFIDNLN

SEQ ID NO: 6844 - protein, 316 aa, unidentified
  source 1..316: note = Related to NZ_WRPA01000017.1; note = Shewanella insulae
MKAAPLLISFHELGSYIEALPESQKRRYADEISKLAEAKLPPVVSPYCLAILFGYSREFIHAMSKQQHKFYRTFTIHKGRKRRTIQAPKVALKVIQKWIGYHLCQAIQRPEHVFGFIPGCSAKMAAEQHCNALWVYSIDIKDFFPSISDELVESALQELGYSEMGSKLITSLCCFNGVLAQGSPASPTLSNLIMIKVDDDLRKLSEELNISVTRYADDIVFSGKNEFPEGLGGQISNIFQDAGLELNEEKEYFADSRKGQRLKVHGLLVNSDKPRLPKGYRNKVRAYKHLLNSGKVSEGDLKRLLGHVNYANSIES

SEQ ID NO: 6845 - protein, 320 aa, unidentified
  source 1..320: note = Related to nan
MIAPPLLVSFSDINSYVNSLSEENQALHENNIRSLFDQNLPPIGSISTLSTMFGFSPRFVAMLLSDVSKQYRTFEIRKGKKKRKIQAPKVGLKVIQKWFGHHLSGALVLDDGVYGFVPNRSAIDAASKHCTASWVYSFDIKDFFPSTTRETVLSALVELGYVEESAELISQLCCLDNKLPQGAPSSPALSNLVMRRIDTELARFADENNLTYTRYADDIVLSGKEECPESLSEAVRSAFKDTDWELNPNKEYYADVRKGQRLKVHGLLVMGEKPILTKGYRNKLRAYNYMIENGKAKEKDLPRLKGHIEYARLVDRWNNG

SEQ ID NO: 6846 - protein, 320 aa, unidentified
  source 1..320: note = Related to NZ_KB893650.1; note = Kangiella aquimarina
MNAPPLLVSYSTVESYLSALSQDSVSSYQKEINDLVARGLPPVVNTKLLGLLFGLSNKFITSLLIDKKRHYRNFNLRKKGKVRTINAPKMSLKVIQKWFGSHLASSIDYASYVYGFIPGRKALDAAKVHCGSRWVYSIDIEDFFPSTPSELVYESLKSLGYTELGSKIITEICTLDGYLPQGAPSSPALSNLVAKNLDRHLYKLSTDLGVKYTRYADDIVFSGAEDFPKNLPEIIIEIFADTPWSLSERKNYFADTLLGHRLKVHGLLVKEDAVRLTKGYRNKIRAYKHLLEQGKIKDSDLQRIKGHLTYAKLIDNDSEL

SEQ ID NO: 6847 - protein, 327 aa, unidentified
  source 1..327: note = Related to JAFEDC010000007.1; note = Proteobacteria bacterium
MIAPPLLVSYSSLNEYLEALGPELSYQYKTEITQLFEKRLPIVVSFRCLSVLFGFSTNFVYKLAQQNWKFYRTFTIRKGKKKRTIQAPKVALKVIQKWFGYHLSEVLSFDKYVHGFVPGRSAIGAANVHTNARWVYSVDIENFFPTTTKKVIKESLISIGYSFEAADLIANICCYKDTLAQGAPSSPVISNLVLKELDKQLKTIADSNQIRFTRYADDIVFSGIDKFPTEIKDQISDLFKETCWKLSPEKEYLAESPMRLKVHGFLVHGEKARLTKGYRNRIRAYKHLLNAGKIRNEDLGRIVGHVKYAESVIKAQKPGLCPDSAHS

SEQ ID NO: 6848 - protein, 317 aa, unidentified
  source 1..317: note = Related to JAFIUX010000008.1; note = Nitrospira sp.
MLAPPLLVSYTSPEDYLIALDPGLRRLHQSKIKRLLEQGLPPVVSSRCLGVLFGYSTKFINAMAQQNWKYYRSFTIRKGKKKRKIQAPKVALKVIQKWFGHHLSESLSFDDHVFGFVPGKSAPFAAKQHTNARWVYSVDISNFFPSTPKDVISTTLVDIGYSEKAAKLMSGLLCHRDYLAQGSPASPILSNLVFRELDKQLKEIAGNNRIRFTRYADDIVFSGVDQFPENIKEQVNNLFADSCWVLSKEKEYFSEIPKRLKVHGLLVHRDRPRLTKGYRNRIRAYKYLLETGQIEKRDLSRIMGHLNYAKSIDTQEK

SEQ ID NO: 6849 - protein, 317 aa, unidentified
  source 1..317: note = Related to PGFZ01000010.1; note = Methylovulum psychrotolerans
MKAPPLLVSYSSIDDYLSAISPEDREQYEKQIRSLVCKGLPPVVSSQCLANLFGYTNTFVHSMASKNWKYYRGFSIRKGKKKRYIQAPKVALKVIQKWLGFHLAKSINYNDFVYGFVEGKSAIDAAACHTNATWVYSVDIKDFFPSTSKETLISNLESLGYSRKASALIASLCCYEDYLAQGSPSSPVLSNLVMRDIDLELYKISMIHGVRLTRYADDIVFSGQSEFPESLKREVKSLFVDTCWSLSEQKEYFAQIPKRLKVHGLLVHQNSPRLTKGYRNKIRAFRHLLEAHKVHEKDIKRLTGHIKYAESVDRHKN

SEQ ID NO: 6850 - protein, 319 aa, unidentified
  source 1..319: note = Related to VENC01000012.1; note = Marinobacter adhaerens
MIAAPLLVSYNSLEDYLSCLSSEMREEHEQQIRWLVDQKLPPVVSSRCLSVLFGYSAKFVNAMALNNYNYYREFTIRKGNKRRKIQAPRVAIKGIQKWFGHHLSEVLPVEDYVYGFIPGRSAVDAAAQHCGASWVYSVDIENFFPSTTDDVVIKALMEIGYSEKGARLITRLCCYGDRLGQGAPSSPVLSNLVMKPIDIQLKNIAENLGVKLTRYADDIVFSGQGKSPVELRDRVLDVFKDTCWDLAENKEYFSNSDLGQRLKVHGLLVNGEKPRLTKGYRNRVRAYRHLLENNRVKPEDKRRLIGHIKFAESVESWKE

SEQ ID NO: 6851 - protein, 319 aa, unidentified
  source 1..319: note = Related to CP064972.1; note = Holophagales bacterium
MKPPPFFVSFRTAADYRAALGDGVAELYWPDIGHLGERRLPPVVSVRALACLFGVSSKFVGALRRNPERYYRSFVIRTGRKKRQIHSPKVGLKVFQKWFGTHLAAALEFDPWVFGFVPGRSAPMAARVHARARWIYSVDLADFFPSVSRTRVVGALQGLGYPGHGAELAASLCCYGEGLAQGSPASPVLSNLVFREQDQQLHELAREFGARLTRYADDIVFSGQAAVPAGLPDRVKAVVTAGGWDLNDAKEELAESPIRLKVHGLVVHGDRPRLTKGYRNRIRALRHLSAVGKVRSEDAARVAGHLRYADSIDRLSEEE

SEQ ID NO: 6852 - protein, 322 aa, unidentified
  source 1..322: note = Related to JAGQSE010000087.1; note = Acidobacteria bacterium
MNTPPLLVVFPGLESLGAALARDTHRIYWSDVERLVERGLPPAVSVRVVACLFGFSARLVGAIQRSPERYYRIFKIPKGKSSRQIEAPRVALKVIQKWFGSHLAAACPLDDCVYGFVPGRSAPLAAKQHCGASWVYSLDIRDFFPSVSSGMVSEALRLKGYPDHAASLMAKLCCYEGRLAQGSPASPALSNLVFAPVDQLLAEIARANACTYTRYADDITFSGRTEVPARLQEEVRKALQEGGWQIAGHKEHLARAPRRLKVHGLLVNGRFPRLTKGYRNRLRALEHLLGQGRLDEAKEMEVRGHLAYARSVESLQKSSDGG

SEQ ID NO: 6853 - protein, 323 aa, unidentified
  source 1..323: note = Related to JADFXO010000295.1; note = Nitrospirae bacterium
MRTPPFLLSFSSLEEYLRALSDSDRAEKGSEINNLVAQQLPPVVSKKCLATLFGFSNSFIDTLHRRTERYYRIFEIPKGKKKRIIQAPRVALKVIQKWFAHYLANSLNLHEAVFGFVKGRSAVQGAALHCGAHWIYSVDIEDFFPTTSIDKVISSLTNLGYGYPGAALIAKLCCYEGNLAQGSPASPVLSNLVFREIDEELFTLSKQNGICYTRYADDIVFSGINSFPDHIREEVISIIQARGWKLSIKKIHLAKRPYRLKVYGLLIHGERPRLTKGYRNRIRAFKHLFADGKIPEDEISKIRGHLSYAHSIEEFEMMPKDDL

SEQ ID NO: 6854 - protein, 319 aa, unidentified
  source 1..319: note = Related to JAHJTB010000218.1; note = Proteobacteria bacterium
MNAPPLLVSFSSTMEYREALSHELRGLYWETIEKLISKKLPPVVSIRCLSILFGYSPRFLGAMYQFTERYYRTFTIKAGKKKRTINAPKVALKVIQKWLGYHLGESLSFCDHVYGFIKGKSAIQGAYVHCGASWIYSVDIENFFQTTNIEKVKSALNGIGFQERGSEVISKLCCYSGNLAQGSPASPILSNLVFTNTDNDLARLANKNGLLYSRYADDIVFSGKEDVPADLSNDVKSIITRSGWKISEKKEYLAKRPHRLKVYGLLVNGDYPRLTKGYRNRIRAFKHLVENEKIADENKKRLLGHLAYAKSIDNFSNKY

SEQ ID NO: 6855 - protein, 322 aa, Pseudomonas fluorescens
  source 1..322: note = Related to QFOU01000006.1
MQSPPLLVSYPELEDFIKALPNDYAADTKQVLRHLHSLSLPSVTSITSLAVLFGFSPRILASMTNQPEKFYRVFRIHKGKGKYRTIQAPKVALKVIQKWLSHHISEAITYPKYVHGFVPGRSHITAAQAHVGANWVYSIDIENFFPTTSESKVEAALRGIGYSESGSKLISKLCCYTKNLSQGSPASPVLSNLVFKDLDSRIAELSSQIGVNYTRYADDLVFSGQGEFPEALLPVKAWISEAGWSVSKDKEHFAQLPKQRLKVHGLLVHESSPILTKGYRKKIRTYKFLHENNRIREDDKNRILGHLSYAKLVDSFSNQTEE

SEQ ID NO: 6856 - protein, 325 aa, Citrobacter sp.
  source 1..325: note = Related to NZ_LT556085.1; note = Citrobacter amalonaticus
MKTPLPLFFTFADAEQLLKALSKPLRDRYSAELLRLQQLGLPPLVSWSILSVAIGVSPQFITSILKNKSKYYRVFPISKGKGKKKRIIEAPKVSLKIIQSWFAYHISLNGNITLSKSAFAFIPGKNGIYEAASVHCGAKWIMSIDLRDFFHTITSEAVVLALTEIGYREDQASKLSDLLTLNQRLPQGAPSSPVISNLVFSKTDFKINELIADLNVKYTRYADDLTFSSEDESFDINSLKERIVQILVSDNWIVADEKLKIAKAPNRLKVHGFLVHEIKPRLTKGYRNKIRAYKHLLNTGKVVLEDLDKIKGHINYSDYIDRLNE

SEQ ID NO: 6857 - protein, 325 aa, unidentified
  source 1..325: note = Related to AP022438.1; note = Raoultella planticola
MKTPLPLFFTFTDAEQLLKALSPSLRDRYSAELIRMQQLGLPPLVSWSVLSVAIGVSPQFITSLIKNKIKYYRVFTIPKGKGKKRRVIEAPRVSLKIIQAWVAYHLSLNENISLSESAFAFIPGRNGIYEAASKHCGAKWVLSIDLRDFFHTITSVLVSAALVKIGYKADQANKLSDLLTLNQRLPQGAPSSPVISNLVFKSTDLKINELIVGMNVKYTRYADDLTFSSEDEGVDIELLKENVLRVLNSDGWVVAEEKLKISKSPNRLKVHGFLVHEIKPRLTKGYRNKIRAYKHLLQTGKIIEGDLDKIKGHVNYSAYIDKLNE

SEQ ID NO: 6858 - protein, 325 aa, Salmonella sp.
  source 1..325: note = Related to AAIGLR010000001.1; note = Salmonella enterica
MKTPLPLFFTFTDAEQFLKALSTPLRDRYSAELIRLQGLRLPPLVSWSILSVAIGVSPQFITSLIKNKSKYYRVFSISKGRGKKKRIIEAPKVSIKIIQSWVAHHLSINHSLGISENAYAFIPGKNGIYEAASKHCGAKWILSIDLRDFFHTITSDIVISTLVEIGYRADQAAKLSELLTLNQRLPQGAPSSPVISNLVFRSTDLKINELISNTGIKYTRYADDLTFSGDDETFDIEELKDNVVELLLSDNWVVAEEKLRIARIPNRLKVHGFLVHENKPRLTKGYRNKIRAYKHLLRTGKIVEKDFDKIKGHVNYSEYIDRLNE

SEQ ID NO: 6859 - protein, 332 aa, unidentified
  source 1..332: note = Related to NZ_CM001857.1; note = Musicola paradisiaca
MKTPLPLLFSYEDEAQFLRSLSSGLRNRHSEEVRRLVAIGLPPVVSWSVLSVAIGVSPHFLNSIIKNKCKYYRSFTISKGKGKKKRLIEAPRISLKLIQAWLAYHLSRNSADYISENSYAFIPGVNGIYEAAKRHCGSQWVLSIDLKDFFHYVNSNKIMPALLDLGYRTEQAAKIIDIVTLQDRLPQGAPSSPYISNIAFKPTDELIERIITGRGVSYTRYADDLTFSGCDAEFNIDGFKGEIINALKSHGWIVALDKVKISKKPNRLKVHGFLVHNQKPVLTKGYRNKLRTYRHLMQAGTIKPDDLDKIKGHLNYGYYIDRLNSQEVEFSC

SEQ ID NO: 6860 - protein, 329 aa, unidentified
  source 1..329: note = Related to JABLUT010000044.1; note = Pantoea agglomerans
MKTPLPLLFSFENETQFLSSLSLGLRNRHAEEIRRLLALELPPLVSWSVLSVAIGVSPHFLNSIINNKVKYYRTFTVSKGRGKKRRLIEAPRVSLKLIQAWIAHSLSHMSRQYISEHSYAFIPGVNGIYLAAKKHCSSQWVLSIDLKDFFHSITAEKIIPALIEMGYRAEQASKIIDLITLNERLPQGAPSSPYFSNVSFRPTDDLIVRMIDGQSIKYTRYADDLTFSGVDLDFDVEKFRDDIIAVLHEHNWEVALEKVRISKQPNRLKVHGFLVHNDKPVLTKGYRNKIRAYRYLMLSGAIKPDDICKVKGHLNYSDYIDRLNASEEV

SEQ ID NO: 6861 - protein, 325 aa, unidentified
  source 1..325: note = Related to JAAQVS010000001.1; note = Morganella morganii
MKTPLPLFFSYPDAEQLLKALSQSLRVKYSSELARLEQLKLPPLVSWSVLSVAIGVSPQFITSLIKNKSKYYRVFSISKGKGKKKRTIEAPKVGLKIIQAWIAHHLSINTFLDISDSAYAFIPGKNGIYQAAKKHCNSKWVLSIDLKDFFHTITLDKVILALIDIGYHAEQASKLAEILTLNQRLPQGAPSSPVISNLVFKSTDACINEFIVEDNISYTRYADDLIFSGVNEDFDIDSLKDNIIVLLQSKGWIIAEEKLHIAKVPNRLKVHGFLVHGNKPRLTKGYRNKIRAYNHLLHAGRISEKDIDRIKGHVSYSAFIDSLND

SEQ ID NO: 6862 - protein, 327 aa, unidentified
  source 1..327: note = Related to NZ_CP082360.1; note = Klebsiella sp.
MKTPLPLLFSYNDAQQFLGALSPEVRDVYSPEINRLFDRGLPPVVSWSVLSVAIGVSPHFINSIIKNKDKYYRIFPIAKGKGKKVRIIESPRVGLKIIQSWLAHHLATNDNIPVSDSAYAFIPGKNGIYEAAFRHCNAKWVLSIDLRDFFHSIDFDRVINGLRNTGYTFEQSGKIAAIVTYKNRLPQGAPSSPVLSNIVFKDTDDKINDIIADKKIIYTRYADDLTFSSDDLSIDVENLKQNIINLLENENWTIATEKLKISKIPNRLKVHGFLVHDVKPRLTKGYRNKLRTYEHLLRNGKIIESDLNRIRGHVNYGKHIDKLNDEN

SEQ ID NO: 6863 - protein, 327 aa, Enterobacter sp.
  source 1..327: note = Related to NZ_KN549084.1; note = Enterobacter asburiae
MKTPLPLHFSYDSLDQFLAILSPGLRQRHAEELRRLDDLKLPPVVSWSVLSTAIGISPHFINSLIRNKNKYYRVFTIAKGKGKGKRVIEAPKVSIKLIQAWLAFHLSNNDNLGLCDAVHGFIPGQHGIYEAAKKHCGCDWVLSIDLKDFFHSISHRRVVNAFENLGYTVAQAEKIADITTYNAHLPQGAPSSPVISNLVFNDTDNAIIRFLDGKGICYTRYADDLTFSGSDISYDVEKLKTEMLQLISNDGWIVANEKTHIAIAPNRLKVHGFLVHAVTPRLTKGYRNKIRAYTHLLNSGKVDPEDLDVIRGHVNYGRYISKLNNGN

SEQ ID NO: 6864 - protein, 321 aa, unidentified
  source 1..321: note = Related to NZ_CP009801.1; note = Yersinia intermedia
MRTPPPPLLVSFKSTQNLLDALPSAISEKYKTEINELLDKMLPPVVSVAVVSIIFGVSSNFIASILRNPIKQYRVFTIKKGKKKRRIESPKIGLKLLQSWIGANLSNKKLLSDSVYGFVPKRNGVFEAAQKHCLAKWVYSIDLRDFFPNISSRRIKNELEKLGYSKHAIELISTICTYEDRLPQGSPASPVLSNLVFRETDKNLEELAKMLDIRYTRYADDLVFSGLGVIPENLQNKIKKILIDDDWVLAEEKEHLSKLPNRLKVHGLLVHGDKPRLTKGYRNRIRAYKHLLELEKIKEVDLYSCKGHVSYANSLDKFTDK

SEQ ID NO: 6865 - protein, 320 aa, unidentified
  source 1..320: note = Related to DOQQ01000002.1; note = Comamonas kerstersii
MKALSPPLFVNFSSLDEAFQAFSYPENIQDWRALTQRNLPPVISTQFLSLLFGVSPNFISSITRKPNKNYRTFIIKKGKKERVINSPKIGLKLFQTWIGHHLSRAVLLEENVCGFIPGKNGILEAASQHSAAGWLYSIDLRDFFSKINSERVKSALLDLGYPEDSAKLITSLCTLNGCLPQGSPASPVLSNLVFKSTDQIFIDLASKLNIRYTRYADDLVFSGNNNQPENLPQIIKEILNNENWEIAPEKEENLKAPYRLKVHGLVVNGLTPRLTKGYRNRIRAYKHLKNTNKIKDNKEKIQGHLAYADQVDKFFAQKIS

SEQ ID NO: 6866 - protein, 320 aa, unidentified
  source 1..320: note = Related to FCLB01000008.1; note = Serratia marcescens
MKTSPPPLLVSFKSAKNLIDALPPSVSEKYEDEIKYLTEKNLPPVVSVAVVSIIFGVSSNFVASILRRKESQYRNFTIKKGTKRRKIEAPKVGLKIFQSWIGHNLSSALIFPKCVFGFIPDMNGVFEAADVHCESKWVYSLDLRDFFTSISREKVKSELINLGYSAHSAELITILCTYQGRLPQGSPASPVLSNIVFQKTDSRLLKKSEELGIKYTRYADDLVFSGINPMPAALPELIKEVLLDEGWTIAEEKEHISCLPNRLKVHGLLVHGEKPRLTKGYRNRIRAYKHLLNSGKVKDADLDMVNGHISYAENLERFNN

SEQ ID NO: 6867 - protein, 359 aa, Pseudomonas sp.
  source 1..359: note = Related to FTMP01000014.1; note = Pseudomonas alcaligenes
MHRRAPAKRQRLLRIRCLSAGGNNESQDSFACMGTPPPPILVSFRSFDDLLEALPVDGREEYRQELQQLYDKVLPPVISISILSVLFGLSASFIASMLRRPHKHYRHFVIKKGRKRREIYAPKVGLKLFQRWIGHHLAEALNYPDCVLGFVPHKSGVFSAANTHCSARWVYSLDLKDFFSQVTGERLSAPLIGLGYSQKSTSIILKICLFNGFLPQGSPASPVLSNLAFEPTDRELSNLAKQHGVRYTRYADDLVFSGEALPPEGFEAQVKEILAVNNWEIAKEKEHFAALPARLKVHGLLVHGARPRLTKGYRNKIRAYRHLLNTGRVKPGDLARVKGHVSYSDCLDHFVENGAFEPK

SEQ ID NO: 6868 - protein, 300 aa, unidentified
  source 1..300: note = Related to DMTT01000123.1; note = Idiomarina loihiensis
MNHGDTVNQINEIERLLAIGLPPVISLSSLATMLGVSVNIIQYIVRHPSKLYDAFELKKGRKVRQISAPRVALKVIQSWFSVHLAKVIPYPNSVVGFRPGVPGVFEGASRHCQASWVLNLDIKDFFDSINRERLKRPLLELGYTEKSADLVLDLCTLSDQLPQGAPSSPPLSNLAFMRTDKQLEEVCSRFKVKYTRYADDLIFSGEGEFPEGFDTEIKDVLAGNDWEMAESKEQLVFAPKRLKVLGLIVNDAVPKLTKGYRNKVRAYKHVLSTKGSEADNFAVLQGHIAYHDSLVKFNSD

SEQ ID NO: 6869 - protein, 393 aa, unidentified
  source 1..393: note = Related to JAIENL010000062.1; note = Burkholderiaceae bacterium
MLNACLCWQGRKNGKFSFGGSASARACITPISEDYVQKEACRKAGAPSNHPPFGRLHQRRLFSLAFAVKALPPPLFVSFASLSEALEAMPVVYRDGIRAVMQPLVDQGLPPVLSSGVVATLFGVSTTFIRAIANSPARYYREFTIRKGKKLRKISAPKIALKLIQSWIGTHLSHSVVLSNCVLGFVPGHNGVIEAAARHCSAKWVYSLDLRDFFPSIDSNRVIQSLLKLGYPESASILITQLCTLGGSLPQGSPASPVFSNLVFIQTDVELNAMAEEFGVRYTRYADDLVFSGEGELPADLQTRVRDCLDKHAWHIAPEKEKVVKLPHRLKVHGLLVHGSEPRLTKGYRNRIRAYRHLVLAGKVTAEDQAKIAGHISYAQQVESASGSQMAPS

SEQ ID NO: 6870 - protein, 306 aa, unidentified
  source 1..306: note = Related to NZ_CP017476.1; note = Hydrogenophaga crassostreae
MDEALEAMPERFREGIQQVMQPLVERGLPPALSVGVVATLFGLSIPFIRAISLNPGKYYREFTIRKGKKDRRISAPKVALKLLQSWIGTHLSHSVKLDDCVFGFVPGRNGVIEAARRHSEARWVYSLDLRDFFPSVKIDRVESALVELGYSINSASFIATLCTLNQALPQGSPASPVLSNLVFANTDKALVQIATEEGVRYTRYADDLVFSGQGIVPPLLQDRVCACLVDHGWEIAPEKESLVELPKRLKVHGLLVHGVTPRLTKGYRNRIRAYRHLFAAEKIQPADLDKVKGHLSYALQVEKVPQ

SEQ ID NO: 6871 - protein, 320 aa, unidentified
  source 1..320: note = Related to JAGNNA010000003.1; note = Reyranella sp.
MKAPPLLVSFSAVEDFVASLPDAVREAHEPEILKLHSAGLPAVISVRAISTLFNISAEFVNAISRTPQRHYRKFQIRKGKKTRDILAPRVALKVIQRWIATHLAASIRLPSCVFGFVPGKSVIDAASVHCDATWVYSLDLRDFFPSITARQVYDAIRSLGYSEDAASLVMQLCTLNGSLPQGSPASPVLSNLVFRDTDVLLSSLAAARSVRYSRYADDLVFSGLAPAPADLQTTVKAVLLDAGWKLAIEKEHLAALPNRLKVHGLLVHGSSPRLTKGYRKKIRAYRHLTRVGKVKPADASRIAGHLAYASSIEKFTKSKE

SEQ ID NO: 6872 - protein, 319 aa, Chromobacterium sp.
  source 1..319: note = Related to NZ_JYKA01000004.1; note = Chromobacterium subtsugae
MNTPPLPLLVTFSSLPDLLLALQLEEEDHERKTQIEALHRKSLPPVTSTLALSTMFGISLNFIHALARHPEKNYRKFKIRKGKKNREISSPRIALKLIQRWFAQHASSALVFPEYVCGFVPGINGVTEAAKRHCNAKWVFSVDLRDFFGQVSRARIHNKLVALGYPESGADLICQLCLLDDKLPQGSPASPFLSNLAFQETDEKLNLIASKFKCRFSRYADDIVFSGKNEFDPIIEKEVKELLEQERWVLAEDKTEISQLPHRLKVHGLLVHGDKPRLTKGYRNRIRAYKHLLSNERIRADDINKVKSHISYANIIDSI

SEQ ID NO: 6873 - protein, 369 aa, unidentified
  source 1..369: note = Related to RQIZ01000001.1; note = Paraburkholderia tropica
MRIALECEGRGQKGACRTTADPSNRPPFGRRHNESHHSFALPVNTPPLLVCFPSLDTASNALSERTRQAYGEEFRGLIERRLPPAVSIRIVATLFGFSPSFVGAMVRRPGRYYRVFEIRSGTKIRKIQAPRVALKVIQQWIGGHLAVAIPYRSSTFGFVPGRSHIDAAGQHCGAEWSYSIDIKDFFQSTSEEAVRRALMELGYSEHASHLVSSLCCVGGYLAQGAPSSPALSNLVFLNYDIQFEQYAAEHGLTYTRYADDIVFSGRGEIPASLPELAKRTIESGGWQIAPEKEKTQRRPYRLKVHGLLVEGISPRLTKGYRRRIRALRHLMEHGRVAADQLAKVAGHLNYAEQVASWARKSERSSEVDE

SEQ ID NO: 6874 - protein, 328 aa, unidentified
  source 1..328: note = Related to NZ_JJMR01000016.1; note = Burkholderia sp.
MNTPPLLVTFPSLDFFVSALAEDTRSLYEAEIRGLVELGLPPVVSLRTIAVLFGFSPSFVGTLAKRPARYYRVFEIRTGKKVRFIQAPKVALKLIQRWIGGNLASTFNYLDSTFGFVPGRSHIDAAARHCESNWAYSVDIKDFFRTTSAARVRTALLKLGYSGRAADLTVALTCYEGFLAQGAPTSPVLSNIVFREYDQLLEELACELNLTFTRYADDIVFSGTGAPIAELKDRVRSIIESGGWKISEKKEKLFQKPYRLKVHGLLVDGTVPRLTKGYRRRIRALKHLLSQGKVPPKQLRKVQGHLNYAQQVDSWLASQAATDGDESS

SEQ ID NO: 6875 - protein, 366 aa, unidentified
  source 1..366: note = Related to JAEDZZ010000001.1; note = Burkholderia oklahomensis
MRIALICEDHGQKGACRTAAAPSDRPPFGRRLNESNLSFALPVNTPPLLVNFPSLDFLLKALAEETREIHADEIRFLIERQLPPAVSTRVIATLFGFSPLFLSAIARRPDRYYRQFEIRSGAKLRQIQSPKVALKLIQRWIGGNLATSLTYPDCVYGFVPGRSHIEAAAKHCGADWVYSADVKDFFQSTSFDAVQRALTEVGYQPKAAQLVATYSCFKGFLAQGAPSSPVLSNLVFLPYDRQLLEYAVQCDITYTRYADDVVLSGRGQPPEDLKAFIHQTIEAGGWVLSERKEKLSVKPHRLKVHGLLVDGDSPRLTKGYRHRIRALTHLLEKGSVSPETMSKVLGHINYAKLVAEKGRDEGQGGD

SEQ ID NO: 6876 - protein, 328 aa, unidentified
  source 1..328: note = Related to NZ_RBXL01000001.1; note = Thiocapsa rosea
MNTPPRLILFSSLDKYLQALGDGFDEAHVDAIRCLDSKGYPPVVSIRALSVLFGYRSQFVGAMLNRPQHYYRRFQIRSGKKQRRIDAPRVGLKIIQKWFGHYLARAITMPDVVVGFVPGRSILHGAAMHCRAKWVFSTDIKDFFQSTPTAIVKNALVDIGYTEHGAEIASGLSSLNGVLAQGSPASPVLSNLAFLKVDRQLQEYCHERGLVYTRYADDIVISGAGKPSPNISSDVRGMIETGNWQLSEEKTTLLSLPNRLKVYGLLVDQARPRLTKGYRRRLRAIRHLVDSGKIDAQNDPKAYERACGHLAFAQSVEDFSDRVQKDST

SEQ ID NO: 6877 - protein, 320 aa, unidentified
  source 1..320: note = Related to NZ_CP073100.1; note = Luteolibacter ambystomatis
MNAPPLLVSFDSLHRLFLACGVEDNSSAASSLSALVEIGFPPIVSKATLGVLFGYSPRFIGAMCKNPDRYYRTFYLPKGNGKFRRIDAPRVALKVIQKWAGFHLANNLKLSPSVVGFIPKISAIDGAARHCSQDWVFSTDIENFFQTTAQSRVTQSLIKFGFPAEGAELFSKLSCLNGNLAQGAPCSPVLSNICFSEFDVLIENYSLDNELVYTRYADDIVISGRGNPPPDLENKILEIVTAAGWSISSSKTRFSRRPNRLKVYGLLVSGDVPRLTKGYRNRIRALRHLENSGKLSPESEDVALGHLSYAKSVERFGLGS

SEQ ID NO: 6878 - protein, 324 aa, unidentified
  source 1..324: note = Related to NZ_BCNS01000018.1; note = Marinobacterium profundum
MNIPPLLFSFTTLDQLISSLDEETRHSKENEIASLFKNKLPPLVSIQVLSTLTGFSIPFIYSMTNKPEKYYRTFIISTGKKKRIIHSPRVSIKIIQKWLAHHISSSVNFNECVYGFVKKKSHILAASKHCGSDWVYSVDIKDFFPSTTIEKVRLGLIDIGYSEKAADLISKISSFESCLAQGSPLSPCLSNIVFKNVDNNLCEIAKNYELTYTRYADDIVFSGTGNKPSQLSSAIKDEIESAGWKLAPGKEFYSDRKDHLKVHGLLVNSNRPKLGKRYRNRIRAYEHLLRNDKISPADKPKIMGHVSYRDSVDTLGKKEDTTPA

SEQ ID NO: 6879 - protein, 377 aa, unidentified
  source 1..377: note = Related to CABVLY010000035.1; note = Burkholderia anthina
MRGGNGDRLRTAVCCARVCITLTCEDPSTEGRLPNGGRSFESPAVRQAASTKATSFALPVNTPPPLLYFGSVDELIAALSPVTRERYEYQIRTICDLNLPPAVSIHVIATLFGYSPSFVVALLKRPERYYRIFTIRSGKKRREIVAPKVSVKIIQRWIGGNIERHIEWLPCVFGFVSGRSSIDAASIHCGADWVYSIDLRDFFPSTTRATVQAALTDIGYEPHCAELIARLSCYGGRLAQGAPSSPVLSNLAFMRFDQRLMELSNAFDVKYTRYADDMVFSGNGTFPAALKGEIEAVFRDSDWKFAGDKEYFAEKPSRLKVHGLLVDGGVPRLTRGYRNKIRAFRHLMSTGRVREKDVSKISGHIAYANLVLRKAGR

SEQ ID NO: 6880 - protein, 362 aa, unidentified
  source 1..362: note = Related to NZ_CP034197.1; note = Ralstonia solanacearum
MCITLICEDRTIEGRLTNGGRSFESPAVRQAAATKATSFALPVDTPLPLLFFESIDELVGALSPLTRERYEPEIRRLFDARLPPAASIHVVATLFGYSPSFVVALLKRPERYYRTFYIKSGKKVRLINAPKVSIKIIQRWIGGNIARNVQWLPCVFGFVPGKSSVDAARVHCEADWVYSVDIKDFFPSTRSESVQVALIKLGYKPHAAELIARLCCHGGRLAQGAPSSPTLSNLVFQPFDEQLQRLADTLNVKYTRYADDMVFSGENAFPEKLKNGVSEIFLKSDWVFAQEKEYFAKRPTRLKVHGLLVDGRVPRLTRGYQNKIRAYRHMLEAGKVAKTDIERIRGHVAYADLIEKKTNLTK

SEQ ID NO: 6881 - protein, 325 aa, Azotobacter beijerinckii
  source 1..325: note = Related to FNYO01000057.1
MRLPHSLLSNPFFQFSRLSDLLAVLGNEVGELEIEEIEHLCSIGLPPVTSENVICAVFGFNPGFVWSLLNKKHKYYRRFEIPKGQGVRVIYAPRLGLKVIQKWLSLRLSEFWVPDDSVYGFVVGRSHVDAAARHCGARWAFSCDIENFFPSTSQASVERALIGIGYKEKSAKLIAEVCCYQGALAQGSPASPVLSNICAAGLDKKMLAVRDKYGCVYTRYADDMVFSGEGEMPRELEADVLSCFDGEEWEVAEGKTYSAVYPGRIKVHGLLVGGGVPRLTKGYRNRLRAYRHLLERDAVVKNASVVMGHLAYEDFVRRKALPESE

SEQ ID NO: 6882 - protein, 322 aa, Pseudomonas sp.
  source 1..322: note = Related to PTLV01000220.1; note = Pseudomonas oleovorans
MRLPQSLISSPLFQYHRVSDLLAALDGEIDDEEVSEIQRLSNLGLPPITSANCLAAIFGVNPKFIWSLCNRRSRHYRHFSIPKGSGMRDIHAPRVGLKLIQKWLSVRLSQFWGEREGVYGFVTGRSHVDAAAQHCGSDWVLSCDIENFFPSTTELFVIQSLEAIGYRHSSAALIASLTCYQGGLAQGSPLSPILSNICFNFLDIKFLVLRDSISGVYTRYADDIVFSGRGGFPEGLLEQIRNCFKGTPWCLADNKNYKAIRPCRLKVHGLLVDGDKPRLTKGYRNKIRAYSYLVDNKKITKHESIILGHLTYAEFVTIHQQG

SEQ ID NO: 6883 - protein, 343 aa, Azotobacter beijerinckii
  source 1..343: note = Related to NZ_FOFJ01000068.1
MRKQLEALLSMRLPPYFFSNPYVVFPTLSDFIKSLEGEITDTELQEVNRLAALNLPPVVSGSVVAAIFGVNPGIVWAIINKPHRYYRTFNIPKGNGQREIHAPRVVLKIFQKWLSVRLADAWRPADCVYGFVAGRTYIDAAIKHKNAKWVFSCDIQEFFPSTPSIYVKECLQRLGYNHDQAALVSSLCCFRGGLAQGSPASPVLSNICADDLDKQLLRVAEKYGCNYTRYADDVTFSGSAEVPSGLTDDVAGVFHASPWELAPGKTKLSVSPARLKVHGLLVHTGTPKLTKGYRNKLRAYRHLAAHGKLTKNLSKVNGHLSYAADVDRRVAADNIEVENLFGP

SEQ ID NO: 6884 - protein, 323 aa, unidentified
  source 1..323: note = Related to NZ_SPUM01000038.1; note = Massilia horti
MRLPLHLQSSRYFTFGTLQEFIKASGTSTDAEIAEYERLEALGLPPISSRHSLALMLGVNPALIWSFEARPHRFYRTFHIAKGRSTRRIDAPRVGLKIVQKWLSAQLQAAYSPPEHVYGFVPNRSHVQAASIHCGAEWILSADIADFFPSTPFALVEANLKRLGFNEYAARTIASLSCLDGALAQGAPTSPVLSNICFDEMDKALLALATKHQARLSRYADDIVFSGSGEVSETLISEIRDLFVQSPWELSERKFVLSRRPNRLKVHGLLVEDKRPKLTKGYRNKLRAFRHLLANGRVRSAKDVEIMAGHLAYSDFVEKSFET

SEQ ID NO: 6885 - protein, 371 aa, unidentified
  source 1..371: note = Related to NZ_JAGIXE010000037.1; note = Acidocella facilis
MQHAHCAKTNDRRMPSFGRCSFETQPKRRHLDESQLCYMRLPHQLLESPFFLFSRVEELVEAIGLETGDDEAIQLRALSERGLPPVTSVHCLATMLGVNPGLVWSLINRPHRYYRTFEIPKGRGTRRITAPRVALKVIQKWLGYHLARAASTPPHVYGFVPGRSHIEAAHVHRGAEWALSVDIANFFQTTPSSLVINTLEHLGYGVGAPLLASLTCYLGFLAQGAPSSPVLSNLCFAATDEVLVRLSERYGCKITRYADDVVFSGQGGMPGGLRSELRGIFAATPWKLSPEKESVQPIKGRIKIHGLLVDGPHVRLTKGYRNKLRAYEHILLTRGGEATDRHVLSGHVQYGHHVEAILERLALSRANESPD

SEQ ID NO: 6886 - protein, 375 aa, unidentified
  source 1..375: note = Related to WMBU01000038.1; note = Rhizorhabdus histidinilytica
MRLPQHLLASPLFVFKNAEELIGAMGDRSTPEAIGDIRTLSAQGLPPVVSEEALAAMVGINSGLVWSFLNRTWKHYRTFEIPKGNGVRQINAPRVALKIVQKWLSVNLAKFYEAPEHVFGFVAGRSHIDAAMRHIGAKWAFSADISDFFPSTPEAMVAEALQTIGYSDQSSRIIARLGCLGGRLAQGAPTSPLFSNLCFRQMDSAVLELSHKYECRLTRYADDLVFSGQGDFPNTIRDDLTALFANGPWHLAPQKMLVQPLKGRIKVHGLLVNDSGVRLTRGYRNQIRAYAHLLATRGDQAMEAPKLIGHVEHARHVQRVTGSPSGISKNEGVERERIIIPPGIILPDRQPSADDRRPEAQNESFVGWLKRILNF

SEQ ID NO: 6887 - protein, 325 aa, unidentified
  source 1..325: note = Related to NZ_JAIZQS010000002.1; note = Burkholderia cepacia
MRLPLPLLNSQYFQFSSFAELRTALGDSVSSEELQEAARIVLGGLPPITSRLTLAAMLGVNPGLIWSFENRPQRYYRSFSIPKGRTTRQIDAPKVALKLIQKWLSVQLARTFEPADHVYGFVGGRSHVQAAAQHVGAQWVFSLDIQDFFPSTPIRLVVESLKSLGFGSDGASLLSRLACLRGALAQGAPSSPILSNICFQQMDGQLAQIAQNVGARLTRYADDVVFSGIGEMPPTLENDVRAIFTDSPWTLAEHKIRIAQVPDRLKVHGLLVHGAQIRLTKGYRNRLRAYRHLLHEGKIRDDDLAKVCGHLSYAASVERESDGTS

SEQ ID NO: 6888 - protein, 324 aa, unidentified
  source 1..324: note = Related to NZ_CADFBE010000001.1; note = Burkholderia gladioli
MRLPPSLLNSQYFLFSNFAELRKALGDSASSEELEEAARLVLAGLPPITSRLTLAAMFGVNPGLIWSFENRPRRHYRSFSIPKGRTTRQIDAPKVALKLIQKWLSVQLARTFQPADHVYGFISGRSHVQAAARHVGAQWVFSVDIQDFFPSTPVDLVATALEALGFGRDGAVLLSRLACLRGGLAQGAPTSPVLSNICFQHIDGHLVQIAHNAGARLSRYADDIVFSGIGDIPPMLENDVRTLFDGSPWTLAEQKIRTVRAPDRLKVHGLLVHGAQVRLTKGYRNRLRAYRHLLGEGKIQEADLAKIRGHLNYAASIERDGDEI

SEQ ID NO: 6889 - protein, 313 aa, unidentified
  source 1..313: note = Related to NZ_CADFGI010000002.1; note = Paraburkholderia sp.
MYTSLGELSRALGDAARPEELAEIERLVLLDLPPVSSRIQLATIFGVNPGLIWSFENRTRKHYRSFFIPKGQTTRRIDAPKVALKVIQKWLSVHLSHGFKPADHVYGFVSARSHIQAATLHVDAQWVFSVDIQDFFPTTPIQLVSDSLEAIGFGRDGAMLVARLSCLAGFLAQGAPTSPVLSNICFRLIDEALIAIAARYSIRLTRYADDIVFSGTEEYPAQLETDVRALFSVGPWTLAEHKVRVNKLPERLKVHGLLVHGPKIRLTKGYRNKLRAYRHLMTHEKVAEADIAKIKGHLNYAASVDKFRDASED

SEQ ID NO: 6890 - protein, 324 aa, unidentified
  source 1..324: note = Related to CAJNAS010000001.1; note = Paraburkholderia domus
MRLPQPLLDSQYFLFSSFAELSKALGEAAHPGELAEAERLVLRGLPPVTSRMALATMFGINPGLIWSFENRPRQHYRSFSIPKGRTTRQIDAPRVALKLVQKWLSVHLSRAFQPAEHVYGFVSNRSHVQAAARHVGARWVFSVDIQDFFPSTPVDLVAESLQTIGFGHEGARLLSRLACLRGALAQGAPSSPVLSNICFQHVDEQLILIASRYGVRLTRYADDIVISGTDELPPTLENDVRALFSQGPWRLADQKTQIAQLPDRLKVHGLLVHGEKIRLTKGYRNRLRAYRHLISRGGIQDADLAKVKGHLNYATSVDKEGGDA

SEQ ID NO: 6891 - protein, 303 aa, unidentified
  source 1..303: note = Related to JAAGNS010000286.1; note = Proposed Ferrovum sp.
MDELLKASAGAVPEAEMNEARRLVNLGLPPVTSRMALATMFGISPGLIWSFESRTRKHYRTFFIPKGSGKRRIDAPRIALKIIQKWLSVHLQKCYQPPEHVYGFVSAKSHVAAAARHCGASWVFSVDLKDFFQSTPEVVVINSLERMGFAVNSATLLAKLSCLNGTLAQGSPSSPVLSNICFEHVDEQLLKISKMYNVRLSRYADDITFSGTGVFPAALPEEVLGVFEEGPWRLAEQKTDLAMLPNRLKVHGLLVHGNHVRLTKGYRNRLRAFRHLLKNHKVSDMDLARVQGHLEYSEFVERF

SEQ ID NO: 6892 - protein, 321 aa, unidentified
  source 1..321: note = Related to JAJTWT010000001.1; note = Pelomonas sp.
MRLPHPLLNSQFFQYASLSELLKATERALSESERELMLQLSGKGLPPISSRAALAAMLGINEGLIWSFEARPGRHYRTFYIPKGKDVRRIDAPRVALKIVQKWIGFQLAKAYLPPEHVCGFVEGRSHIDAARIHCRATWVFGVDIQNFFPTTPIDVVARALLDIGYHELGAVLISRLCCFENALAQGAPSSPILSNMCFASYDQRLKAIADRYGARLTRYADDIVFSGQDDFPVALKEEVLGIFASGPWALSNQKIKLAVWPQRLKVHGLLVHGDQLRLTKGYRNRLRAYEHLLAAGKIRAESISVVRGHLGYKDQVAKRA

SEQ ID NO: 6893 - protein, 321 aa, unidentified
  source 1..321: note = Related to MWOL01000027.1; note = Rhodococcus sp.
MRLPQPLLDSQFFQFSSLAELLKATGELVPPSEQVQMRRMVDRGLPPITSRAALSAMLGINPGLMHAFITWPQRYYRTFEIPKGRRGVRRIDAPRVGLKIIQKWVAERLQNCYERPEHVYGFVSGLSHVHAAAQHCEATWTFGVDIKDFFQTTPINVVTKCLLQIGFDENGAAVVASLCCLNGVLAQGAPSSPVLSNICFLHVDQRLAELAAEFGVRLTRYADDIVFSGMGEFPERLQTELFAIFSSGPWRLSERKTRLDKLPNRLKVHGLLVHGERARLTKGYRNRLRAYDHLERTKGEDVEDADVIRGHLSYGKFVESL

SEQ ID NO: 6894 - protein, 320 aa, unidentified
  source 1..320: note = Related to SSEM01000053.1; note = Desulfurellales bacterium
MRLPQPLIESKFFQFERLADLERAIGEHGSALELAEIRRLTNLGLPPIASSSTLATMLGVNRGLIWSLVNRPRRYYRRFSIPKGKEERIIHAPRVALKIPQKWIGVQLSNYFRAPAHVFGFVPHRSHVDAARVHLGAKWVLSLDIENFFPSTPQELVEQALVNIGFGEAGANLIASLACFNGFLAQGSPCSPTLSNYCFSPWDESLALLAAREGVRISRYADDIVLSGHGTPLDGLQEQIAATLANSPWRLSQRKISLSVAPARLKVHGLLVSGDRVRLTKGYRNKLRTFEHILQTRENLDAKFERKVRGHLAYGKFVEA

SEQ ID NO: 6895 - protein, 326 aa, unidentified
  source 1..326: note = Related to PTEU01000002.1; note = Ideonella sp.
MRLPHLFLDRLCFGLSGPEELLRVLGPLASPGEDECIRRLCALDLPPVSSPRALAAMLGVSEGLVWSMLHRQHRHYRHFSIPKGRGSRDITAPRVALKVIQKWLAVRLQAKYYRPGHVFGFVPGLSHIDAARQHLGARWVCSFDIENFFPTTPEGLVAARLVDLGFPESGAGIVARLACFSGVLAQGAPTSPVLSNIALCDIDQRLSLLAERYSLRLTRYADDIVFSGLEAVPDQLAREVYELFAASSWRLSEAKTERVEIPSRLKVHGLLVHGEEVRLTKAYRNRIRAYRYLMERNGIQQADLPKVKGHLSFAESVRKAGGASFG

SEQ ID NO: 6896 - protein, 326 aa, unidentified
  source 1..326: note = Related to CP034464.1; note = Undibacterium parvum
MRLPQPLLDSPYFQFSTVNELCKAAGDPDSAEVMEIRRLDALNLPPVSSRQILGLMFGLNSGLIWSFQSRTHRYYRTFNIPKGNRQRRIDAPCVGLKAIQKWLATQLQGAYKVPDHVFGFVAGRSHIDAASVHAQAVWVLSVDIRDFFQTTPKSLVKTRLLELGFLEKGAELIASLCCLRDNLAQGAPTSPLLSNVCFIHVDQQLSYLADKYNLRLSRYADDIVFSGKGQCPDTLRDELESLFIGSTWVLAPEKTELVSLPKRLKVHGLLVHGENIRLTKGYRNKIRTYKHLLATKGAELTNSEKIKGHISYEKYVDLVVDAQRNT

SEQ ID NO: 6897 - protein, 314 aa, unidentified
  source 1..314: note = Related to NZ_LDJG01000072.1; note = Stenotrophomonas nitritireducens
RRTFYRRSTKEKLCYMRLPQLLQESQFFLFSGVEELLSALGSVIDPAEKQEVLRLADLGLPPISSKDALATMLGINPGLLWSFENRPQKHYRVFTIPKGAGRERTIVAPKVALKVLQKWLSIQLQRNYVPPNHVFGFIPGRSHIQAAQKHLCARWTYSVDIENFFPTTSRDVVCEVFLQLGYSPESSQMLAGFCCYKGFLAQGAPTSPVVSNLAFRNIDERLVQLAERFGVRLSRYADDIVFSGIHDFPDELRIDVDRIFGDSPWRLSPDKTEFDQLPRRLKVHGLLVHGERVRLTKGYRNKLRAYAAVSLYTS

SEQ ID NO: 6898 - protein, 323 aa, unidentified
  source 1..323: note = Related to MDDY01000002.1; note = Xanthomonas arboricola
MRLPPLLLESQFFLFSSLEELLAALGDSVAELEKEEVARLAALGLPPISSRDALATMLGINPGLVWSFEHRSAKHYRRFTIPKGAGQERVIIAPRVALKIVQKWVSVQLQRAYAAPQHVFGFVPGRSHIDAAKQHRLAEWTYSVDIADFFPSTPLRTVTAVFNRLGYGDEVASMLASLSCYQGFLAQGAPTSPVISNLALHEVDRRLIDISRSFDVRVSRYADDIVFSGQNGFPEELVDEVNEIFIDTPWTISQGKTELNRLPRRLKVHGLLVHGAQARLTKGYRNKLRAYAHLIKNGLIQEGHKLRVKGHLRYGEQVKEAAD

SEQ ID NO: 6899 - protein, 323 aa, unidentified
  source 1..323: note = Related to NZ_MOYM01000001.1; note = Stenotrophomonas sp.
MRLPLFLQDSQFFLFSSVEELVAALGDSVAVVDKEEVKRLAELGLPPVCTREVLATMLGINPGLLWSFEYRPDKHYRIFRIPKGARGEREIVAPRVALKILQKWLSVLMQRHYAAPDHVFGFVSGRSHLEAAKVHRMAHWTFSVDIANFFPSTPAYVVAEAFESIGFGAESAEMLARLTCYRGFLAQGAPTSPVMSNIALRAVDEKLSDISRRFGARLSRYADDIVFSGVEEFPEGLRAEVADLMTDTPWELSAEKTEFNQLPGRLKVHGVLVHGPQIRLTKGYRNKLRAYAHLSKRGRIRQDDLLRVAGHIRYGIQVEEVAD

SEQ ID NO: 6900 - protein, 331 aa, unidentified
  source 1..331: note = Related to NZ_VOHK01000004.1; note = Luteimonas marina
MRLPHSLLESQFFALTSAKELVIAMGDSLSEEESDELHRLAGLGLPPVSSALALSTMMGINPGLLWSMLSRPTRHYRRFTIPKGRSERVIFAPRVALKIIQKWLSIHFEKRFTPLPHVYGFVRGKSHIQAAKIHTTAQWVYSTDIEGFFPSTPIGLVVEALMSLGYNADSAEMLAKLCCINGHLAQGSPASPVISNIVLRHIDAGLQRIAGDFGCRLSRYADDIVFSGAQTPPADLGDVVPELFLDTPWRLAPEKTHISTAPRRLKVHALLVHGAEVRLTKGYRNRLRAFRHLIKNGRVREADLKRIQGHLHYADHVAAESVVNGDGSAIP

SEQ ID NO: 6901 - protein, 348 aa, unidentified
  source 1..348: note = Related to NZ_KI535289.1; note = Agrobacterium sp.
MSLTRGPSNRESSSRHLTKDSFAKMRLPHHLVESLLFQYETVDDLVLSLGSEVTPAEVLDIRRLVALGLPPVISRDVLATIIGVNPGLIWSMERRPRKYYRYFPIKKGVGERHIFAPRVALKIIQKWLSYQFARTYLAPPHVFGFVAGRSHLQAANAHCGARWVHSVDIRDFFPSITANVLSSKLVELGYNDLSSDFITKFCCLNGQLAQGAPTSPTLSNLVFRAMDNRLVEIAERFGARLSRYADDIVFSGTQQFPEDLPACVEEIFVGQPWQLAPEKTETAILPHRLKVHGLLVHGHKIRLTKGYRNRIRAYEHLQANGRIIDEDARRVGGHLMYARQVESFIVPD

SEQ ID NO: 6902 - protein, 324 aa, unidentified
  source 1..324: note = Related to QFOR01000002.1; note = Shinella sp.
MRLPHPLVESLLFQYEAVDDLILSLGSDVTPDETADIRRLVALGLPPVISRDVLATIIGVNPGLIWSMERRPHKYYRYFSIKKGIGERRISAPRVALKIIQKWLSCQFSKVYVAPQHVFGFIAGRSHLQAAHVHCSANWVYSVDIRNFFPSITANVLSGTLMDLGYSAPSADLIVKLCCLNGQLAQGAPTSPPLSNLVFRGMDSGLLEIAQRFGARLSRYADDIVFSGTEQFPQNLPATVAEIFAGQPWHLAPEKTEIAILPNRLKVHGLLVHGDQIRLTKGYRNRIRAYEHLQANGRILEGDAARVGGHLMYARQVKNFIAPD

SEQ ID NO: 6903 - protein, 320 aa, unidentified
  source 1..320: note = Related to WIFE01000020.1; note = Rhizobium laguerreae
MKLPRHFVESTFFMFESAAELVTALGPRVGLGDVAEIHRLAQLGLPPIISRDALAVMIGVNPGLIWSFEKRPGRYYRHFQIPKGSGVRNIAAPKVALKAIQKWLSIHFEKCFMPHTHVYGFVPGRSHLQAASVHCGAKWVFSVDIRNFFPSTSAHLVKRALTTLGYSAESSDFLTKFLCLAGGLAQGSPASPVLSNMAFIEVDALLAAMAANYGARLSRYADDIVFSGVNEFPPDLPVQIAQLFARLPWNIAPEKTETAIAPQRMKVHGLLVHGDQIRLTKGYRNRIRAYQHLMTSGKIRDDDWRRIKGHLMYARQVSSS

SEQ ID NO: 6904 - protein, 322 aa, unidentified
  source 1..322: note = Related to NZ_LMNG01000030.1; note = Methylobacterium sp.
MRLPQTLLNSIFFTFALEQEFVSAFGTSLQAIERSEIERLAALQLPPITSEDALALMIGVNPGMIWSLVNRNYKYYDSFVIKKGAKERRISAPRVSMKLIQKWISLHLENAYDPPDHVYGFVAGRSHLDAASKHCEAQWIHSFDIRNFFQNTPSNVVENSLLEIGYKEPSTDIIVPLCTLAGFLAQGAPTSPVLSNMAFKKVDAQLAEVAAAEGLNLTRYADDIVFSGIKAPNSALIEIIKRILAQTPWSLAEEKSHFSEAPNRRKVHGLLVHGNKPRLTKGYRNRIRGFEHAMHKGKIKPEDLIRIKGHLNYAAYVEKKFI

SEQ ID NO: 6905 - protein, 323 aa, unidentified
  source 1..323: note = Related to NZ_CP010735.1; note = Phaeobacter inhibens
MRLPQHLSSSPFFSFSEKDDFFKAIKTVVDDDELERIHLLIARGLIPITSKEVLATMLGVNPGIIWSMVNRPHRYYRSFSIPKGKEKREILAPKVSLKVIQKWISVQLQNNVTFLDHVFGFIPGLSHIDAASQHTEASWIYSIDLEKFFPSTPQSWVEASLGILGYDIKSASLVGDLCCYGGALAQGAPSSPVLSNISMSGVDGSLSALAAELGVRVTRYADDITFSSIYEFPEALPARLSALFKDTPWSISSKKTHLAKSPGRLKVHGLIVNDGQVKLTKGYRNKLRAYKHVIEKNKCRDKDTARLSGHLRYAAQIERHNGE

SEQ ID NO: 6906 - protein, 322 aa, unidentified
  source 1..322: note = Related to NC_003911.12; note = Ruegeria pomeroyi
MRLPHQLTGSRFFSFSDEGEFLKSVSAVVDEEEFVRIGSLVQAGLMPITSKEVLATMLGVNPGIIWSLENKPERYYRRFKIPKGKGEREIVAPKVGLKVIQKWFSVQLQDCARIDDHVFGFVPGRSHIDAASVHTNANWVYSIDLTNFFPSTPINWVASSLINIGYDADSADRISKLCCYRGALAQGSPASPVLSNISMRGIDAALGALAAEMDVRVTRYADDITFSAAGEFPQVLPERLESLFSQTPWKISQEKTYFSEAPVRLKVHGLVVNGNTVKLTKGYRNKLRAYRHVLQTNRCRQEDLARLSGHVRYASQVSSRDD

SEQ ID NO: 6907 - protein, 325 aa, unidentified
  source 1..325: note = Related to NZ_FNEJ01000006.1; note = Salipiger marinus
MRLPHNLVESQFFIFSEREDFLKAVDSVVDHEELQRINKLIEGGGMPITSKEVLATMFGVNPGIVWSFINKPDRHYRKFSIPKGKGKRSILAPKVGLKVIQKWISYQLQGKARFPDHVFGFVPGRSHIDAAVRHTSARWVYSIDLEDFFPSTPRSLIASSLCSFGYDFKSSELISKLSCYDGGLAQGAPSSPVLSNIAMFEVDTALAELAEELGIRITRYADDITFSSEGVYPSSLPERLSTIFYSTPWKISKKKTYFSVAPKRMKVHGLIVNCGEVKLTKGYRNKLRAYRHVLQSGLCKKEDACRLEGHLNYYSQVIKHRDSST

SEQ ID NO: 6908 - protein, 305 aa, unidentified
  source 1..305: note = Related to JAAFAL010000034.1; note = unidentified bacterium
MGKKLKRGEAEEIQRLAALGLPPITSRWCLGTMLGVNAGIFRSMELRPHRYYRNFRLASGNKVRNIRAPKAGLKVVQRWIAHNLANAYVAPDHVYGFVSGRSHIDAAMQHVNASWVVSVDISDFFPSTPVSVVRSRLLSIGYQEVAANLITSLVTYEESLPQGAPTSPVLSNICFGPSDLKMAAIAEHYDARITRYADDIVFSGETGIPHADILVSVRDHFERTCWDINERKVRISQAPNRRKVHGLLVHGGSVRLTKGYRNRIRAYKHLLNTRSDIPQEDYHSIMGHVSYADHLAELVGKSDSN

SEQ ID NO: 6909 - protein, 322 aa, unidentified
  source 1..322: note = Related to JAIUPC010000007.1; note = Proteobacteria bacterium
MRLPHNLLENVGLLTDGPKELIASLGEGCGVEEADEIVRLFSLGLPPVTSLKALAVMTGYNPGFIWSLVDRPEKYYRVFDIPKGRQLRRIEAPRVALKLIQKWFSLHFERQWKPHDAVHGFVRGRSHLSAARKHVTAEWVVSVDIENFFPSTLKTDVRAALVRLGYRSEESLATIERLCCRYERLTQGAPSSPVVANIALDLLDQKIAAIADHHGVIFTRYADDIVLSGRDRAPANILEELTAIFEGTSWRLSAQKQSVSHLPDRLKVHGLLVHGEHVRLTKGYRNRLRAFRHLSDRGAIREADQRRIRGHLNYSQQIERGG

SEQ ID NO: 6910 - protein, 321 aa, unidentified
  source 1..321: note = Related to JADCJU010000004.1; note = Roseomonas sp.
MGLPHHAVYSQMLCAGSEQDLLLGMGAFCSSAEAEEISRLTALGLPPVTSLEALAVMTGFNPGFLWSLQNRPDRQYRVFSIPKGKTFRQIEAPRVGLKFIQKWLSIHFEHKWSAHPAVHGFVKGRSHITAARVHLNAQWVISVDLENFFPSTKVDTVEKALRKLGYKTDASISILSSLLCFKLRLSQGAPTSPVISNIALSDIDDKISLIAQNCGARYTRYADDIVLSGTLSPPENLLLAIKNVFEKTCWRLAERKTSTVQLPQRLKVHGLLVHGEKIRLTKGYRNKIRAFNHLFEKDAVKAEDAQRIRGHVNYSRQIERV

SEQ ID NO: 6911 - protein, 322 aa, unidentified
  source 1..322: note = Related to NZ_CP041191.1; note = Labrenzia sp.
MRLSHKYIEKIALVAGSAEDLITALGNSCSPEEKAEIQRLVDAGLPPVTSSDALSVMTGFNPGFIWSLVSRPEKQYRVFKIPKGREERQIEAPRVALKLIQKWFSVHFENKWVAHSSVHGFVRGRSHISAAKSHLGAEWVASVDIRNFFPSTTASEVDNALRDLGYGDESIKLLKRLCCFGGRLSQGAPTSPILSNIALHRIDLDASNVAIELGAVYTRYADDIVFSGKGLPPPDVLEKLEKLFTGTCWQLSERKRHIAQLPGRLKVHGLLVHGDKVRLTKGYRNRVRAYKHLVSKGRINLDDRNRIGGHINYAKQIDEASD

SEQ ID NO: 6912 - protein, 325 aa, unidentified
  source 1..325: note = Related to NOXU01000023.1; note = Niveispirillum lacus
MRLPHNLIERLTLVAGSPDELCSALGDAAGGEEVAEIGRLSAAGLPPITSLNALSVMTGYNPGFVWALANRTARYYRVFEIPKGRGTRQIEAPRVALKLIQKWLCHHFSAKWQPLDAVHGFVPGRSHLTAASVHLRAEWILSIDLENFFPSTPIDQIRGSLRKLGYQDGDGLELIANLLSFRGRLSQGAPTSPVISNIALSDIDGILSDIARNFRIRFTRYADDITFSGISGVQLPDELLASVREQFVGTPWRISERKIHIAKSPARLKVHGLLVHGDELRLTKGYRNRLRAYRHLMQLGRIDASDLGKVTGHMNYASQIERLKS

SEQ ID NO: 6913 - protein, 323 aa, unidentified
  source 1..323: note = Related to JADLAT010000006.1; note = Alphaproteobacteria bacterium
MRLPHHNLESVCFLFEHFSELIKAMGDKCPPEEAIEIERLFNLGLPPVTSENALATMLGYNPGFIWSLLNRTSRYYRQFDIPKGAGTRKIDAPKIALKAIQKWLSYHFQKKWIPNEHIFGFLPGKSHMDAASKHLSSKWVYSIDIQNYFPSISTVRVRDALENLGYSTEPSLKIIPTLCCLRGSLVQGSPASPVLSNIVLKNLDEELANFAREKNWKFTRYADDIVFSGIDDINESDFIPIKLFVNQDGWMISDKKTYLARHPNRLKVHGLLVHGDTIRLTKGYRNRIRAFRHLLNADKIKEQDLAVIRGHLNYSAQVDDFQL

SEQ ID NO: 6914 - protein, 319 aa, unidentified
  source 1..319: note = Related to JABJKH010000091.1; note = Rhodospirillaceae bacterium
MRLPQPQLESIGFLFEAPSELIQAMGNECSPDEADEIRRLYGLGLPPVTSQESLSVIFGYNPGFIWSLLNRTPRHYRHFEIPKGAGHRQIEAPRVALKAIQKWLSHHLQRAWTPNENVFGFVPGRSHIDAAAKHLSSEWVFSVDLENFFPSVSIRRVKEALRTVGYQTDKSVEILSTLCCLDNHLVQGSPTSPVLSNIVLKNVDQQFASIAAEKKIVFTRYADDIVFSGSGDIPHQTLTQIKSVVSDDGWTLSERKERLSETPNRLKVHGLLVHGRKLRLTKGYRNRIRAYRHLLKNEKIKEEDLSKIKGHLNYASQVE

SEQ ID NO: 6915 - protein, 323 aa, unidentified
  source 1..323: note = Related to CP045631.1; note = Roseibium aggregatum
MRFPHPDFSELCLFAQTPDILIKALGDFSDDEERQLILEYCAQDLPPVTSVISLAVMTGFNPGFIWSIVSRPHKHYRSFPILKGKNAPPRIINAPKVGLKAIQSWLSIHWVRKFDHHPNSFGFIPGRSHAHAARCHVGAEWVFSVDIKDFFPSIQEDRVLKALQCLGYKAGDGTTLLTRMLCLDGALSQGSPASPVISNMILRGLDERLLALSLELGIVFTRYADDIVFSGKGQPPKALLEKVVNEVNGDGWTIAEDKLYTSILPARLKVHGLLVHGASVRLTKGYRNRIRAYRHLLAEGKISKDDLSSVLGHVSYADFVEKL

SEQ ID NO: 6916 - protein, 337 aa, unidentified
  source 1..337: note = Related to NZ_FREX01000003.1; note = Pseudovibrio sp.
MRLPHPRTEQLGFLAETPKEVCKLIGASCGEDEQKLIQQYYELGLPPVTSVNAISVMFGYNPSFTWSLLKNSHKFYRVFEIPKGPKKRNISAPKVSLKVIQKWLATHFYNKWERPDYVFGFVRGKSHIGAAQEHIGANWVISVDIEDFFPSIRWTRVYDAITDLGYQDDFSKQALTLLSCYYGSLAQGAPTSPILSNIIMGPLDKKIFELARHNSATYTRYADDIVISGKDGEPNSLLEQVCTLIESDGWKISVQKKKIQKSPNRLKIHGLLVNDKNVRLTKGYRNQIRAYKHILNNNSIDDESKNKLRGHIAYADHVATYSEQLPPPSTPSSKLPV

SEQ ID NO: 6917 - protein, 326 aa, unidentified
  source 1..326: note = Related to NZ_AXZR01000004.1; note = Sulfitobacter pontiacus
MRFPHPDLEKICFIAEDPDTLIKLLGEHCTADEAALIQQCCASRLPPISSPDAIATMFGYNPGFVWFMLTKTNRLYRTFFIPKGKGERQITAPRVSLKLIQRWLNFHWSAAWVAPDCVHGFVSGRSHVTAATEHCNAKWIVSADIEDFFPSVKTARVRQALAELGYANMDSLALLGKLVCLNGALTQGAPTSPLLSNIVLGQLDRNLTTLAEELNLVFTRYADDIVFSGKGEMPEGIDKKIKAIIEQDGWTVAEKKFEVAKAPSRLKVHGLLVHGGKVRLTKGYRNRLRAFRHVLSNGKASEKDVPKLSGHVAYADFIDLQHRKPD

SEQ ID NO: 6918 - protein, 329 aa, unidentified
  source 1..329: note = Related to NVXB01000069.1; note = Hyphomicrobiales bacterium
MKPPHPSSFSVGFLTESSDELIRIIGNRVTEEESQLIRQYFDLKLPPITSVPALSGMFGLNEGFIWSVINRATKHYRRFEIPKGRTTRTIFAPKVGLKMIQKWLSIHFQECWSSPRSVFGFVPGRSHLAAAAQHLGSEWVMSIDIKNFFPSTSTQKVEAALGRLGYNDEFSRMAITKLTCLRGGLAQGAPSSPILSNIVLHDLDQRLSQYTEANDLVYTRYADDIVISGNDSPPNDIIDDVRSMVKDDGWEIAESKTSLDRIPNRLKVHGLLVHGKQIRLTKGYRNKIRAYQHLLANNKITDEDFSKISGHIRYASSVEKFDTHPDNYD

SEQ ID NO: 6919 - protein, 492 aa, unidentified
  source 1..492: note = Related to RPGP01000001.1; note = Desulfobacteraceae bacterium Eth-SRB1
MKINFNEDILLWAIGVLQPASASDALKFISYIYPEIKPLPLVKEIDQVLSRYRDLGIVVRVHGKSRLYSLTYAGNAKLSLKLRRHRDKARLFLLKDTRKCNMVLSGEEKKESVGASPTSDGSSTLQDFARPIKSAAAPRYPRHNGRFYWSRISKQLNFQVGLNFSSPDIFLKYYSFPSLKAIHNISPDPAEGNDLSVTDFALSVGVSPRLITSLLHATHKYYRQFNIGKRGGGKRTISAPRTFLKVIQYWILDYLLYTLKSHPICHSYQRGKSIITNASPHINSEYVANIDISDFFGSINQTMIIDLLRKNGFGEQLSKTIARLTSLNNGLPQGAPTSPILSNAYLYSFDETAAQIAQNTGLHITRYADDIAISGKKKDSIINVITLFKQELSAKGLELNAKKTRVASRGGQQRVAGVVVNDKALPPRKLRRRVRAMFHQADNYPEEHVEKYNTLRGYLSYFNSFPALKGGPELESYKEILKSLSNNVQPGA

SEQ ID NO: 6920 - protein, 493 aa, unidentified
  source 1..493: note = Related to JACQWO010000092.1; note = Desulfobacterales bacterium
MRVTLNENILLWAAAVLQPASAADVRSFIASIYPEISLLPNIGEIENIFSTWREEGYLQRVHGKSRLYSATYKTNLKLSVKLRRSRDKSRLFLLKSTRAANVNVSGVREQDSVGDSPSTEGSIILQEGAWPIKPAAAPRVPRTTGRFYWPRISKQLSIEVGPSFSSPDTFFNYYSFPSIKTIHEASHKPASEKDLSITDISLAIGISPRLITSFIHAPENHYRQFKIGKRGGGERVINSPRTFLKVVQYWILDYLLHSLPCHPNCHSYQKGKSILSNSLPHVGQKYLANIDISNYFPSINEKMVFSLLRDNNFGEQLSKAVARIVTLENGLPQGAPTSPIISNAFLCNFDEIMTQRALSFNLVYTRYADDMTISGENKENIISLIKNLSANLKDMGLSINEKKTRIASQGGQQKVTGIVVNEVSQPPRTYRRNIRSMFHHAERNPELFADNIKVLKGYISYLQSFPNMQGKKEIFRYKNVCKTIEKNFVQQSH

SEQ ID NO: 6921 - protein, 483 aa, unidentified
  source 1..483: note = Related to JAHJDK010000078.1; note = Nanoarchaeota archaeon
MSARFNWRIILWALGVVQPATAKEIRELLLKVFPDAGRIPSQDEFKVYLNLWEKERLVGVVNRKSAHYSLTSRGNYRMGSDLRYNRDKVRLFLMKEARRNRIYLSGEQIKELVGDSPTVIGSREIYKRHRPIIAALPCFGRNYWPMLLGQLLADPLKNGSPDNHLALYSFPSFESLISSYDRFSRIKKPSLHLLALAIGISPRLISYIIYKRPEHYRQFEIGKRGGGTRNICSPRVFLKTIQYWILDYLLFALKIHPSCNSYQKGKSIITNASDHVGKNYVANIDIKDFFNSISERSISKFLCNQGYDAGFSELISKLVTLNDGLPQGAPTSPHISNAFMYQFDEKIFKFCEKLKMVYSRYADDMTISGSNKKDIIRGIGFAKQYLDSMGLSLNESKTRIASKGGQQKVTGIVVNSHISPPRMFRRKIRAMFHNAYKNPKEYRDKQGQLKGYLCYLCAFPGVLTAKDKEIYVRTINRLSSFAE

SEQ ID NO: 6922 - protein, 442 aa, unidentified
  source 1..442: note = Related to JACXUH010000041.1; note = Betaproteobacteria bacterium
MEPIISRWLEERCIVRVHGKSRLYSISHVGNDKLSIRLRRHRDKARIFLLKSAHDASFQVSGEAHQELAGDSPAVNSSGNTQEGTWPISSASDPRVPRVPVRTYWPRVVRQLDFKVGSVPRSPDTHLTYYSFPSVQSIHDASERCAPPNDLSISDLGIALGVSPRLLTSFIHKPSRHYRQFEIGKRGGGNRVISSPKLFLKVIQYWLHDYFLYRLQIHDSCHSYQKGKSILSNAEPHVGKHFVANIDIENFFGSITKDMVSQLLRNNRFGEHLSNSVARLVTFNDALPQGAPTSPTISNAFLYDFDETMAAWSIIEGLTYTRYADDMTISGNDREQILDAIRLAERLLNEIGLRLNSKKTRIASKGGQQKVTGVVVNEKPQPPRDLRRRIRAMFHQAKMSPDEFRQKLPMLRGYLSYLSSYPALRNSEELNSYINVLKKISQ

SEQ ID NO: 6923 - protein, 502 aa, unidentified
  source 1..502: note = Related to NZ_KB822693.1; note = Marinobacter sp.
MSIQFNDQLLLWGLGVLQPAAPQEVLSFLKLVYPTVEQWPDELYLNDRFFHWEELGYIVVLNKKYSMYSLTALANMRMDVKLRRQRDKARISLLRAAYDANVSRPGVMDQDLDGASPSSEISSTLQEGSRPVGSGSKPSRTEPTRLRTRTYWSRVSEQLSVQVGLDFHSPGIPSFQYRYCSFPTLKAVHQASLGESSENDMSISELGLAIGVSPRLLTSFLHKPENHYRHFSLPKKGGGERDIAAPRFFLKTIQYWIKSYVLCHLKVHNTCHAYTSGKSINTNAKPHVGKAYVANVDIENFFGNITKEHVFRILEKNGVGRKLATAVSGIVTLNRVVPQGAPTSPVISNAVLYEFDKAMSKISVDKGLDYSRYADDITFSGESRSDIEYIVSKCRELLSAEGFNLKDKKSRVASKYASQRVTGLVVNEKVQPPREYRRKLRAIFNNALINPQEYVDRLDELYGYFGYLSSFDGARNARQIRKDRIAIYRVSRLARIKKSKDE

SEQ ID NO: 6924 - protein, 302 aa, Nitrosomonas sp.
  source 1..302: note = Related to SSFV01000001.1
MSLSQLALAIGISPRLLTSFTHRPENHYRFFDISKKGGGKRQIASPRFFLKTVQYWIKSYILCHLKIHDSCHAYLVNKSIITNAEKHARKEFVANIDIEDFFGSIKTDHVFQLLKKNGIGEKLSKAVAHLVTLDGKLPQGAPTSPTISNAFLYEFDNSLSKISNEAGLEYSRYADDITISGSSRSAIESVIFGCRNHLWSNGLKLNENKTRIATSHSSQRVTGLVVNEKIQPPREFQRRIRAIFHIVNKNPESYIERISELRGYYNYLLSFDAIKNSRHLQRYRMVINKLKAAARNNSSSLI

SEQ ID NO: 6925 - protein, 499 aa, unidentified
  source 1..499: note = Related to PALV01000013.1; note = Gammaproteobacteria bacterium
MSVKFNNRLLLWGLGAVQPATPSEVIGFLKLVYPDVTAWPDRNFLRIIFNEWLDRNYVIELNKKYEIFSLTSAGNHALGYKLRVHRDKARVTLLRAVYDANLASLGDVAQDSDGDSPSSEASSALQEGSRPVNSGSEPSRTESTRLRARIYWPRVSEQLLSVGLDRHTSNIPSYRYRYCSFPTLRAIKQASNDNSDTQDLTISQLGLCIGVSPRLLTSFVHKPENHYRTFRIGKKGGGSREISSPRFFLKSIQYWIKSYILSQFNAHNACHSYRIGKSIITNANEHARKSYVGNVDIEDFFGSVDKKMVFECLRKHGYGSELSRSIAGLVTFNNSLPQGAPTSPEISNAILFDFDERLFAAASDVGVTYTRYADDITLSGGSKQVVAQLIRECEEGLKAHGMRLNSKKTRIASIRSSQVVTGLVVNEKVQPSRAYRKRIRAIFHQAGINPSQYVGRLKQLQGYYSYLSAFDSLKDSKQLREYREVIRKLGISSKEKVDG

SEQ ID NO: 6926 - protein, 484 aa, Desulfovibrio sp.
  source 1..484: note = Related to ATHV01000015.1
MKKNELQILLWSIGILQPASPTLVRHFLQEMLPKAFNNTTTQKIKEKFSWLQKNGFLAYALDGVDYIYSLTREGELALGPGIRKSRDKIRLFLLRDSASYIQDSPSSPERGLELTGDSPVVETRYVLQGRRPIAPAAGPGVRRYWPSTFKQLKGFAGPKPRSEFYPFDLYSFASIDELNAAVGTECDRNSLSLIHLALSIGVSSKLLFAISNNSRRYYRSFEIRKASGGMRTIHAPRIFLKTIQRWIVDYFLFQLPCHPGCHSFQRGKSIISNAAIHVGKKYVGNIDIADYFKSIKSEHLVHKLSKFFGIGLSRAISLICTHDDFLPQGAPSSPILSNFYLFDFDKEISLLCEQNELSYSRYADDITISGKEKNSIYNAINYSKYLLKKHNLTLNYQKTRVSSRGGQQNVTGVVVNQKINPPRSLRRNIRALFHNAQKNPMQYTDKIEMMRGYLSYLNMYESQKNIINKSRYEHIIDAIAAVKE

SEQ ID NO: 6927 - protein, 480 aa, unidentified
  source 1..480: note = Related to WYDS01000022.1; note = Halodesulfovibrio sp.
MSNKVHPYYYLWALGIIQPATPTQVQHVLEKTFVESGVKFNLNEIVQCFENCLKGKIVLKASEWNDSLFSLGPNAYMLLPNRLRFNKDRTRLFLLKKARIASRRASGHLDLDADGASPSDKRSFKIQVPRPIKPLGLAPAQFYWSGAYRQLTSTAGPNSTLPEVRLPFLSFESINLIKSINESTKTTPFSITGLALCIGISPSLLVSTIRNIEKQYQTFEIEKHSGGTRTITAPRVFLKTIQHWLADYLFSTLPVHDVCHAYRSKRSIISNAEKHTNQKFVAKIDISNFFGTITSEMLIKKLSPFCSVEEATVFSRIVTLNGSIPQGAPTSPCLSNFILFDADGIIAKECQKVGVNYTRYSDDLTFSGENRGQLLEIISFTENVLKEYGFELNPSKTHIMTSGMLQNVTGVTVNEKVQPPRKVRKKIRAMFHQAEQSPENFKDQLENLAGYVSYLNAYPELKDSQTLRHYKEVLVKLSTL

SEQ ID NO: 6928 - protein, 459 aa, Desulfovibrio sp.
  source 1..459: note = Related to MLBG01000117.1
MKTELSTQIYAWALGIMQPASATIVKHFMQMALPDSCQDLETKDVKVQFAKMLKLGLISQSSEKIDYVYSLTWLGNLSMNNKLRVHRDKARLFLLKDAAQAAHKERFSEGRGLELTGDSPVMDLSSDKQSRRPIGQVVDSADLAYWSSTFKQLKHSAGPLPRSSFSTSFGLYSFASCNELQLACHNICPNTFDLDISSISLCIGISPSLLVSMSNKPEDHYRTYEIGKKNGGTRIIHSPRIFLKTVQYWIKDYILHSLNIHDSCHAYQKNKSIQTNASMHLNKKFLANVDIKNFFGSISQEKLQNTLATRYSKKMSQCISRLCTINNLLPQGAPTSPVLSNFYLSEFDAKVETFCHHLQLDYTRYADDLTISGNYKDNVLKAIDFAKDTLNLYELKLNDSKTRVASKHGQQKVTGVVVNEKMQPPRKFRKKIRATFYQAKKILAIIPTRKKSCEDILVI

SEQ ID NO: 6929 - protein, 491 aa, unidentified
  source 1..491: note = Related to CP038027.1; note = Brevundimonas naejangsanensis
MTQILNAPSIIMALGVLQPATTFEVVGFLKTMLPHAGTLPQPDEVLEFFKEREAAGHVLRVARGDGGTSLYALTLAGHRYLNVRQRQVRDKLRFYLLRDARQARRRSSDGEASRLVGASPTLDTSSPIKGSVANKYGHHVPPGRTYWPRISRQFGVSTGLSASSSDTFPEWLSFRDQRQCELATNFGEGQFELDFEGLAACLGVSPKIISQIASSPNRHYRSFEIAKKSGGSRTISSPRVFLKVIQWFLLDFILTSLPVHHAVHSFSFGRSVVTNAQTHEGQAFVGSLDIEDYFGSVTTSAIFELLVGSGFRNHEARLIARLSTKDGGLPQGAPTSAVLSNAVLYPFDEQINKECARAGLTYTRYADDITISGADRRELLRVMALAEGLLAKHNLHVNKEKTRVVSQGSQQRVTGVVVNQTAKPSRYFRRLVRAKFHNAALSEDHNKVKVEQLSGYLSYLQMFPSLKGSKLFETLAHDLSRARQKDPPMLI

SEQ ID NO: 6930 - protein, 374 aa, unidentified
  source 1..374: note = Related to JAFLCS010000004.1; note = Caulobacterales bacterium
MVGDAPTLESSSSIKGCAANNFGHSVPRVRTYWPRISRQFDRSTGLSAPSSDTFPEWLSFRNRRQCELAVGIERGQFKLDYEGLAASLGVSVKIVSQVSRRPARHYRSFSIQKKSGGERKISSPRVFLKVMQWFLDDFILDGLPVHSSVHSFVTGKSVATNGKLHVCQSYVGSIDIENYFGSITKAMVQRLLLENGFLDDEVSLISALTTLNDTLPQGAPTSATLSNAILYGFDCDMAMSCEEAGLVYSRYADDITISGSSREAVERALSRAKRQLANRSFRTNPSKTRIVSDRARQVVTGVVVNAVAQPSRTYRRNVRAKFHNAAKQKTPAGVEIRALAGHLAYLKMFSSLTGSRQIAALERDLRKVRAKKQE

SEQ ID NO: 6931 - protein, 488 aa, unidentified
  source 1..488: note = Related to NZ_CP031417.1; note = Pseudolabrys taiwanensis
MKKVLNAKMALLALGVLQPASAREVRAFLKFVFPESGTLPDVEEFEQFLREQESVNRVVEVERRTMAYYSLTLLGSLYLPPDIRKKRDKFRAYLLRDARRGRFIESRELGTELAGVSPASDTSTIVKGRAANNLGRSSFGRRFANGQAYWPRIQGQFITRTGPTRRSRDTFPNLLSFQDLDQAKRANGNVFCFDYSGIGLCLGLSPQLVWNISRRQSSHYRAFPVAKKGGGTRLIESPRVFLKVIQWFLNDFVLHRLPVHDAVHSFRFGRSIATNAECHKRSMFVGNVDIENFFGTITEGAIISLLTRNNFAPLEAMAIAKLCPNWGALPQGAPTSPIISNALLYDVDKKMSAVCEARGLAYTRYADDISISGPRRRDIADAIRIFEAAISDFGLKINQEKTRIAHRSGQQRVTGVVVNEFAQPSRAFRKLVRAKFHAASVSPDKGVRMIPELGGILGYLKIFPSMQQRREIASYGAIIKFLKSQRTE

SEQ ID NO: 6932 - protein, 547 aa, unidentified
  source 1..547: note = Related to NZ_JACSDK010000013.1; note = Pelagibius marinus
MRTEEPTVWPFPSVKRRTLLRALLYGAASGAALGTLGLSPRAGELASEEIVLTMLGILQPASAEEVFCILELLHDAAAAEGMALDLERPRAGEISEAVEALQRQGAILPVQANPVRRYSMTAAGNRRLSPRLRATRDTTRLFLLHGPRARIMEMSREGREGESGGASPPSNLRSLIDSLGRPLGSTEDDGNQPPTRAWPVARHRLWSRHCRTSPLALSRDTSLRFLSFDSLEQLRLAGGTSGMVSRLRLSPQGIALSLGVSLQFLRWLRDTRYDRHYRSFAIPKRGGGKRWIESPRIFLKVTQRFVLHHILSGQPVHDTVHSFVPAVQAGELRNSITNARRHLAKPYVAKIDIKDFFGSLRGYLVDQAFQDTALLNADARRLLSSLCTRRNALPQGAPTSPMISNLILRRFDENMARLCSELDLVYTRYADDITISGAVREDVELAAWFARKGLTGEPLTLPVNEDKSRILSAGQQQRVTGVIVNERGLPPRRMRRRVRAMFHQAALDPARLREERARLGGYLAYFRAFPDYPSGELARYARVLAQK

SEQ ID NO: 6933 - protein, 499 aa, unidentified
  source 1..499: note = Related to NZ_JH767528.1; note = Catenovulum agarivorans
MSLATIQIGCNFPPELNLDKDKTTVVYWIAAILQPSDKSTILTFLKSIQDHIWENISQDDITHSLNYLCKQQYLLKLSIGLTDYFSINPAKHIKLSINERLNKDRIRFFLLNCGKADKFQTVRRNCKIKVDGVPPSFEERLPIQLRVEIRGRRSQPIISSWVSLLESTLFTVSPSTTQLSPTHKSLSYPNYNFIDHIDADLSPHMTVRHILAADLGISVQLISRILANKTQYYRSFEIIRKNGNKRLIEAPRTYLKVLMRYINHHLLTGLAIHDSVHSYRQGKSFLTNAQIHVAKQYVFNLDIENYFGCINKRQVRELFSINDFTASAATLLSELCTFNDRLPQGAPTSPIISNAILFKIDQSMHRYCEKNNLCYTRYSDDITLSGNSRQSIVKAKSRLIAMIHGAGFKINDKKTRLMPYHKQQLVTGVVVNKEATPARNELRRIRAKFHQAACSSQLPYATRSQLLGYISYLSHFEKYRNSELLHKYSRIIENVSFVA

SEQ ID NO: 6934 - protein, 485 aa, unidentified
  source 1..485: note = Related to SRHQ01000067.1; note = Methylorubrum sp.
MTVTLNRGFILWAVGVLQPVASGELLYYMEHVFENAGALPSENDLHSYLVEAANVGQLIRIMREPDLFSLTIQGNSYLSRSQRMSRDRERIFLLADAWNGRKLTSREEQTTESGGVSPPLLQRTTLEGTGANECGPSVPRGRTHWPRYSKQLTKTTGSSSSSRDTFINFLSFNDATQVNLARRASGRAIQPDAVNLALMIGLTPRLISQIIVRPDRHYRSFPIKKRTGGAREIHAPRVFLKTIQRFIVDYIFHVLPQHDAVHSFRNDRSILSNAQCHVGKQWVAGIDVENFFGSITERHINSHLSSIGLDAPSARTLAKLATLNGVLPQGAPTSPILSNSVLYNFDELMSAEAEKQSLVYTRYADDITISGSSIDCIRSLIACATLLLNDMYGLVINDKKTRVLSRRSRQVVTGVVVNDVALPPRDLRRRMRAASYNATKVEGVNVEALNMLRGYLGYFQEFPDLVDNKEFTDFRKNLGNIRARF

SEQ ID NO: 6935 - protein, 489 aa, unidentified
  source 1..489: note = Related to VXOZ01000123.1; note = Chloroflexi bacterium
MDSFIGHQTTLWAIGVLQPVSASELVDYFKALLDDAGDLPDSRELQRFCRDASKRGLVVRVRRRPDLFSLSLKGNRRLSREQRLLRDRARLLLLKETKKSRVHVSREVQATELGGASPSEDASSTSQGGSANKSRPLVPRGLACWPRLSKELLIRPSPASRDTPLDLLSFMTWAQVAIACGKTQEELTLDCHSIGMMLGVSPKLIQQLAWDPEHHYRSFEIPKRAGGLRTIDSPRVFLKVIQRFLADYILVHLPISSAVTSYRIRMSIQENARPHVGAEYVANSDIENFFGSIKHGPIVNLLMHNGLRASSAKLIGDLVTKNRSLPQGAPTSPPISNAFLYIFDEFMLSYCHTEKVSYSRYADDITISGNNRSAIEDALAMAKTKLLVEYGLRLNMAKTRIASKHGQQKVTGLVVNERISPPRVYRRRVRAIFHKARLNKQVNVEEFRRLRGYLSYLKSFDALRHSSEVQEHESTLSKLSIRSTNADTV

SEQ ID NO: 6936 - protein, 486 aa, unidentified
  source 1..486: note = Related to SSDV01000007.1; note = Sphingomonadales bacterium
MKTKLNTSNLLWVIGVLQPVSAEEITSYLATVFDDAGTMPKGTDIHKFCREQTDKKHLIRVAREPDLFSLTLLGNQYLSDDLRKSRDRSRIYLLKEAYKARLKMLRGVKATGLDGAAPSADVRPSKKGPEANKLGPVVPSGQAYWPRFSRQLSEQTGSLPTSRDTPLPFLSFANREQLAVAIRSKGEAGSINFTSLGLMLGISPKLIQQIAHHPDRHYRSFQLKKASGGMRNIESPRVFLKVIQRFFLDYILSDLPVDDNVYSFRKNYSIAHNAERHVGKQFVANIDIKNFFGSITSEKILSLLRKHGVEQRSAVLISALVTKEGILPQGAATSPLLSNSLLLEFDSRMSRLAENACANYSRYADDVTFSGNDRDVIANLIKTAEIELLHDYGLQLNKDKTRIATQRSQQKVTGLVVNEKVWPSRKFRRQIRAAFNNARKQEAVDKKRLEKLAGYLGYLRSFDVMKGSPDLVRYSSILASLTVAPD

SEQ ID NO: 6937 - protein, 480 aa, unidentified
  source 1..480: note = Related to NZ_LAVN01000001.1; note = Burkholderia gladioli
MKNARINESLLLWAVGVIQPASPGEVIAFIERVTQSQFPPGVLEGVTAQCSHYVARGLLREVNKRRNWYSLTYEAELRIPKRLRRRRDRIRLFLLKGARAARMRAVGVPHTQKSVDVSSTSRTSGGEDIQEVPRPTKSFGRGERAQERFPWPRIFEQISDGSGSATGTPTHSDSSNATNPLAFYTFSGRHRAAADNPYPLNVRELGLAIGVSARLLTSIGKFPNRHYRRFQIPKANGTNRDIASPRIFLKTIQYWIKDYLLYRLPVHETCYSFISGVSIEDNAACHAGKNFVATIDIRDFFGSITLENVQTVMRRAGHTISLARIVAKLVTLDGSLPQGAPTSPIISNSYLFDFDRAMSMWCAKRGCSYTRYADDITISGETRSEVQRCVDHAEYRLNRYGLRLNEGKTRLQSRGARQVVTGLVVNELAQPSREQRRMVRAMLHRYQTGIMREPTDIARLRGWISYFHSFEHLREKFPRI

SEQ ID NO: 6938 - protein, 477 aa, unidentified
  source 1..477: note = Related to QVIO01000003.1; note = Duganella sp.
MSHTRINESILLWAIGVIQPGSPAEAIEIIEKATKSKLPPGSAEGITLQCEHYVQRGLLRLVHKKKNWYSLTHLGDVSIPKVLRRRRDRIRLFLLKNTWQSRIADVGAPVMQKSVDVSSTMQNSGEYVQEVPRPTKSCNRGERGHERFRWPRIYEQMTKGSGSANGAPTPPVTPNPLTFYTFSGKHRGEIENPYPINARELSLAIGISARLITSIAKIPEKHYRRFKIPKANGSFRNIASPKLFLKVIQYWLKDYLLFRLPIHETCFSFIKNVSIEDNASPHTKMAYVGTIDIEDYFGSIKVTAVQSVLKRAGFTASASRIISKLVTLDDALPQGAPTSPIISNTFLFRFDEFISRWCKTHECTYTRYADDVTISGMNKSSVLQCIDRAEILLNRYGLKLNSKKTRIQSQSTRQVVTGLTVNELAQPSREQRRKVRAMLHNYQIGKLNDPKEIQRLRGWISYFRSFDHLKEIFQMPA

SEQ ID NO: 6939 - protein, 485 aa, unidentified
  source 1..485: note = Related to PGES01000001.1; note = Janthinobacterium sp.
MSLPRINESLLLWAVGVIQPTSPLEIVQFIEYVTRGTVPPGTLEGIEQQCQHYTKRGLLRSVSTRHNWFSLTYAGDVSIPKEMRRRRDRMRLFLLKKCWQSRIHHVGVPRSQKLIDVSSISQHSGKDIQEVPRPTKSSNRGERGRERFRWPRIFEQIPIGSGSAIGTPTPPPPNTLTFFTFSAQHRSEAAGNPYPINAKELALGIGVSARLLTSIAKTPEKHYRKFQIPKADGSHRNIASPRLFLKILQYWIKDYILFRLPIHQSCYSFLPGVSIIDNATPHIGKNFVATIDIENFFGSITQQGVQSLIVRAGYTAALARIISKLATLDNTLPQGAPTSPIISNSYLFRFDQSISAWCARLGCTYTRYADDMTISGTDRVTVNNCLERATNLLNRYGLKLKSSKTRIQSRGGRQAVTGLVVNEIVQPPREQRRLIRSMIDRYRRDLLDPADLTKLRGWVSYFQSFHHLKNKYNYDEISDLEKDKI

SEQ ID NO: 6940 - protein, 519 aa, unidentified
  source 1..519: note = Related to VMKF01000002.1; note = Geobacter sp.
MAIAINQNLLLWAVGTIQPANSDEVAGFISHVTQDSIPEDIPFFFRDQLRRLAIEGLVVQVSQREGLFSLTERGNDRLSSELRRLRDRIRLFLLKKAKNVRKAPLGDRQQMGGASPSGSEKILLKEVARPIRTTALPHGRTNWPRIGKQFLHRNVERSPSIPPTPTFPANRVRFYCTDGPFDGTTSEVNWLALAIGISPRLITSFIHKSEKHYRHFPIAKKNGGVRNIDAPRVFLKTVQHWILDYILVDLNSHAKCFSYRRGFSIEDNAAIHSQQGFVYNIDIENFFGSISTSAVNQTLTKQGIPPKLAKLLSYLCTFKGSLPQGAPTSPVISNSYLYDFDVFIDRICYQLGCNYSRYADDITISGNEFSKVGECIAAAEQQLRLFRLKINTAKRRVQSKNTRQLVTGLVVNTDPKPPRTYRRQIRAFFHQIKNVPNVDPKGQLCKMYGYYSYLSSFKALSENKELIGYRRQILEFKSIHFPIMHMHSKDMEELDLFTQPATITETDSFFELPAEPAPN

SEQ ID NO: 6941 - protein, 498 aa, unidentified
  source 1..498: note = Related to FNKY01000001.1; note = Nitrosospira multiformis
MTVRVNSQLIMLSLGIIQPASPSAVAKFLSMSLLENSAPIEEQILMPLFEKWGAEGLIVRVHTKLKLFSLSSKGNHILTKEMRHLRDNTRLFLLKELRDGTLAPLGELGKEELTDASSVSLIDLVIQEEERPINPAVTLGKAQSDGRVYWPLLAKQLFVGSIPQSPSPRFRYGSFQSLDSCHMAHPYGAQENDFNLIDLSLCIGISPRLLSSFLYSSEHHYRLFDIAKKNGGTRTIRSPRVMLKTVQYWILDHLLHKLPIHDSCKSYRKGLSIFDNAKSHCDQNYVGNFDIKNFFPSITTTRLTNHFRLHGFPENASRLIAKLLTVNNELPQGAPTSPVVSNSYLFKFDEVVSNFSKNLELNYSRYADDVTISGAKRSDIHAVIAFSTNELARYELLLNPKKTRIAGRGSRQIVTGLVVNKVAQPPRTYRRQVRAMFDNAINNPEEFRSRLSELSGHLSYLGSFENLQNSQSIERYKETLKKLRTHLSVNNLYPSPQQ

SEQ ID NO: 6942 - protein, 487 aa, unidentified
  source 1..487: note = Related to NZ_JAAOLY010000027.1; note = Janthinobacterium lividum
MAVRLNPQASLLSLGIVQPASPAEVANFIEQSLLKGKSKVDLNELTLLFERWKTDGLIQRVHARENLYSLSATGNHSLSKEMRHLRDKTRLFLLKDLRNGSIRLPEEAKSELADVSSASLNDLVSQEEQRPISALTPLRSTHRREPAYWPLLGKQLLVGSTVRSSGTRFRFGSFPSLKACHAAHKNGADGTDFNISDLALGIGISARLLSSFTHNARKHYREFEIPKKTGGVRRICAPRTMLKVVQYWILDHILYKLPVHSACYSFKEGVSIYDNAVVHLKSNYVGNFDIKDYFPSITMDMLKDFLITNGYGQIASNIISRLTTFEGSLPQGAPTSPLISNAFLSGFDEEISVYVAENGMQYTRYADDITISGADRGKILSAIEFATEKLKDLNFLLNEKKTRIAGRASRQVVTGLVVNEIVQPTRSYRRQVRAMFHHASKYPEEFQARTKQLGGHLAYLMSFENIRETAAISEYKRILVSITNPSP

SEQ ID NO: 6943 - protein, 499 aa, unidentified
  source 1..499: note = Related to PQGD01000012.1; note = Proposed Superficieibacter electus
MEESTNYKLLVWGLSVIQPATPNEVLNYLTSTLNDNGLLPDVEKMIHYFELLDQLGYIHQVSKRNNLYSLTPRGNERLTPALKRLRDKIRLFMLDNCHSISKLGVLASTDTENMGGDSPSLQLRHNLKEVPHPSLSWAAGTLPSSPRQAWVRIYEQLNIGSMSSDEASTPTTARNAPLSFVGRLGFSLNYYSFNKIDEPLFNNDGVTAIASCIGISPGLITAMVKSPKRYYRTFNLRKKSGGFRSILAPRKFIKTIQYWLKDHVLNRLKIHSSCYSYRSGVSIKDNAINHVKKKFVASIDISDYFGSINKKMVKDCFYKNNIPDHIVNTISGIVTYNDVLPQGAPTSPIISNAILFEFDEEMTAHALTLDCIYTRYSDDISISSDYKENIAILINIAEANLLSAGFTLNRQKQRIASDNSRQVVTGILVNESIRPTRCYRKKIRSAFDHALKEQDGSQLTINKLRGYLNYLKSFETYGFKFNEKKYKETLDFLIALKQS

SEQ ID NO: 6944 - protein, 353 aa, unidentified
  source 1..353: note = Related to NITF01000014.1; note = Cronobacter sakazakii
RQAWVRIYEQLNIGSMSSDEASTPTTARNAPLSFVGRLGFSLNYYSFNKIDEPLFNNDGVTAIASCIGISPGLITAMVKSPKRYYRTFNLRKKSGGFRPILAPRKFIKTIQYWLKDHVLNRLKIHSSCYSYRSGVSIKDNAINHVKKKFVASIDISDYFGSINKKMVKDCFYKNNIPDHIVNTISGIVTYNDVLPQGAPTSPIISNAILFEFDEEMTAHALTLDCIYTRYSDDISISSDYKENIAILINIAETNLLSAGFTLNRQKQRIASDNSRQVVTGILVNESIRPTRCYRKKIRSAFDHALKEQDGSQLTINKLRGYLNYLKSFETYGFKFNEKKYKETLDFLITLKQS

SEQ ID NO: 6945 - protein, 499 aa, unidentified
  source 1..499: note = Related to DACSPQ010000008.1; note = Serratia marcescens
MEESTNYKLLLWGLSVIQPATPNEVLNYLTSTLNDNGLLPEVERMVHYFELLEQHGYMHQVSRRNNLYSLTPRGNERLTPTLKRLRDKIRLFMLDNCHSISKLGMLASTDTENMDGDSPSLQLRHNSKEVPHPSLPWAAGALPSSPRQAWVRIYEQLKIGSMSSNEASTPPKRKISSLPSIGRLGFSLNYYSFNTLDDHLFNNDGVTAIASCIGISPGLLTTMIKSPKRYYRTFNLQKKSGGFRPILAPRKFIKTIQYWINDHVLNRLKIHSSCYSYRKGVSVKDNAINHVGKAFVASIDISDYFGSINTKMIKSCFYKNNIPEHVINAISGIVTYNDVLPQGAPTSPIISNAILFEFDAEMTYLALRHNSIYTRYSDDISISSDKKENIDELIRVAEANLLSVGFKLNENKRRVVSRNNRQVVTGILVNESIRPTRTYRKKIRSAFDHALKENDNNQLTINKLRGYLNYLKSFESYGFSFNEKKYKDILDFLLTLQQR

SEQ ID NO: 6946 - protein, 717 aa, unidentified
  source 1..717: note = Related to LS483483.1; note = Klebsiella oxytoca
MPGNKGELINIRNKGDGNTFNIIQINGGNAPDISKQLGFLGLDIIDNTKKSLVSEFSSGNNNVLLCYPNKEDKILEPIIEKIKAGLSNIGANIFEGSGKTQLPDVQGYPHIAEIDFIKNLKCDSIIIFVLDELTLSQLTLLSYYKIESNIQHVDIIAIPSDSIFNYDKFLSNGLIQYCDDNNCKVIKLSTLDDAEVERVIARVKNRKMIQARRGIMLTKADAYDFNHKLFIWALSVIQPASPYEVISYLSIILNDNGVLPAKDKINEYFKALASSEYINQVSKKNNLYSISLNGNEQLSPELKKLRDKLRIYLLDKTRVVSKVKVLASTESKKMGGASPSSQLRFVLKDAPHPSVPWALGALPNHPRNTWVRIAEQINFGSMLSEASNTETHVNQTQHTIFPLNYGSYNSIDYNLIGNTGPTILASLIGVSPHLIAIMSMNPDKYYRSFKLNKKSGGHREILAPRKFMKVIQYWITDYFLFRLKIHASCYSYRKGVSIKDNAINHLNNEFIANIDVIDFFGTINKDMVQKCLIKNKIDIKLATAITEIVTFKGFLPQGAPSSPQISNAILFDFDNKISEACYVIGCVYTRYADDITISGSNRNNVIKMVKSAMQWLNESGFSVNDKKTRISSKNSRQIVTGILVNDVIRPTRKYRKRVRAAFDHALKDNDHSKETIYKLSGHLNYLKSFQQYGYEVNTIQYELILKYLKRKNILIKI

SEQ ID NO: 6947 - protein, 496 aa, Escherichia coli
  source 1..496: note = Related to MOFU01000029.1
MLTKADSYDFNHELFLWALSVIQPASPLEVISYLSIVLKDNGLLLTKDKTSEYFKALANEGYINQVSRKNNLYSISLNGNEQLTPELKKLRDKLRIYLLDKTRVISKVKGLASTESKKMGGASPSLQLRFVLKEVPHPSVPXXRNTWVRIAEQINFGSMLGEASNADTPPQKVQHAIFPLNYGSYNSIDYNLIGNTGPTILASLIGVSPHLIAIMSMTPDKYYRSFKLNKKSGGYREILAPRKFMKVIQYWITDYFLFLLNTHASCYSYRKGVSIKDNAINHLNNDFIANIDIIDYFGTINKDMVQNCLIKNKIDIKLATAITDIVTYKGTLPQGAPSSPQISNAILFDFDNEISEACYLTGCVYTRYSDDITISGSIRKDVVKMVELATHLLNEFGFSINNKKTRIASTNSRQVVTGILVNDVIRPTRKYRKRVRSAFDHAIKDNDCSKETIYKLSGYLNYLKSFQQYGYEVNTIQYELILKYLRRKGIYNNHCI

SEQ ID NO: 6948 - protein, 498 aa, unidentified
  source 1..498: note = Related to AP021929.1; note = Klebsiella pneumoniae
MEVNTNFRLLLWGVSIIQPSSPDEVLGYLKAVLNDDGLLPEIEVMEDYFDKLKKIGYIEQVSKRNNLFSITPQGNEKLPPRLKKLRDKIRIFLLDKCYIQSKLERLASTETEKMSGDSPFLTLRHILKEVPHPSLPWATGTLPSRPRQAWVRIYEQLKIGSTFGDEASTSITDTSPSEVKKNILSLNFYSFNNLEHNYFNNNGVTIISSCIGVSPGLLTSMIKSPEKYYRPFELTKKNGKKREILAPRKFIKVTQYWIADHLLNRLKIHSSCFSYRKGVGIKDNAYNHVGMKFVANIDITDYFGTINKTMIKKCLLDNKIPISIVEVISGLITYYGYLPQGAPTSPIISNAILHDFDESMCESALHFDCVYTRYSDDITVSGNSREKVFLLTRVAAKLLERRGFSINEEKTRILSTNNRQVVTGILVNESLRPTRKYRRNVRAAFDQAIKTMDTSDDTLNSLKGHLNYLNSFKQYGFKFDHEKYQLIINELIKNKDIN

SEQ ID NO: 6949 - protein, 486 aa, unidentified
  source 1..486: note = Related to NZ_JADTXJ010000009.1; note = Serratia ureilytica
MLLWANSIIQPASPFEISQYLKIILADDGALPDLEYLKQYFKELQKNGYVEVVSIKNELYSLTPAGEDKLSANLKKLRDKLRIFLLDKCRESSKLETLASTETKNMGGEPPSLQLRPYIKEVPHPSLSWASGTLPSRPRQAWVRIFEQLRIGSMSSSQASAFSKNTGLFTPEKKYVAAPLFYSFKSLNNPLFDNNGVLTIASCLGLTPRLISSMIKSPERYYRFFEMKKNNGGVRKISAPRKFLKVTQYWINDYFLNRLKIHSSCFSYRKGVSIRDNAYPHQNSKFVANIDIENYFGSINKTMIKGCLLRNNISEHLVNTIAGLTTLFGTLPQGAPTSPNISNAILHDFDEIMTGHAIVRRCVYTRYSDDITISGNEKHLVEELVGLAGNKINAIGFALNNSKYRLLSYNNRQTVTGILINGHLRPTRKYRRKVRAIFDQALKSNDRNPLTLSTLMGHLNYLQSFKKYGFRFEEEKYLFIIHKLKN

SEQ ID NO: 6950 - protein, 494 aa, Enterobacter sp.
  source 1..494: note = Related to NZ_CP045769.1; note = Enterobacter cancerogenus
MSNSINFRLLLWANSIIQPASPLETLNYLKLLLADGETLPDIESIRLYFRELQKIGYLEVVSIKNELYSVTPAGEDKLTANLKKLRDKLRIFLLDKCHESTKLETLASTDTKNMGGESPSLQLRPYIKEVPHPSLSWASGTLPSRPRQAWVRIFEQLRIGSMSSSKASSFSNSIEFLNTEKKHIAAPLFYSYKSLNNPLFENNGILTIASCLGLTPRLISSMIKNPEKYYRFYEMNKKNGGVRKISAPRKFLKVTQYWINDYFLNRLKIHSSCFSYRKGVSIHDNAYPHQDSKFIANIDIENYFDSINKTMIKNCLLRCNISENLVNAISGLTTLYGTLPQGAPTSPSISNAILHDFDEAMTNQALVRNCVYTRYSDDITISGNKRYLVEELVGLARNKINNLGFTLNNSKYRLLSYNNRQAVTGILVNGPLRPTRAYRRKVRAIFDQALKSNDRNPLTLSTLKGHFNYLKSFKKFGFSFEEDKYLSILDKLSK

SEQ ID NO: 6951 - protein, 495 aa, Enterobacter sp.
  source 1..495: note = Related to NZ_CP087390.1
MSNSINFRLLLWATSIIQPAAPSEILYYLRLILTDDGALPNIDSLKQHLKELHKIGYVELVSIKNELYSITPSGDEKLSANLKKLRDKLRIFLLDKCHKSTKLGVLASTDTKNMDGAPPSLQLRPYIKEVPHPSLSWASGTLPSRPRQAWVRIFEQLRIGSMSSSQASILSKDSDSLIPEKKIIAAPIFYSYKSLNSPLFENNGILTVASCIGLTPRLISSMIKNPDRYYRIFDMRKKSGGVRKISAPRKFMKVTQYWINDYFLNRLNIHSSCFSYRKGISIHDNAYPHQNNKFIANIDIENYFGSINKTMIKNCLLRNNISEHIVNTIAGLTTLYGTLPQGAPTSPNISNAILFEFDELMTNQALVRDCVYTRYSDDITISGDNRHLIEELVSLAKNKINSMGFTLNNAKYRLLSYNNRQAVTGILINGPLRPPRAYRRRVRAIFDQAIKSNDQTSLTINALKGHLNYLQSFKKYGFSFEETKYSLIIEKLTKK

SEQ ID NO: 6952 - protein, 497 aa, Escherichia coli
  source 1..497: note = Related to NZ_NRWV01000070.1
MSNSINFRLLLWATSIIQPATSAEILYYLKLVLADDGALPDVESLKQHLKELKKHGYVEIVSVKKELYSLTPAGDEKLSANLRQLRDKLRIFLLDKCYKSTKFGLLASTDTKNTGGESPSLQLRPYIKEVPHPSLPWASGTLPSRPRQAWVRIFEQLRIGSMSSSQASTLSEDSNNHNFGDSFVAAPTFYSYKSLNHPAFENNGVLTIASCIGLTPRLISSMIKNPERYYRVFEIPKKSGGARKISAPRKFMKVTQYWINDYLLNRLKIHSSCFSYRKGTSIHDNAYQHRNNDFIANIDIENYFGSINKTMIKNCLLRNNLSEHIVNTIAGLTTLYGTLPQGAPTSPNISNAILYDFDETMANQAKARGCVYTRYSDDITISGNDRYSVEELVGIAKNKIFSLGFKINESKYRLLSYNNRQLVTGILINGPLRPPRLYRKKVRAIFDQALKSNDCRTSTLNTLKGHLNYLLSFKVYGFEFDEEKYQLIIDKLTKEVH

SEQ ID NO: 6953 - protein, 495 aa, unidentified
  source 1..495: note = Related to JACVBT010000006.1; note = Pantoea sp.
MTISINFRLLLWATSIIQPANANEILSYLKLVLKDDDALPDEASIKKYLKELREIGYLELTSVKGELYSITPIGDEKLTANLRQLRDKLRIFMLDKCYKYSKLMLLASTDTKNMGGDSPSLQLRHDLKEVPHPGLSWASGTLPSRPRQAWVRIFEQLQIGSMSSSQASNLKDDSQNPPSSFSFTPAPTFYSYKSLNNPLFEENGVLTIASCLGLTPRLISSMIKNQEKYYREFDLSKKSGGIRKISAPRKFMKVTQYWLNDYLLNRLKVHSACFSYRKGVSIHDNALQHVDKKFVANIDIENYFGSINKTMIKSCLLRNNFSEHLVNTIAGLTTLYGTLPQGAPTSPNISNAILYEFDQTMANQAMVRKCVYTRYSDDITISGDSKSAVKELINLARLKISSLGFNLNDHKFRLLSYNNRQLVTGVLINGALRPPRKYRRKVRAIFDKALKTNDTSLLTINTLKGHFNYLSTFKEYGFKFEEEKYLSIINYLQKK

SEQ ID NO: 6954 - protein, 477 aa, Aeromonas sp.
  source 1..477: note = Related to NZ_CP038513.1
MANLVNLKTYLWALATIQPASPQEAHAFLKIVTNIEPDIYTEEDLNDAINRSMKLELIECVSKKHNIYTLTIKGGDFLGKKLRLLRDKNRLFLLKTVKDASLKIKDSPEQNKASVSSATMFRSTVKVAPWPENSLVSGPLPQNQRVFWPRVSEQLRIGSNAGGSFLNLNYYSKNKLPNINDDFSAVDLFSELIGISPRLLSSFIKAPSRHYRTFTLQKKSGRGHRTINSPRVFIKTVQYWICDYFLYKLNQHELCFSFRKNLSIKDNARIHLGSRYILCLDIDSFFDNIKTEHVHSCLIENGFSEDISSFISRVVTLDGCLPQGAPTSPIISNSYLYNFDKVISDFCGQNGMTYSRYADDLTIGSTDYTQLKSCIPLISKQLAKFELKINERKTRIISNNNAQIVTGVCINNERLRPSRKFKKEVRAAFNNAKLNNDKSSLPRLYGYLNYLSSFDNGDTPHNISEYKSIIDSIKKAL

SEQ ID NO: 6955 - protein, 477 aa, Aeromonas sp.
  source 1..477: note = Related to NZ_CP033604.1; note = Aeromonas veronii
MASLVNLKTYLWSLATIQPASPEEAHAFLKLVTKVESDIYTCEDLNEAILRAIKLNLIECVSKKHNLYSLTVKGGDFLGKTLRLLRDKNRLFLLKSVRDANLKIKESPEQNMVSASSTITFRSTLKVAPWPENSLVSGPLPQNQRVFWPRVSEQLKIGSNSGDSFLKLNYYSKNRLPEINENFSPVDLLSELIGISPRLLSSFIKAPSNHYRTFTIEKKSGRGHRKISSPRVFIKTVQYWIYDYFLYKLNQHECCFSFRKNLSIKDNAKVHLGKKYILCLDIDSFFDNIKTADVNSCLIRNGIPSDISSIISGIVTLNGSLPQGAPTSPIISNAYLYEFDQKMYEFCVRNGMTYSRYADDLTIGSTDYTQLKSCIIFISEQLTKLELTINERKTRIISNNNAQVITGVCINNEQLRPSRKFRKEVRAAFHNAKLNNDKGSLPRLYGYLNYLSSFDSGDTPHNISEYKSIIDRIKKAL

SEQ ID NO: 6956 - protein, 483 aa, Vibrio sp.
  source 1..483: note = Related to NZ_AP019654.1; note = Vibrio panuliri
MANLVNLKTYLWALGTIQPASANEAHQFIKLMTNVTSDVYSESDLDDAIKRSLSLGYIENVSKKNELYILTAKGGEFLGKNLRLLRDKNRLFLLKSIRSATFQSKDSPEQDVAGVSPPKVFRSSLKAAPWPENSLSPGALPQTQRVFWPRVSEQLQIGSISGESLPSIKLNFYSKNKLSDINDNTTAIDALSESIGISPRLLSSFIKAPSSHYRTFSLQKKSSSGTRIINSPRAFIKTVQYWLHDYFLFRLKLHDCCFSFRQKVSIKDNAKVHLNSNFILCLDIESFFDNITTENVYSCLVRNKIDENIASVIAGITTLDNSLPQGAPTSPIISNAYLYDFDQSMLELCAKNKMTYSRYADDLTFGSNDYMSLKDLIPTIAESLRSYRLRINKKKTRIISSNNSQVITGVSINNGVLRPSRKLRKEIRVAFYQAKTNKNVDALPKLYGYINYLKSFEDGDTDYNLELYQGTIDELKGITKQSR

SEQ ID NO: 6957 - protein, 493 aa, unidentified
  source 1..493: note = Related to PIZK01000029.1; note = Alteromonadales bacterium alter-6D02
MLGENSMSSELNLKAFIWGLGVIQPATPEEVQNFILQVLLKQSNKEFDMQITAQKLLDEDYIRCVSKKNKLYSITHEGDEFLGNKLRALKDKERLYLLKSTRDVNFSGKGASERNSGGASPLKQASSSTKVSPRPEISLSPGPQPQIQRNLWPRVYLQLNIGSKPEAPLNSINLNFYSANSIPSKFDNLDHAILTTSELIGVSSYLLKDFCSNTQKYYRYFEIPKKSGKGVRVICAPRAFLKTVQYWILDYFLLRLKQHESCYSYRKNKSIKDNANAHINKKFILCMDIESFFDNISIKQVVQCFTENSISPHLAILFAKLVTLNGSLPQGAPTSPIISNSHLYEFDDYISKYCAENSLSYSRYADDLTIGSDDYDALKKMEKLITEELGSFGLIINKGKTRIISFNSCQIVTGVAINNGELRPTRKHRKEVRALFHRAEIERSVELLPKLYGHLNYLKSFRNGDSPKNIQKYQSIIDRLKLLRNIEGFGSET

SEQ ID NO: 6958 - protein, 483 aa, unidentified
  source 1..483: note = Related to MBSN01000054.1; note = Alteromonas macleodii
MSSELNLKTFIWALGVIQPATPNEVQNFITHMLLKQSNKEFDIETTVKKLINECLIRCVSKRNKLYSITHEGDEFLGNKLRALKDKERLYLLKSVRDVTFVGKGASERNTGGASPLKQARSSTKVSPRPEIPLPSGPLPQNQRNFWPRVYWQLNIGSKPEAPLTSTHLNFYSANSIPRKFDSMADAIIKISELVGVSSYLLKDFCNNTEKYYRDFEIPKKSGKGVRVICAPRAFLKTVQYWILDYFLIRLKEHESCYSYRKNKSIKDNASVHLNRKFILCMDIESFFDNISVKQVAKCFVENKIEPHLAALFANIVTFNGTLPQGAPTSPVISNSHLYEFDELISKYCVDNNLSYSRYADDLTIGSDDYDSLKKVETLISEKLSSYTLKLNKKKTRIVSSNSCQIVTGVAINNGELRPSRKHRKAVRALFHKAEVEKSVELLPKLYGHLNYLKSFNNGDTPKNIQKYQSIIDKLNNHKNIGSF

SEQ ID NO: 6959 - protein, 484 aa, unidentified
  source 1..484: note = Related to NZ_LSNE01000017.1; note = Paraglaciecola hydrolytica
MIDVMNSKVFVWALGVIQPAKPEEVLDYLLKVFASEKQKDFKVEIGPTLSIVLEQGLVHCVSKKNNLYSVKHAGDDFLGNKLRVLKDKERLYLLKSMRDVNFLSKGASERNMGGVSPPGRLRSSTKVSPRPEVPLSLGPLPQNQRNFWPRVYQQLGIGSKTEAPLQPINLNFYSVNTLPEIKSRSEAIFAASELIGVSSYLLRDFCNSKEKYYRKFEIAKKSSNESRVINAPRVFIKTTQYWIQDYFFYRLRQHDSCFSYRKKVSIKNNASVHLNKKFILCLDIESFFDNITKMQVISCIAKSKVNVHLAELFADIVTLNGCLPQGAPTSPIISNSHLYEFDEKIFEYCSSAGMSYSRYADDLTIGANKYDSLKTLEKVVKTELETLGLSINRKKTRIISSNSCQVITGLAINNGEIRPTRKYRKEIRALFYKADDAIDIELLPKLCGHLNYIKSFKNGDTKKNIEKYQLIIDKLKKSKNIQTF

SEQ ID NO: 6960 - protein, 479 aa, Vibrio parahaemolyticus
  source 1..479: note = Related to NZ_MISS01000101.1
MESTINLKAYLWALGVIQPANPEEVHDFLKFMNNNTNDIYSSSDIDDAVAFSLEHKLIEIVSKKNNLFVLSLNGSEFLGKKLKLLRDKNRLLLLKSLRNDSLDREESPEQKMDGVPPSSMFRLSLKDAPRPEESLSSGPLPQSQRFFWPRVSEQLQIGSNSGDSSTRIRLNYYSRNKIPANTEQSAYECLAELIGVSPRLLSSMAKSPKKHYRTFTMAKKSGGTRLISAPRAFIKTIQYWITDYFLYRLKTHERCFSYKKGLSIKDNARLHLNKKYILCLDIESFFDNINQKDVINLLINSGIENKLSIAMSFLLTLNNTLPQGAPSSPLISNAHLFDFDKKITEIANNSNVTYTRYADDLTFSCDQKSTLEKIKVIVNEKLNEIGLNIKNDKTRILSEHNSQIITGIAVNNNNLRPSRKFRKKVRVLFYQAKINNDVSQIPTLRGYLTYLKSFENGDTPENYKSYEGTINYLQKIQKA

SEQ ID NO: 6961 - protein, 487 aa, Vibrio sp.
  source 1..487: note = Related to VIVA01000006.1; note = Vibrio crassostreae
MMASPMNSAINIKAYLWALGVIQPATPEEIHNFLKFINRSEEEIYDADTISDTIKYSIDNGLIETVSKKNELYVLSLVGGEFLGKKLRLLRDKNRLLLLKSLRNDSFKKEGFPVQEMVGVSPSETQRLSLKAAPRPEESLSPGPLPQNQRFFWPRVSEQLKIGSTSGNPSPSIRLNYYSRNKISNNSNVTTIDSLAELIGISPRLLSSIVKSPEQHYRAFSMQKKSGGLRSINAPRAFLKTIQYWINDYFLYRLKIHSNCISYRKKVSIRDNAAIHLNKDYVLCMDIDSFFDNIKTNGVYTLLVNSGIDESLSRTISFLTTLNNKLPQGAPSSPLISNAYLYDFDSKIHDLCSKMGICYSRYSDDLTFSGDNKEKLEALVPEIIEQLDCFNLKIKKSKTRIRSRNSNQMITGISINNGILRPSRKFRKKIRAAFFKARSNNNIGAISTLTGYLNYLKSFEAGDTEYNISEYQKTIEHLKALKNSIKT

SEQ ID NO: 6962 - protein, 482 aa, Vibrio parahaemolyticus
  source 1..482: note = Related to JACBTA010000009.1
MENIINVKAYLWALGVVQPASPTEVHDFLKYINRSEKEIYDESSIKEVIEYALNNHFIEKVSKKNNLFILSSYGAEFLGKRLRLLRDKNRLLLLKALRNDILKKEGLFEQNLDGDSPSPMFRSTSKVAPRPEESLSPGPLPQNQRFFWPRVSEQLKIGSFSEGPSNFHPINLNYYSKNKLDSASNLSPVNVLSELIGISPRLISSMVKSQDKHYRTFSMPKKSGGYRKINSPRAFLKTVQYWIGDYFLYRLVNHENCFSYKKGVSVKDNASVHLGKKYILCMDIDSYFDCINVHSVFKLFVRSGIDEGLSDLMSKLVTLNGTLPQGSPVSPLISNSYLYDFDVFISDFCSSYNITYSRYSDDLTFGGDDKSDLEAIIGIVKKSLSEFNLNIKDNKTRLLSENNTQIVTGVAINNGVLRPSRRFRKTVRAIFHNALVTESVGSILMLSGYLHYLKSFESGETPHNIKAYEDIIEKLKSKYVSV

SEQ ID NO: 6963 - protein, 483 aa, Aeromonas sp.
  source 1..483: note = Related to CP038441.1; note = Aeromonas media
MDENFNPRPFLWAIGMAQPTTLDYAHAFLKKVTQSESDLLTIEEINNFSKFALDAGLIEVVSKKNKLYSLTNEGGVFIGKGLRLLRDKNRLLLLKSFRRAKLTQESSPTGNLAGAAPVVRNSSALKAAPRPEVSLASGPLPQNQRNFWPRVSEQFNIGLIVGELSPSINLNFYSRNSFPEVSDSISAIDALSLCIGVSPRLIGSMCHAQSNHYRTFTLMKKSGGTRTINSPRAFLKTVQYWIKDYLIYKLPVHDACFSYRKGLSVKNNACVHLNKKYILCVDIDNYFGSIKTEFIHAMLHKFDFSMELSEVLSQLMTLDGSLPQGAPTSPDISNSFLYDFDVTVSDWCSAHNVSYSRYSDDLTFGLDSIDIIGDLKDFVINSLLRLGLRLKEEKTRVMSCNNRQMITGVVINNGTPRPSRKFRKMVRAAFFNAQDLGDVSSIKKLRGYLNYLSSFEGGDTSENIAKYSKIISSLEEIKIKMTN

SEQ ID NO: 6964 - protein, 486 aa, unidentified
  source 1..486: note = Related to JAJSLX010000004.1; note = Marinibactrum sp.
MALTINKDIIVWGLSVIQPASISELRGFLCAVTQDENVVPDGDYLAVTVKELILIHNVLKVATKPARYSVTHKGGIRLTKKLRYLRDRMRLFLLKDSAYGRFHLSSDVLDQNLDDASSSSSIGLKYQDAQRSNSFLAADQKAIWPLVSEQFQIGSTSASDDKNTPTYADLDCYSFDSAYFEGSLKNTSDLSEAIGVSIRLITSICKKKEKHYRSFEIPKKRGGTRPIDSPRTFLKVIQKWINDYFIYDLKQSNYCYSYKKGVSIKSHAQCHEKQNYVACVDIEDFYGSLTKDHIYNLLLKNNKAHSIAKVVSDLCTFNNKLPQGAPTSPILSNAFLYDLDNYLVSECEGLNVTYSRFADDITISSDSKENLIRLISMIKNCLRSLGLSLKDSKTRILHKSQKQLVTGLVVNEIAKPARTYRRRIRAIFHKAKLYPDSFKGKEKVLQGYLSYLSSYNCLSSDTQSDYKQTILNIKNLTSSSNRDKNS

SEQ ID NO: 6965 - protein, 475 aa, unidentified
  source 1..475: note = Related to NSDJ01000001.1; note = Rahnella variigena
MTVSIRRDILTWAVAVIQPATISDIYNFLTTVLKDKDAIPSRDAIMIEVLALIELNDIARVSQKPTRYSITAKGNNRLNKRLRHLRDRMRLFLLKNAYRGSLKKPSAIFDEETNDVSSFIRKAVEIKDAQRPNSSLVADQTAVWSLVSEQFSIGPNEVADGVLLIPTFYSFDANYFDGELRSIVDLSEAIGISIRLITSIVKNKQKHYRTFTVIKKSGGERVIDAPRTFLKVIQRWLSDFLLDKLPVHDFCFSYKKGQSIRNNAQIHVGKKFVLNIDIKDFFGSITKKMICITLIESGFEHKLAKIVSELCTYNDRLPQGAPSSPILSNSILYKMDCFLTEQGALFDYNYSRYADDITISSNDRLTMELGRETIFRCLNESGFDINGGKTRVAATNSRQIVTGLVVNKRVQPTRVYRRKVRAMFDYAKKNPDSFTDKYSMLTGCFYYLMSFGCIGHSKINEYKNTLSLLREISKR

SEQ ID NO: 6966 - protein, 498 aa, unidentified
  source 1..498: note = Related to QBMB01000082.1; note = Burkholderiales bacterium
MSVFINTRLIRLGLGCIQPASAEDVSKFLAQTLGTEGAPIPPESIQSIFDDWASQQDVVCVHQRQHLYSLTRKGDNALDLRERRLRDKTRLFLIKELRAATLKRPEAEEPEKADDSSAVAIDSATQGERPKGAAANPRAAPGVGRAFWPLLSKQLFVGSSPQASGLRFRFFSFPSILDCCKAAGGTSIPEDGVGVNEISLALGISPSLLKSFLARPEHHYRVFEIPKANGKMRQINAPRTMLKVLQYFFVDYLLDRLAVHPAATAYWRGSSVRKNAERHARQRYVANIDVTNFFPSLSTGFVIRSLCAAGLKPDTAALVARLSSYKGGLPQGAPTSAALSNIVMYGFDKKLSEACASLGVNYTRYADDMTFSGLELGAIQQSIKLANESLAEIRLKINDEKTRIYGPSTRQVVTGVVVNDWPQPSRVERRRLRAELHHAKLSPATFVAKYQQLQGRAAYVLSYAGEERPVGALSRGYVEEALFDVRRLHRLMSQTGGA

SEQ ID NO: 6967 - protein, 495 aa, unidentified
  source 1..495: note = Related to NZ_SCML01000017.1; note = Hydrogenophaga sp.
MSVNVNTRLIRLGLGCIQPASADDVSKFLALSLEVEEEPISPEAIQIILDEWSSQKDVVCVHLRQRLYSLTRQGDGRLTPKERHLRDKTRLFLLKELRAATLRRPEAEEPEKADVSSAVFIDSATQEERPKGAAANPRVAPGAGRAFWPLLAKQLFVGSSPSASGLRFRFCSFPTISDCCKAAGDDSIPADGIGINEISLGLGISPGLLTSFLARPERYYRVFEIPKANGKSRQIQAPRTMIKVLQYFFLDYLLNWLEAHPTATAYSRGSSIRKNAQVHTEKKYVANIDVSNFFPSLTIGIVAKSLVAAGLSSNTAVLVARLSSYKGGLPQGAPTSAALSNIVMREFDASVSESCNSLGVSYTRYADDMTFSGMELDGVKQAICFAKERLTEMRLTLNDQKTRIFGPGTRQVVTGVVVNDWPQPSRVDRRRLRAELHQAKISPANSVAKYQQLLGRAAYMLSYAREERPVGAISRAYVEDALAGVKMLRHFTHNE

SEQ ID NO: 6968 - protein, 516 aa, unidentified
  source 1..516: note = Related to JAFLDL010000015.1; note = Candidatus Accumulibacter sp.
MSVGVNQSFVRLALGCIQPASAEQIAAFISSSLPTGAHPLHAEKIREVLDGWASSGDILCVHKRYLLYSLTRQGDGKLSAPERKVRDRTRMFLLKDLRSASLRASEVWGIEQADDSSAVSHGMAVQEDERPIGAAVSPRRRDGRAYWPLLSKQLLVGSSSPSSDTRFRFLSFSSVRSCSQACGYADIPEGGIGLNEISLALGVSPRIVGLLLRRPESHYRVFQIPKAGGGLREIHAPRTFMKVTQHFILDYLLRRLKVHPAATAYSIGCSIRHNAEIHVRRRYVANIDVTNFFGSLSTSVVYDRLIAVGLMKNTAAFIARISSFMGGLPQGAPTSAALSNICLYAADDVLQAESTVRQVTYSRYADDITFSGDDLGAVQACMAIARRELSALGLTLNTDKTRVFGPSSRQVVTGVVVNEHAQPARKERRRLRAMLHHAGTAPDEFVAQFDILQGKSSYMLSYSTPERGIGALPEKYVEDALAAVRAARKKGLPAADESSLSSAPFDNENRGRDAIS

SEQ ID NO: 6969 - protein, 490 aa, unidentified
  source 1..490: note = Related to PBZA01000066.1; note = Sutterellaceae bacterium
MTVRVYPQLIRLALATIQPASAETVVRFVQSALDSQEQLLDLSEVQKLIENWEELADVVCVHKRYQLYSLTKRGANKLSKTERQLRDKTRLFLLKELCVSKLKSPEVQETEKADASSAVVIEPVLQEDKRPISPAVPPRPARSSGRGYWPLLSKQLFVGSSTLTSGPRLRFLSFQSEKSCVLACGTKDSSEFGIGVNEIALSLGISPGLLTSMQHKPEKHYRTFEIPKSNGKPRLITAPRTMMKVVQYFFLDYVLRSLPVHTSATAYQRGCSIRQNALQHLRQRYVANIDVSDFFPSLTTAVVTQKLVEGGLKINTALLVAKLCSYDDGLPQGAPTSAAISNIVLFDFDTAMSEYAGLHGLTYTRYADDISISGSEKSEIEKAISVAQKLLSGIGLKLNDSKTRIFGPSSRKVVTGVVVNEWAQPSRKQRRNLRAALHQASLHPERYVDKYHQLQGKAAYMLSFATPEHSVGGLSSEFVHNAIAEIKKRI

SEQ ID NO: 6970 - protein, 506 aa, Pseudomonas sp.
  source 1..506: note = Related to NZ_AJXE01000028.1; note = Pseudomonas stutzeri
MAIMINSRIVRLALGCIQPADANAVIAFLMKAFKYDTNLISESAIQEIFDQWSTDGEVACVHKKSKLYSLTRLGDSRLNREERRLRDRTRLFLLKELRSAKLHLPEAGEPEKADVSSAVIVDQPVQEDERPTGAARPPRVARRAARACWPLLAKQLFVGSSSRASGPFFRFLSFPTVKACAQANGLAEIPQDGIDISEISLAIGISPQLIGLLIHRPERHYRTFEIPKANGKVREIQSPRTMMKVVQYFLLDYLLYKLPVHVSATAYSRGCTVKANAAPHVGKKYVANIDVEDFFPSIKWQLVHKMLALGGLEDKTAYLIARMTSYQGGLPQGAPTSAHLSNVVLYPFDKEMSGFCESVDVNYTRYADDITFSGSDKNVVWSAVERARQLLTDLGLEINKEKTRVFGPSSRQVVTGVVVNKWAQPSREKRRKLRAELHQAKMNPEKYAARADEIRGMSAYMLSFASEERAVGGLSRGYVESSLAKLTEYINEMKAKESAIAPPSAP

SEQ ID NO: 6971 - protein, 506 aa, Pseudomonas sp.
  source 1..506: note = Related to JAAQXA010000034.1
MAININQRIVRLALGCIQPADAGAVIKFLSKAFNYNTGYFPEGSIQDIFDEWASDGDIINVHKRTKLYSLTRQGDSRLNREERRLRDRTRLFLLKEMRSAKLHLPEAGEPEKADVSSAVIVDPPLQEDERPTGAARPPRVARRAGRACWPPLGKQLFVGSSSRASGPYFRFLSFPTIKACAQANGLDEIPKDGIDIGEISLAMGISPQLIGLLIHKPERHYRTFEIPKANGKVRAIQSPRTMMKMVQYFILDYLLYKLPVHISATAYSRGCTVRANAEVHVRKKYVANIDVENFFPSIKWQLVQKVLVMGGLEDKTAYLISRLTSYQGGLPQGAPTSAHLSNVVLYPFDNEISNFCESVGVSYTRYADDITFSGDDKDSVRSAVEKSTKLLSLLKLEINKDKTRIFGPSSRQVVTGVVVNEWAQPSREKRRKLRAELYQAKLNPGKYASRADELQGMSAYMLSFAGENRPVGGLSQGYVESSLARLTAYINAMKEQESSTVPPSAP

SEQ ID NO: 6972 - protein, 495 aa, Pseudomonas sp.
  source 1..495: note = Related to NZ_WTFT01000007.1; note = Pseudomonas izuensis
MAIIVNVQLVRLALGCIQPADANSVSKFLGASLIGDDNLLSPSVIQTVFDGWIADGDVVSVHKKSQLYSLTRQGDKKLNPKERKVRDRTRLFLLKNLRAAKLHLPEAGESEKADVSSAVIVDQPLQEDERPTGAVCPPRVARRADRACWPLLAKQLFVGSSSRASGPFFRFLSFPTIKACAQANGLDSIPSDGIGLNEISLALGISPQLIGLLIHKPERHYRTFQIPKSNGGTRNIQSPRTMMKVAQYFLLDYVLYRCPVHVSAMAYSRGCTVRNNAEVHVGRRFVANIDVENFFPSLSRKIVFRELIASGMETNMASLVSRLTSYNDGLPQGAPTSAALSNIALYRIDDEVFNYCQSIGVEYTRYADDITFSGESLEAVQGAIEKIKALLNSIGLVINKSKTRIFGPSSRKVVTGVVVNEWAQPTRKSRRKLRAELHQATLNPEKYAGQIDVMRGKAAYMLSYAGEGRPVGGLPRGYVESSLAKLAAYIKEHKG

SEQ ID NO: 6973 - protein, 334 aa, unidentified
  source 1..334: note = Related to VBQC01000296.1; note = Verrucomicrobia bacterium
MLPALYPFGTAQRWLEVAPAFFDETGVAQAQQLLEKGVIPVQLGPEIAIYLGVSPKLVSHMVIRPSRYYNTFEITKKNGSRRLITAPRVFLKTVQRYVLDCILSQVQPHDAAVGFRRGRNCGDGARRHVGRPYVWNIDLADFFPTITKQLVVGVFRDIGYPDAAALFLGGLCCLERRLPQGAPTSPALANLVAIPIDIELTAIAESAGMLYTRYADDMTFSSTTLISADFRARVTNAVESFGFSLRATKTRLMGPATRREVTGLTINQQVSIPRHRRRQLRAYFHHISRSPEQYAEQRQQALGYARWLYDYHREEGSNALRIVANIPIPPTNQF

SEQ ID NO: 6974 - protein, 333 aa, unidentified
  source 1..333: note = Related to DNJA01000297.1; note = Deltaproteobacteria bacterium
MSVHPFLYPLGTAERWISFLSSCLDLSKNDLSKAKVLLNKQLVPVIHGPELGIYLGVSPKLVSAMVIRTSRYYRGFKIKKPSGGNREIWAPRVFLKTVQRYVLDCMLAPIVPHEAATGFRRDIGIRDGAQRHVGRPFLWNIDLKDFFPSINQSQVTGLFSQLGFPHQASYFLSGLCCLRGKLPQGAPTSPAIANLILFPTDTEIGTLARRNRIIYTRYADDLTFSGTHPISDEFRREVGVLIESAGFRINKSKSRLMGPRCRREVTGLVVNRKVSIPRETRRKLRARFHRVSVHPERFTKQKGKLLGYASWVSQYRPKEGHRYRAIAEAIPSE

SEQ ID NO: 6975 - protein, 342 aa, unidentified
  source 1..342: note = Related to NC_016631.1; note = Granulicella mallensis
MITPLVSFTSFAQFEQALRDSRVSAHSGASFSNSLEVDRLVKSARELYGRGLPPIVSSRTFSLLFGVSPRLISAMTKSPEKYWRTFEIKKRSGKGRNIAAPRVFLKTVQRFLLRFVLEKIPIHPNAFGFAPGKGIFKHAERHLKARFVLTLDIADFFPSISWTQVRDIFANIGFPDGVPSLLADLCTRNKVFPQGAPTSPYLSNLIFLKTDEALTEAANQFEMRYSRYADDLTFSCDSQPSDEARLAFEQIIRDAGFRIQHSKTRLRGPSQAREVTGLLVNEKIQPSRHTRRLLRAKFHNLLRSTSLEQETLPSLGGWASYVNSYDVVKGEEYLSIVRSKAR

SEQ ID NO: 6976 - protein, 332 aa, unidentified
  source 1..332: note = Related to CP011392.1; note = Dehalogenimonas sp.
MNSLPLLVSLEHTPDVIAALNSEFNMTEIETRRAISLLDKGLPPLFRPEVIAYLFGVSHRLVSNMSRFSDNYYRCYKIPKKSGGFRNIETPRIVLKVIQRWINTSILSKIVVPEYITGFAEGRNIFVNGHIHIGTRNMLVIDIADFFPSVFGRKVMYIFRNLGFPVQVARLLTGLCLYQKRLPQGAPTSPALANHAFHSVDVTLEELASEWGCNYSRYADDIAFSGERFFEDSDLHKIEDILEQHKFRINHNKSHISGSGSRKMLAGLVISEKCIPPRKKRKIWRAIFHNAANNPAILRDKLPYLRGVACFVKQYDEELYQKYRIIIDSVAP

SEQ ID NO: 6977 - protein, 337 aa, unidentified
  source 1..337: note = Related to JACPQM010000002.1; note = Chloroflexi bacterium
MNPLPLLVSLPREPESIDVLAGELDLTPDERSLAVSLYSRGLPPLVHRKCLPYMFGVSPRLIAAMQKRAEHYYRRFTINKQGGGTRAIVAPRRFLKLIQTWINGHICSKERMPECVMGFVRGRSIFDNGRAHCKNKNVMVVDVKDFFPSVTLQQVEAVFASFGFPEEICRQLGGLCTLDGGLPQGAPTSPALANLVFLSVDERLSRQAAEWNCTYTRYADDIVFSGARHFISEDVACLREILRQGGFTINDRKTRIVGQGGRQTVTGLVVNGKALPPRSKRRRWRAMFHRAANHPHEFFDRARSLAGIAAFVNQYSSERATEYGRIAQEVREKSQHR

SEQ ID NO: 6978 - protein, 319 aa, unidentified
  source 1..319: note = Related to JAGQPF010000708.1; note = Planctomycetales bacterium
MQYLASELKWYDNSLESALALYRRGLPPLVTLPTLAFLFGVSPSLVASIVAAPEAHYRHFTIPKATGEPRSISTPRVVLKTIQRWIHDWILPHANLHRDAHAFRKSRSIFSNAQSHVGQVNLLAVDLADFFGSVRFEQVAAIYEDLGFPWVVAAQLASLSTLGGSLPQGAPTSPALANAVFHDIDVMLAEFANGRTASYSRYADDLAFSSTYHRFSVSDVDAVSGIVGVGGFRLNPRKTQIVGGGYRHQVAGLSVASHPQPPRWKRRRWRAMFHQASVDPSSFQNEAAKLAGVASFVNQYRPDLAESYMEIAIRASRTP

SEQ ID NO: 6979 - protein, 433 aa, unidentified
  source 1..433: note = Related to QFWV02000004.1; note = Oceaniradius stylonematis
MPPKRLFDLGHALKAVFTSKTGSCCRCQLAPTTSLKILPTLKRYFARNKEACPKRKLQFSVNGGCRPYRPPVHCRCXLGISPKTIFSIRHRPQKHYRSFPLKKKDGSKRDIDTPRTYLKVIQWWILDNILNQVEFAEYVFGFVAGRSAVQNAEYHLGAKHVLNTDIRQFFPSITIDQVQAIFRSFGYQDDVTNMLSELCCLDGHVPQGAPTSPAIANLVLQELDMELSVLAERAGHRYSRYADDLTFSSQSWIERDFLNLVESAVQVAGFELKPEKTRFSGSEGRMEVTGVVINEKPQPTRLWRKRARATLHKLSLLPRLTRRELSYLQGVVGMAGQFPKSAQMQQLSESARLVIEKKSATIIGVGTKPTLPNGLTFRQAEALASLAPRRTNIEIALRLGASVAAVKKRLQEAYKKIGVNDRQEAMIWATRNL

SEQ ID NO: 6980 - protein, 407 aa, unidentified
  source 1..407: note = Related to JAGRMS010000295.1; note = Pseudooceanicola sp.
MPTRSYYFPKDFLHLEEILRAEPDGFPDEQATRFRDLGLPPIPTMGALPLFLGISPKTIFSIRHLPKKHYRSFLLKKKDGSKREIDTPRTYLKVIQWWILDNILSHAEIAANVFGFVAGRSAVQNAEYHLGAKHVLNVDIRQFFPSIKLDQVRTIFRSLGYQDDVANMLSELCCLDGHVPQGAPTSPAIANLVLRELDIELSNLADAAGHRYSRYADDLTFSSQSRIESEFLNLVESAVQVAGFELKPEKTRFSGFEGRMEVTGVVINEKPQPTRVWRKRARATLHRLSLSSRMTRRELSYLQGLIGMANQFPKSPQMQQLSESARLIMEQKSQTIIGRGTKPTLPNGLTYRQAEALAGLAPRRTNIEVAVRLGTTEAAVKKRLQEAYRKIGAADRQEALIWAVKNL

SEQ ID NO: 6981 - protein, 393 aa, unidentified
  source 1..393: note = Related to JAAZTG010000053.1; note = Rhodobacteraceae bacterium R_SAG4
MEKILQAEPGGFSEEEAEQFRELGLPPMPSVGALPLFLGISPKTIFSIRHSPKKHYRSFPLTKKDGTKRDIDTPRTYLKVIQWWILDNILNHVPIAENVFGFVAGRSAPQNAEYHFGAKHVLNVDIRQFFPSITIDQVQEIFSSLGYEENVAGMLSELCCLDGRVPQGAPTSPAIANLVLRKVDTDLSALSTQAGHRYSRYADDLTFSSQSWIDRNFLNSVQKIVEGAGFELKPEKTRFSGSEGRMEVTGVVINEKLQPTRVWRKRTRAKLHRLSLSVRLTRREISYLHGVIGIAGQFPKSTQMQQLSESARIVIEQKSQTVIGIGNRPTLPNRLTIKQAEALAALAPGRTNSEIALRLETTEVAIKKRLQEAFRKVGVFERNQAFKWAQTNL

SEQ ID NO: 6982 - protein, 407 aa, unidentified
  source 1..407: note = Related to NZ_QDFI01000072.1; note = Phycocomes zhengii
MPTRSYYFPKDFAHLEEILRAEPGNFPDDETARFRELGLPPIPTTGALPLFLGISPKTIFSIRRRPRKHYRSFPLKKKDGTKRDIDTPRTYLKVIQWWILDNILNHVEIAENVFGFVAGRSAVQNAKYHLGAKHVLNVDIRQFFPSITIDQVREIFVSLGYKEDVAEMLAELCCLDDRVPQGAPTSPAIANLVLRGLDEQLSRLADEAGHRYSRYADDLTFSSQQRIEPAFLDSVQQEVEQAGFELKPEKTRFSGFEGRMEVTGVVINDKMQPSRVWRKRTRAKLHRFSQATRLTRRELAYLQGILGMAAQFPESIQMLKLSKDAAGLIEAKSHTVVGRGESPVLPSGLTLRQAEVLAQLAPKRTNIEIAMRLGTTESAVKKRLQGAFRKIDVTERHTAERWASENL

SEQ ID NO: 6983 - protein, 393 aa, unidentified
  source 1..393: note = Related to NZ_JAEG01000002.1; note = Ciceribacter selenitireducens
MEQILWAEQDGFSEEQAMHFRNLGLPPIPTVGSLPLFLGISPKTIFSIRGKPRKHYRSFPIRKKDGTPRYIDTPRTYLKVIQWWILDNILNHVQIADNVFGFVSGRSAVQNAEFHLGAAHMLNIDIEQFFPSITIDQIRAIYGSLGYGAEVANLLAELCCLDDRVPQGAPTSPALANLVLRDLDKELSRLALQTGHKYSRYADDLTFSSSHRIETEFLDAVQTAVEQEGFNLKPGKTRFSGLGGRMEVTGVVINEKTQPSRVWRRRTRATLHKLGNSPRLTRKNVSYLLGIKGMAKQFQNSPQMQRFSLDVEQLLEAKSQTVIGKGTRPILPNRLTIRQAETLAALAPRRTNMEIAMRLETTEAAVKKRLQEAFKKIGVVDRTEALNWATHNL

SEQ ID NO: 6984 - protein, 407 aa, unidentified
  source 1..407: note = Related to JACFOS010000001.1; note = Bartonella sp.
MPTRSYYFPDDFQHLERILFEEYGNKYEDELSFYRKRRIPPITNTGIFPIFMGISPKIIFSILKRPEKYYRSFSIQKKDKTKRLIDTPRTYLKVIQWWILDNILNHIDVAPNVFGFVIGRNVFQNAEFHLGAKHILNVDIKQFFPSITNEQVKNIFSSAGYKEDVADMLTCLCCYKGRVPQGAPTSPALANLVLRQLDKSLSSIAEENNFKYSRYADDLTFSSLEQINVNFLNDVKEIIEREGFNLKPEKTRFVGSGGRMEITGIVINKKMQPDRIWRKKTRATLHQFKYKTRLTRRDISYLFGIKGVTKQFPDSPQMQLFLKEADNIIQEKSETIIGRSNNPILPHGLTLRQAQVLVELRPQIKNIEIAKRLNISEAAVKKRLQEAFKKIGVTNRRDAEIWAKSNL

SEQ ID NO: 6985 - protein, 407 aa, unidentified
  source 1..407: note = Related to PCOI01000001.1; note = Ochrobactrum sp.
MPTRSYFFPPDFSHLEEILRAEPEGLPDDLQNYFRGKSIPPIPSEAALPRFLGISPKTIFSIRRNKEKHYRVFGITKRDGTRREIQTPRTYLKVIQWWLLDNILDNAKVADNVFGFVAGRSAIKNAQYHYGANHILNVDIQHFFPSITQAQVVSVFEEIGYGKDVSRYLAELCCFRERVPQGAPTSPAIANLVLAALDKELTIIAENANCRYSRYADDLSFSSTELIDARFLNEITNAVAQAGFTLKKTKTRFAGKGERMEVTGVVINEVIQPTRDWRKKVRAKLHRLSAISRLVRADVNFLYGIRGMAAQFPESPQMTALASKAEELCRSRAHTVIGHGPNPLLPNGLTLSQAEVLANLRPRNTNYDIAIKLGSSEAVIKKRLQEAFRKIGSADRTQAERWAKENL

SEQ ID NO: 6986 - protein, 407 aa, unidentified
  source 1..407: note = Related to NZ_AYPY01000034.1; note = Rhodobacter capsulatus
MPTRSYYFPQDFKHLEEILRAEPDGLPDEVCEHFRARGLPPITSEGALPRFLGISPKTIYSIRLNSRKHYRKFDLKKRDGTVREIHSPRTYLKVIQWWLLDNLLNRVKLADNVFGFVSGRSAVQNAEYHKGSTHLLNVDIQQFFPSITQEQVEDIFGRLGYGPAVAKMLADLCCMNRRVPQGAPTSPALANLVLEDLDKALADLAARFGCRYSRYADDLTFSSHVRIDEALLVEVTATVQKAGFQLKEAKTRFAGCGDRMEVTGVVINDVLQPPRDWRKKTRATLHKMGSRGRLTRADIYYLYGIRGMAAQYEASQHMQALRVAAEGLMKAKSHTVIGFGAKPSLPNGLTLRQAEALAELGPRRTNSEIAAKLETTEAAIKKRLQEAYRKLGVADRAEAERWAKKNL

SEQ ID NO: 6987 - protein, 407 aa, unidentified
  source 1..407: note = Related to NZ_LPZR01000055.1; note = Tistrella mobilis
MPTRSYYFPKNFTHLEAILRAEPDGFPDEQAIRFRDLGLPPIPTAGTLPIFLGISPKIIFSIRRRPRRHYRSFSLIKKDGTERTIDTPRTYLKVIQWWILDNITSQVEISRNAFGFVRGRSAVQNAGHHLGAQHILNVDIRQFFPSVKIAQVFEIFMSIGYNEEVAEMLSELCCIDGHLPQGAPTSPSIANLILRDLDENLCNLADRSGCLYSRYADDLTFSSHSRINDNFLESVRKEVENSGFKLKSEKTRFSGRGDRMEVTGVVINEKLQPPRDWRKLTRAKLHKLDSSNRLTRRQLSYLQGVMGMAPQFPDSPQIQQLSEKARLIAEQKLHTIIGHGPRPILQNGLSLRESEALAALVPSKTNLEVAIQIGINEVVLEKRLERAYKKIGAENRQQAISWADQNL

SEQ ID NO: 6988 - protein, 407 aa, unidentified
  source 1..407: note = Related to JAAMCC010000006.1; note = Agrobacterium tumefaciens
MPTRSYYFPSDFRHLDEIIKLEVDGLSSADLDHFRNLNMPPLLRAGTIAIFLGISPKTIYSIRRNQSKHYRSFCMKKSDGSLRNIDTPRTYLKVVQWWILDNILNKVVFNSNIFGFVPGRSAIQNAQYHMGAQHLLNVDIQDFFPSISIERVRAIFSTLGFNEEVATVLSELCCLHDRLPQGAPTSPAIANLVLRDLDSDLSRIAEAEWYKYSRYADDLTFSSMTKIEDTFLDQVYEAVNRAGFALKPAKTRFSGRGGRMEVTGVVINEKLQPSRDWRKTTRSKLHRLRDAARLTRKEVAFLFGIKGMSVQFPDSPQMQSLAFEAENILKQKSHTVIGRGKQPVLPSGLTLRQAEVLIKLRPHKTNAELAYELGTTEAAVKKRLQEVFKKVSVTDRIEAKQWADENL

SEQ ID NO: 6989 - protein, 345 aa, unidentified
  source 1..345: note = Related to NZ_CP045420.1; note = Maribius sp.
MPTRSYYFPTEFSHVEQIIRAESTADRETSFAEFRHLNIAPIFSGYELANILGIGPGLLIGILRNPHQNYRQFPVVKKGGGTRQVSSPRTYLKVIQWWILDNILTHLETPDIVFGFKRGTSINWNARHHLGSRHFLNVDIASFFDSVTEVSVYDLFSRLGYADSVSSVLCQLCCLNGSLPQGAPTSPAIGNQILKPLDNSLCELSSEHGIKYSRYADDLTFSSRDFIAQDFLDAVRLRVAEIGFELKDEKTRWRGPGARTEVTGLVVTDFVQPPLKWRKQCRATLHHLGKKERLEQKDIRYLEGILGYASSFEDARQMQALKATTARLLEEHRFPFTEVDRKNTR

SEQ ID NO: 6990 - protein, 339 aa, unidentified
  source 1..339: note = Related to QKMF01000007.1; note = Pelagimonas varians
MPTRSYFFPPDFQHIEAILRSDDPMADELQFEKFRERGVAPLLTEFDIATVLGIGPKLIVSMLKKPNRHYRTFPLTKKDGSERQISAPRTYLKVAQWWILDNIVSRVPASENVFGFCRGRSIQDNARYHLGSTHILNVDIKSFFDSVTFSQVLLVFKELGYSQPAAKTLAGLCTLNGKLPQGAPTSPNIANMVLSKVDRELEALASSVGSKYSRYADDITFSADDYISEQFQVRVEDVVKSAGFELKASKTRYAGTGSRREVTGLICGTFVQPPIEWRKLNRARLHNLGKKPVLEKSDIAYLLGLRGYSMQFPDAVQMQALLAGADKLLLSTKKPVPET

SEQ ID NO: 6991 - protein, 334 aa, unidentified
  source 1..334: note = Related to VHLH01000001.1; note = Pararhizobium sp.
MPSRSFFLPPDQLANAAVLAEANPPERHDEIMRLASRGIAPLVDEVSLAELVGVTPSLIFSILIRKDKHYRSFCLPKANGSTRIINSPRTYLKVIHWFILDNILSKVKNNDCVTAFISGRGPYFNAQMHSGAHHIFQTDLEEFFPSIKVQNVYRMWLSIGYNQEVAEQLSNLVTYRGELPQGAPTSPAISNIVAGNLDKRLLKLAYEYGYKYTRYADDITFSSKERIPLEFADAVNEQIVLGGFIESRRKRRFKGFGAAMNVTGLNINDFPQPPREWRKRTRALFHRAKLDAAFAKENRGKIAGSLGVLHAAGLPSQHPLILNGKEALLNSKNY

SEQ ID NO: 6992 - protein, 344 aa, unidentified
  source 1..344: note = Related to VZUL01000002.1; note = Neorhizobium galegae
MPPRSYYNEPRPSDYVAFAKAFFPDELQAASEFAETRGLPYINSSAHIAAYLGVSASLLRQVIHKPAYHYREFPIKKASGADRIVSTPKTYLKVIQWWIADNILNKIQLSDSVHGFRRGKSYFTNASVHLNSKHILNVDVESFFDSITFAQITNVFNSLGYTEAGSLTLATLTSKNGIAPTGAPTSPMIANAILRSLDSHLEAFAAKSNLLYTRYADDLTFSSPEWIDQSVVDAVTKYVESQGFKLNAKKTKFMGPGDRMEVTGLVTNAGLNASKEWRNWARGFLHRVSREPAKHIGEIERVRGVYGVLRQLDPEKHKKLTVAAEQAMGHLADVKRALAGSKQS

SEQ ID NO: 6993 - protein, 341 aa, unidentified
  source 1..341: note = Related to JACHXX010000002.1; note = Rhizobium laguerreae
MPPRSYYNAPRPSDYVAFATAFFPEDSDNAGKFADQFGLPYLESTRHLAGYLGIAPSLIRQIIHRPAYHFREFKLTKSTGEERLISTPKTYLKVIQWWIADNILDKIDLSDNVHGFRKNRSYISNAIIHRDSRHILNVDVKSFFSNIKIDNIFNVFSALGYGDAGSLLLSTLTSKDGMAPTGAPTSPMIANAVFRDIDTQLSKFSQQMGLLYTRYADDLTFSSMEWIEHDVLEAVSQIVESGGFNLNSAKTKFMGPGDRKEVTGVTVNAGLNTSKEWRNSVRGYLHRAFSNPADYIADAAKVRGIYGILLQFDPTKAKRLTQTAEQTMLRLLKAQRDSASS

SEQ ID NO: 6994 - protein, 344 aa, unidentified
  source 1..344: note = Related to CP061772.1; note = Ochrobactrum sp.
MPPRSYYNSPRASDYIAFARAYFPDEQEQANSFVNTYNLPYISSSHHIAAYLGISSALVRQIMHNPNYHYRVFPIQKSSGDPRMISTPKTYLKVMQWWINDNILNKIQLSESVHGFRKGKSYITNARVHFGARHILNVDIKSFFDNITTPQIANVFSSIGYCESGSLTLAALTSKQGKAPTGAPTSPMIANAIFLKADEQLIEFARSKGLRYTRYADDLTFSSDHRIDEEVVGKVNAIVKSSGFQLNDKKTKFMGPGDRQEVTGIIINERMNLSKEWRNFARGYIHSILSNPSGNIQEMGRLLGIYGVLLQVDQNKESNLTKNAYKAIRILKDTEQTTTHAEPS

SEQ ID NO: 6995 - protein, 338 aa, unidentified
  source 1..338: note = Related to JABBGK010000003.1; note = Rhizobium sp.
MPPRSYYKEPRVSDYIAFADAYFPEERNLAAEFAERTRLPYVESSKHLAAYVGVSPSLLRQIMHKPSYHYREFPLHKADGSERKISTPKTYLKVVQWWVLDNILARQALDECVHGFRSGRSYVTNARVHQNSRHILNVDIKSFFDSIKMSQVANVFLSLGYSEAGSLTLTALTTKDGVAPTGAPTSPMIANLIFRDADLALAEFAEANGLIYSRYADDLTFSGQHRIPDEAVAKIAEIVNAAGFELNIKKTKFMGPGDRQDVTGVVVNSGLNAPREWRNWARGYLHRVRLNPDKSAEELGRVRGVYGILRQFDPERTKSLTRAAFETLEALKQYRTEP

SEQ ID NO: 6996 - protein, 335 aa, unidentified
  source 1..335: note = Related to WBWH01000007.1; note = Brucella intermedia
MPPRSYYVDSRISDYIAFASAYFPEEKALAVEFAERTGLPYIESSMHVAAYLGVSPSLIRQIMHKPSYHYREFTLKKTDGGERKISTPKTYLKVVQWWILDNILARQPLGECVHGFRSGRSYVTNAQTHEKSRHILNVDIKSFFDSIKISQVSNVFASLGYSESGSLALTALTTIDGIAPTGAPTSPMIANLIFRDADVSLVAFAQANGLIYTRYADDLTFSAQHRIAEEIVDQIAEIVDAAGFRLNTKKTKFMGPGDRKDVTGVVVNSRLNAPREWRNWARGYLHRIRLNPTENAGEVRRVRGIYGTLRQFDPEHATSLTRIALQTLNVLKQAR

SEQ ID NO: 6997 - protein, 364 aa, unidentified
  source 1..364: note = Related to VFUS01000001.1; note = Mesorhizobium sp.
MAALQPRAEFSSASYKARTKQSQDWCCRMPPRSYYNSPRIDDYLAFARASFPEESEAAGAFANRTGRPYLENEIHLASYLGISPSIIRQILHRPRFHYRTFILKKADGTNRIIRTPKTYLKVMQWWINDNILITKEMAEAVHGFRKGRSYITNAAAHAGAKHLLNLDISRFFPSITAQMIVGVFRNLGYSAAGSDFLARLTSLDDEAPTGAPTSPLIGNLILDNFDQTVSELSAARNITYTRYADDLTFSARTRIDNEFLKEVTAFVESSGFDLNPKKTRFLGKGDRMDVTGVVINEGLNLPVEWRNWARGYLQRAIRNPVEFVQHHPAIAGIFGVLKSIDPDEQRHLTQKAKSALTAIRSAGA

SEQ ID NO: 6998 - protein, 336 aa, unidentified
  source 1..336: note = Related to JAIUGX010000003.1; note = Mesorhizobium sp.
MPPRSYYNSPRVDDYLALARAFFAEDADAAAAFAEVERRPYIESETHLASYLGISPSIIRQILRHPKFHYRTFKLKKADGTNRIICTPRTYLKVIQWWISDNILYTEQPDVSVHGFCKGRSYITNASAHSGAKHLLNLDIRKFFPSITEEMIVGVFRTLGYSPAGASLLARLTSLNGEAPTGAPTSPAIGNLVLAEFDKAVSAAATANNILYTRYADDLTFSSQNRINEDFLATISTLVQSSGFELNLKKTRFLGRGARMDVTGLVINQGLNLPIEWRNWARGYLQRVVRNPAAFIDHRSTIAGILGVLKSIDPTEDRGLTQKAKSALRAIQEQAS

SEQ ID NO: 6999 - protein, 338 aa, unidentified
  source 1..338: note = Related to NZ_CP049037.1; note = Pseudohalocynthiibacter aestuariivivens
MPPRSYYIEPKQSDYLAIAKAFFPEELNDARDFVEQTGLPYLKTSAHVSSYLGVSPKLVRQILHKPSYHYRFFEIPKSDGSLRAITTPKTYLKVVQWWICDNILNQMPLHDCVHGFRSGRSYLTNAKAHFGQKHFLNVDIESFFPSIGADLVEATFLEMGYHSDGASVLRDLVTLGGAAPTGSPTSPMIGNLVLAKFDALLTEYVADRGFVYTRYADDITISSKHWIDDEVLGDISALVQKFGFRLNERKTKFMGPGDRQEVTGIVLNSSPNIPRNWCNSVRGYLHRVKLAPHKHVDEHAKVQGILGTLLAADPEAERKITKAAREAAHLVMLERLMQ

SEQ ID NO: 7000 - protein, 333 aa, unidentified
  source 1..333: note = Related to DQCL01000311.1; note = Octadecabacter sp.
MPPRSYYLEPQKTDYLAFAKAYLSDEYGIAKAFIDEKGLPYIRNADHLAAYLGVSPSLVRQILHKKEYHYRQFPLPKADGPPRLISTPKTYLKTIQWWIGDNILSHVALGDEVHGFRQGHSYVTNARVHLGCNHILNMDIEQFFPSITKPMTTSVFTSLGYGKEGAGVLAELCTLDGSTPTGAPTSPAIGNMVLVDFDRAMTKLAGENTLKYTRYADDLTFSSNEWISPEFALQVEEVLKGYGFAPKGTKTKFMGRSDRMEITGVTINEGTNPPREWRNWARGFLHRARMNPHQYAHEWKKIAGIYGTLKSMDPDEDKLLTKRAKQVLNLVRS

SEQ ID NO: 7001 - protein, 344 aa, unidentified
  source 1..344: note = Related to NZ_CP080493.1; note = Pseudochrobactrum sp.
MPPRSYYHSPRHSDYLAYFTAYFPNELQVCRAFLEATNYPYIGNIHHLAAYIGVSSALLKKIISNVNYHYSDFTIPKGGGKERVIYSPKTYLKVIQWWICDNIFSNLKFNESVYGFVKGRNYIDNAKKHFGRKYILNVDVKNFFDSISTEDVKKIFLKLGYPISSSEILSKLCTLDNRLPTGAPTSPVIANLYFKDIDNILELESIKNGWIYTRYADDLTFSANTKINFDFLETLKNVLDEYHLKLNDKKTKFMGPGSRQEITGIVVNSVIGMPKYWRNKTRGFLHNVRKDPSNNLDKIQEVKGLYGVLIYLDPEKNRSITKQAYEVLGILKSHKKPLHETKHK

SEQ ID NO: 7002 - protein, 338 aa, unidentified
  source 1..338: note = Related to NZ_QDKO01000009.1; note = Caulobacter sp.
MSPRTYDLITNPKYIDFISESVRSGCSLEDVKFPVPSVSLPALNKAEDISYYLGISPELIWTLIRSPRYKYNTFSVRKKSGGSRVISAPRTYMKVVQWWINDVILSKFPQRDNVFGFVPGVSYVDNAAYHHGAVTMMNVDIKNFFPSIKSEDVLVCFMKIGYSKQVALGLSALTTYAGFLPQGAPTSPNLSNIVFSEFDEKISNICKLYNLKYSRYADDMTFSSIGRVPKDFHRIISRELFPKFLLNDEKTQYMGAGDKKEVTGLVLGRDGPAISREKLNGLRGWLHQIIANPEQYVDDLDRLSGTLAMVRMVGGRGTGPILLQGGRAMQAIEQSLRI

SEQ ID NO: 7003 - protein, 598 aa, unidentified
  source 1..598: note = Related to NZ_UIGE01000001.1; note = Brevundimonas diminuta
MTFPADFRRVTTREALITAIGTDEATFEAILAFDPPRTREEQIEALQRAADAASIEDIPVFLRHDIPKRNRRRGHRTVWEPLLGKPGYRTLARRLETFFRIALPGYPHDAVYGYRPGRNIRENASAHAGRSALLNADLENFFPSITTDRVAALFTKLGLVPDVAELLARFVTIGGGLPLGLPTSPVISNAVALPLDLACAALASGANATYTRYADDLTFSGDDQLPAIDALRSVVEAQGFVLAEDKTRRSKIGQAHYVTGLSISDPAQPHVPRERKRRLRQELYYAGKFGIADHFRHRGVNDARVIQQEVNRVDGLVRFVAHHEPAMAPRLRTQWRKALQDEGMKPSFAPRGQHRAPFFIFVDEAEFDRGGQKVLAIGMAVSQHGPRMAIEAGQVLEAALADMYLDGDPAALRKRGLHFVDATEDLRIAYVRRLEGMRFEGYVAFADCDDPSRYEETYLRLLGAIIERRLKAAESQLASFYIEQNEKVSAHRVKGLIQDAFDRLKARDDRRPVDFAVQFVSKPHLGISAPDFLLAVLGRYLKSKAAKPGKPEPRDRLMFERLRDKYRLILDVTTWTEYSRRRPILPWSDQTPPSDDGA

SEQ ID NO: 7004 - protein, 594 aa, unidentified
  source 1..594: note = Related to NZ_CP066026.1; note = Brevundimonas diminuta
MTFPADFRRVTTREALITAIGTDEATFEAILAFDPPRTREEQIEALQRAADAASIEDIPVFLRHDIPKRNRRRGHRTVWEPLLGKPGYRTLARRLETFFRIALPGYPHDAVYGYRPGRNIRENASAHAGRSALLNADLENFFPSITTDRVAALFTKLGLVPDVAELLARFVTIGGGLPLGLPTSPVISNAVALPLDLACAALASGANATYTRYADDLTFSGDDQLPAIDALRSVVEAQGFVLAEDKTRRSKIGQAHYVTGLSISDPAQPHVPRERKRRLRQELYYAGKFGIADHFRHRGVNDARVIQQEVNRVDGLVRFVAHHEPAMAPRLRTQWRKALQDEGMKPSFAPRGQHRAPFFIFVDEAEFDRGGQKVLAIGMAVSQHGPRMAIEAGQVLEAALADMYLDGDPAALRKRGLHFVDATEDLRIAYVRRLEGMRFEGYVAFADCDDPSRYEETYLRLLGAIIERRLKAAESQLASFYIEQNEGLGAQGQRADPGRLRPSQGARRPSPGGLRRPVRLEAASGDQRAGFSARRSRSISQVESGETGQAGAARPADVRALARQISADPRRHDVDRVLAATSYPSLVRPDPAER

SEQ ID NO: 7005 - protein, 589 aa, unidentified
  source 1..589: note = Related to JAFLCT010000140.1; note = Caulobacterales bacterium
MAFTPDFRRLSNREAVRGALGVSEDVFQAVLTFSPEAVVGKPEMEGGFYLASSITIPVFFRHDIPKRNPARGVRTVWEPSIEVKSVYKALARRLDLFFRAHLDGFPHDAAYGFRVGRNIRENAAPHAGHRHLVATDIEDFFPSISVDRIQGLFNELGCRKDAAQALAQFVTIGGELPVGLPTSPVISNAVALPLDRDLAALAATTGSTYTRYADDIALSGDVEPPSSEEIGRVLEAQGFCLAESKTRRSKIGQAHFVTGLSISDPVRPHVPRRTKREMRQTLYYAKKFGLDDHLGYRGYSDWRTAQTEINRLDGLVKFIGHHEPTLASSLKRAWSEILRDSGNQASFEPRNQHREPFTIFVDEAEFERNGRPVLALAMAATQHPNVIHDDSDRVLQAYLSDLFADGRPEVIRKKGLHFVDATEDLRRSYVEAMRSMPFEGYVAFVEYDGAADYEAAYLCLLEAMTPRRLMAAESQMASFIFEENDKVSRTAIETCVIAVHSALVERCDRHPKCIGIDYASKPHAGIALSDFLLGVLGRYLRSEPPAPNATSRDRLRFEQLRDKYRVILDVTNGREYSRRRPIAPWADPF

SEQ ID NO: 7006 - protein, 583 aa, unidentified
  source 1..583: note = Related to JAHXZL010000012.1; note = Sphingomonas sp.
MTNREALIAAIGTDLATFDAVLDFVPPPRRVGSEAPETEKVQVLEIPVFLRHDIPKRRRKGEFRTAWEPVLAKSEYKALARRLDSFFRLTLAGFTHDCAFGFLPGRNIRENATVHSGHRHLLGVDVQDFFPTITRARIERLFTEVGVETSVAELLARFVTIGGSLPLGLPTSPVLSNAVSLPIDVACDALAARRGAVYTRYVDDMSFSSDDELPDVEDVRRILAENGFGLSERKTRRSRIGQAHYVTGLSVSDGVGPHVPRERKRRLRQELHYARKFGLADHLRHLGVNDDRVIQQQVNRLDGMVRFVVHHEPRIAPRLRTEWRALLKDNGMSPSFVPRGQHRAPFYMFIDEAEFDRDGERILALCIAITQHGPLIAGEGAAILAAAMTDPFSDGNVDALRRRGLHFADATEDLRLAYVTRLASMRFEGFVAFADLPDPAAYEETYLRLLGAMIERRLMAAESQYAYVFCEANDKVGRGGIEECVATAQRRLKDRDDRRPVGVGVEFVNKPHLGISVPDFLLGVLGRYLRSPPVPDGRPERRERLMFERLRDKYRLILDLTDWTEYSRRRPIRPWNDAGNDAP

SEQ ID NO: 7007 - protein, 581 aa, unidentified
  source 1..581: note = Related to NZ_BLAI01000019.1; note = Rhizobium dioscoreae
MSFNYDFSRITSRGSLLAALSIDEALFTQVLDFVPPPPAWSVPPSPPDEISKLMVPAFLRHDIPKRNTKRGHRTVWEPVLAKGTYKALGRRLDSFFRHKLDGYPHKSSFGYRPGRNIRENAAVHRGKKFLLSLDLQDFFPSISRSRIASTFEHLGIAPDIAALLARFVTISDALAMGLPTSPTISNAVALCLDQALEELALRSGAVYTRYSDDISISSDNALPDLALIAQIVSDNDFKLADEKTRLSVRGQAHYVTGLSISDPNQPHVPKAKKRRLRQELYYARKFGLGQHLHRQGINDPTVVQQEVNRLDGMIKFVGHHEPKLSSVIKQEWCEILTAADMKPSFAPRGMHRAPFVLVIDEAEFSRDGQRYLALCIVVSQQMDRVAEETGRVLSNALNDLWGDGNRNAMLARGLHFTDATKDLQLAYIKELATMPFEGYVAFCEYDGPKNYQAAYLRLLSAMIPRRLMAAESQYAAVLVEQNSKVSQTAITERISEVAADLKRTNNRRPKDTLSKLLSKPNPFLSPPDFLLGVLGQYLKSKPAAPEPRERLSFERLRDKYRLILDLDARAEYSRRRPIAPW

SEQ ID NO: 7008 - protein, 581 aa, unidentified
  source 1..581: note = Related to NZ_CM002025.1; note = Agrobacterium tumefaciens
MAFVYDFTRITTRDALLDALAIDGALFDQILAFEPPPPAWLESKSVRDSIGTISIPAFFRHDIPKRNASRGHRTVWEPALAMGSYKALARRLDDFFRYKLVGYPHDSSFGYRPGRNIRENAAPHRGKKFLLSMDLESFFPSISGTRVAGLFETLGVQPNVANLLARFVTLGNGLAMGFPTSPVISNAVALPLDQALQQLARSTGWTYTRYSDDISVSSDNSFPEIDQISGVIFDNGFQLAEGKTRWSRQGQAHFVTGLSISDPAQPHVPKAKKQKLRQELYYAQKFGLADHIQRKGVNDPKIMQQEVNRLDGLVKFVSYHEQKLSPRLKEQWHKIITVADMKPSFEPRKMSRVPFALIIDEAEFPRGDRRYLALCIVATQHVDKVIGSTRQVLTTALNDLWADGNRQSLLARGLHFTDATKDLQLAYIKELMTIPIEGYVAFCELHSHQNYETVYLRLMAAMMPRRLMAAESQKASIMVEQNSKVSQTLVNRCIADVFAELKRTNNRRPRDLTINFVTKPNPILSPPDFLLGVLGQYLRSKPAEPEPRERLNFERLRDKFRLILDLDNDIEFSRRRPISPW

SEQ ID NO: 7009 - protein, 591 aa, unidentified
  source 1..591: note = Related to PBXY01000014.1; note = Sphingobium sp.
MYALHFSRLKTRDDVISALTIDEALFDKIIAFEPPPPAAPRSAEPPVPKPEAAVQTIVLREPPVFFRHDIPKKNKARGHRTVWEPVNSMPAYKALARRLEAFFTMLPDYPHECAYGYRPGRNIRENASAHSGNKFLLSLDIKDFFPSITVERVRWLFEAMSIEAYVADLLARFVTIGGALPLGLPTSPVISNMIALPLDDLLRDLAGQYEAVYTRYSDDITFSGNGDLPDIEEIRPVLAAFDFAIADRKTRRSKRGQAHFVTGLSISDPAQPHVPADKKRSLRQTLYFAGKFGLAEHFQHRGINDQKVIQREVNRLDGLVKYVAHHEPRMATSLKEQWRQILADSGMKPSFTPRGQYRAPFYLLVDEAEYRRGDDKMLGLAMAVTQHPQRLADETNGILTRFLADLWSDGNDTALRKNGLHYTDATEDLRSAYVKQLATMPFEGYVAVGPLDADAGYEASYLRLLKALISRRLMAAESQFAFLIIEKNGKVAQDAIKACVQEAFDALKLADNRRPTAFGVNFVAKPNALISVPDFLLGALGKYLQSNPAAPGRPEPRERLLFERLRDKYRLIVDVDPWTEFTRRNPVKPWS

SEQ ID NO: 7010 - protein, 582 aa, unidentified
  source 1..582: note = Related to JAIQWW010000020.1; note = Phyllobacterium sp.
MEYWHDLSRLESREQLITALGIPAALFDAILAFEPPIIGCPVSDPTITTEIGIPLFIRHDIPKKNKTRGNRTVWEPLLNKSHYKALARRLGSFFRLKLDQYPHDSVYGYMSGRNIRENAKAHTGHRVLLSIDIQDFFPSITTESVCRLFQSLGVNATVSGLLSRFLTIGTTLPLGFPTSPIISNAIALPIDLELKALADLIDATYTRYADDLSFSSNGKIPDVEEVRAILGSNGFKIADAKTRQSKIGQAHYVTGLSISDPLRPHVPRERKHSLRRELYFARKFGLADHLRHRGVNDDSVIQQEINRIDGFVKFVAHHEPRMAADLKTGWREILLANGAKPSFTPRGQYRAPFYIFIDEAEYVKTGHKILALGMTVTQHAQELISQTSEVLSSARADLWAAGNTEILLKKGLHFSDATEDLRLEYVKRLAAMPFEGYVAFAPCKSPADYEATYLRLLSALIPRRLMAAESQFVFIYCEENSKISRDEAKAKIQRAFDDLKASNNRHPKGFAVEFVSKPNLGISAPDFLLGVLGTYLRSEPSPLGKPEPRERLMFERLRDKYRLILDVETWTEYSRRRPIEPW

SEQ ID NO: 7011 - protein, 584 aa, unidentified
  source 1..584: note = Related to NZ_LMRE01000023.1; note = Methylobacterium sp.
MKFHYDFRRLRDKQQLLDFLGITEAFFELVVSFEVPTDPPPPPVYAGGIEELSIPPFLRHKIPKKNKNRGCRVVWEPLLFKTTYKTLGRRLNNFLVNFLSNYPHPAAYGYLGGRNIKQNAAAHCGHKFLISADIVDFFPSITCERIKNLFIDLELVPDVAIALSRFMTISGALPLGLPTSPILSNAIFLPVDIELQYLASQAGATYTRYSDDLSFSSDRKLLILEQIGKSLQDNGFKIAEEKTKISRLGQAHYVTGLSITDPNGPHVPRDKKRRLRQELYYAKKFGLNDHFKHQEVTDAKAQQHNVNRLDGLVKFVSYHEPKHSARLKSQWSQILISSGSRPSYEPRRQKRVPFCICIDEAEFQFSQGVVLALGMSVSQHQDELDMAAAEVLDKWLSDFWAAGNQRVIEKRGLHFVDASEDLRLQFVTRMQALPFEGYISFGRLLSPAYYEETYLRLIESIIRRRLMAAESQLALFVIEENSKVSNQSVRAAIDRAYDELKSSNNRRPRAIIVQFRSKPDLSISFPDFLLGVLGKYLRSRDQKLGTPIPRDRLLFERLRDKYRLILDADTGFEFSRRREIQPWI

SEQ ID NO: 7012 - protein, 575 aa, unidentified
  source 1..575: note = Related to NZ_LMNB01000001.1; note = Methylobacterium sp.
MRTKQQLLNFLGLPEEVFEFVVNFEPPPDPQPPPIVVEGVQQISVPPFYRHKIPKKNKNRGYRVVWEPQIARLEYKALGRRLGSFFKHFLTNYPHPAAYGYLGGRNIRQNAAAHCGHRFLLSTDIASFFSSISIGQIKGLFLDLGICADVAVPLSRFVTIGGVLPLGLATSPVLSNAIFLPADTQLQALADRVGATYTRYSDDLSFSSNGNLPPIEDITKCVQIHGFRLAEGKTKTSEHGQAHYVTGLSISDPSSPHAPREKKRRLRQELYYAHKFGLNSHFQRIEAATTKDQQQNVNRLDGLVKFVAYHEPRQVGRLKPVWANILASSGARPSFEPRRRNGPPFCISIDEAEFQNDQGTVLALGMVVSQHQDQLVSAASEVLNRWLADPWAVGNRLAINKRGLHFTDASEDLRAEFVIRMQTLPFEGYISFGQLSDSSEYEATYLRLVGSIIKRRLMAADSESVLFLIEENSKISQNKVLFLIDQEFNELKLSNNRRPNKITIQFRHKPDLNISFPDFILGILGKYLRSKDAKPNAPMPRDRLLFERLRDRYRLILDADTKAEFSRRRPIEPWM

SEQ ID NO: 7013 - protein, 584 aa, unidentified
  source 1..584: note = Related to VFUO01000004.1; note = Mesorhizobium sp.
MTSLYDFSRITTREALTAVLGIDETMLDLVLTFQPPIDSPTAKNSPEAIKTITIPVFLRHRVPKKNRNRGFRTVWEPILLKSSYKGLARKLDAFFRHHLVGYPHESAFGYRPGRNIRENAQVHAGSARILSLDLADFFPNISKGHIKKLFLAMGVNATVSDLLSRFVTIEGALALGLPTSPVLSNAIALPIDLDLGILADQSNARYSRYADDITFSGNGELPTLERIEDCLRQHGFQIAEGKTRWSKRGQSHYVTGLSVSDPAQPHVPRDRKQALRQQLYYMEKFGIDDHFRRIGTNDSDVIQQALNSIDGMVKFVAHHEPCIAAPLKMQWNEILRVNGKKPSFKPKKQNREPFYIFVDEAEFKRAGTTVLALAMSVSQHEERIVQETREVLEAEMQDFWAAGNIDALRKRGLHFADATEDLRHSYVKRLASMPFEGYVAFHPCADPRNYEDTYLRLLGAMISRRLIAAESQFVCLYFEENSKVSQEAVRSLVQCAHDQLKRANNRHPKLCVVKFVSKPNFGISVPDFLLGVLGKYLHSKPAAAGGPEPRDRLMFDRLRDKYRLILDLSTWTEYSRRQPIEPWQ

SEQ ID NO: 7014 - protein, 584 aa, unidentified
  source 1..584: note = Related to WNKS01000001.1; note = Rhodoblastus acidophilus
MAYTYNFSDIRTREALLAVLGIDETMLDLVLSFQPPIDPPTVTIIPDVISTLQIPVFLRHRVPKKNRARGFRTVWEPILLKSTYKGLSRKLDVFFRHHLAGYPHESAYGYRPGRNIRENAQVHVGSARILSLDIADFFPSISKERIEQLFLGMGMNAAISDLLSRFLTIEGTLTLGFPTSPVLSNAISLPIDLELSSVARQFDARYSRYADDITVSGNGDLPSLEAVEDCLCRHGFQLAPGKTRFSKRGQSHYVTGLSVSDPVQPHVPRDRKRALRQQLYYMTKFGVDDHFRRLGINDPKVAQQAINSIDGMVKFVAHHEPRIAAPLKSLWNEILRVNGEKPSFTPKRQDRKPFYIFVDEAEFERAGTKVLALAMSVSQHEEQIFQETNEVLEAELGDFWAAGDINALRKKGLHFADATPDLRQSYVKRLAALPFEGYVAFHPCDDPCNYQSTYLRLLGSMISRRLIAAESQLVVICFEENSKVSQKSIKELVQFAHDELKRVNNRHPISCVVQFVSKPNLGISVPDFLLGVLGKYLQSKPANAGRPEPRDRLMFDRLRDKYRLILELPSWTEYTRRHPIEPWQ

SEQ ID NO: 7015 - protein, 583 aa, unidentified
  source 1..583: note = Related to NZ_CP042906.1; note = Hypericibacter terrae
MSFKYDLTQLQNREQLINFLGLSKDVFEDVLDFDPTGSNFSQFSEKESSLIELPLFFRHEIPKKNRQRGYRTVWEPTFLKSPYKALARRLNNFFAHKLEGFPHAQTYGYISGRNIRENAQNHCGHTHLVSIDLEDFFPSIKASRIATFLRTTGITPTVADLVSRFVTIEGSLPLGLPTSPTIANAICLPMDIELEALAQKLGATFSRYADDISFSSDGTFPSLRELMACIRQHNFEIAEAKTRTSKLGQAHYVTGLSVSDPAQPHVPRKKKRRLRQELYYADKYGLDDHLHHVGLGNSRFAQQEINRLDGLVKFTAHHEPRLSAHLKTTWAKILQTSGHRPSFAPKNQHRLPFYIYIDEAEYARPSGDRLLALAMAVSQHQEQINRATQDLLETTLSDVWAAGNLDAIAKKGVHFSDATEDMRLAYIDRMRLLPFEGYVAMARLPSAADYEVVYLRLLNAMIKRRLMAAESQFANLVFEENSKVRQEAIRKTVTDTYDALRESNNRHPEYCSVEFAGKPNFGLSIPDFLLGVLGKYLTVGPQQDGKPAARYVLLFERLRDKYRLILDVDNWVEYTRRRPIIPW

SEQ ID NO: 7016 - protein, 583 aa, unidentified
  source 1..583: note = Related to JAFKFG010000017.1; note = Alphaproteobacteria bacterium
MTFRYDLRLLNSRKSLLAFLGVDEIAFEKVLSFDPVSAQMSIGIEDDIHFLEAPLFLRHKIPKKNRARGYRIVWEPTAFKSEYKALARRLSNFLSHRLNGFPHSRTFGYIGGRNIRENARDHCGHRHLISFDLENFFPSISAARITKLLISTEIDPGIADLLSRFMTINGSLPLGLPTSPTLANAICLPMDIELQLLAQQHLATFSRYADDINFSSDTSLPPLEKFATLVKSNGFEIAKSKTRISKLGQAHYVTGLSISDLAHPHVPRHKKRRLRQELYYAQKYGLEDHLVRRGINDHQLIQHEINRLDGLVKFIAYHEPQLSAKLKTNWADILQESGRRPSFSPKNQARPPFCIYVDEAEYVRPDGTRLLAMGMAVSQHQDRVVQAAKDVLEETISDQWAAGNKPAIVKRGLHFADAHPDLRLAYIRRMRSLPFEGYVVMARLDSTASYEGTYIRLLNAIIRRRLMAAESQAALLVFEKNDKVSQVTIRQAVMQSYESLRKSNNRRPVGCYIDFVSKPDLGMSVPDFLLGILGRFLRSGPGKMEDQFDRDRKLFESLRDKYRLILDADSWVEYSRRREISPW

SEQ ID NO: 7017 - protein, 587 aa, unidentified
  source 1..587: note = Related to NZ_JIAX01000009.1; note = Ahrensia sp.
MAFNYDLRRIKTKEQLLTYIGLEEMFFDRALTFNVAEYEALMAEPVVEMGIKELYLPTFSLHEIPKRNPKRGKRTVWEANSHINDALKGLSRRLTLFFETVVPGFPHPQNCGYVRGRNIRENAQFHIGAKYLLKADIENYFPSISIGRISTFLERLGVASEVAKLLSNFLSIDGKLPLGLPTSPIIANAISHIMDIDLNSLAEKHGAIYSRYADDLTFSSEGELPTEMAISEIVELHDFTLALDKTRLSKRGQNHYVTGLSVSATDAPHAPKRMKRSLRQELHFSKKYGLDDHLEHLGLSHHFARQSYINHLDGRVKYIAFHEPNLASKIVPLWQEILEESGDSPSFKPKNQNRKPFQFYVDEAEFELNGIKYLALGMSGTQHQDHLNDVTEKVLEDYLADPWSDGNREKIDKKGMHFTDTTEDLRKIYLSALQPLPFNGYIVFGKLTADYQDCYLELLRFVLKRRLMAAESRAAYFHFEQTSKVSKDAITKTVDDVWKELLRENNRCPEYVVIDIVDKKYFGVAVPDFMLATFCRYLTTNLSENDYRRKANMFEMLRDKIRLIVNADTGEEFGRRNPLVNPDIENL

SEQ ID NO: 7018 - protein, 587 aa, unidentified
  source 1..587: note = Related to NZ_QKZJ01000005.1; note = Celeribacter halophilus
MAFDYDLRRIKTKGQLLTYIGLEEYFFDKALDFSVTEYEARMAEYSNKTDIGSLFLPLFWKHEIPKRNPKRGNRVVWEADSHINNALKGLARRLTLFFGTVIPDFPHPQNCGYVRGRNIRENAQFHIGAKFLVKADIEDYFPSISFERVSKFLENLGVNAGIARQISNFLCIDGKLPLGLPTSPIIANAISHLMDFNLNSLAQTHGSVYSRYADDLTFSSDDTLPSEDDISKVVEHHGFALAADKTRHSKRGQNHYVTGLSVSESDAPHVPRRMKRSLRQELHFSKKYGLNDHLGHLGLRGQPERQSYINHVDGRVKYIAFHEPGLAATIVPLWQSILEESGEGPSFKPKNQNRVPFQFYVDETEFTLDGVKYLALGMSASQHQDHLNDTTQNLWEDYLANPWSDGALDQIYAKGMHFTDTTEDLRRTYLSALQPLPFNGYIVFGKLTSDYQETYLTLLKFILRRRLMAAESRAAHFYFEQTSKVSKDSLTRTVNAVWQELRNENNRRPEYVVTEIVDKKYFGIAVPDFMLAVFRRYLTTTPSEKDYRRKANMFEMMRDKIRLIVNADTGEEFGRRNQLANPNIEDL

SEQ ID NO: 7019 - protein, 587 aa, unidentified
  source 1..587: note = Related to LIKT01000008.1; note = Phaeobacter sp.
MAFDYDLRRVKTKDQLLTYIGLEDIFFTNASDFDVHKYEARLAEPLVEMGIAQLHFSPFYKHEIPKRNPKRGSRVVWEASGHLNNALKSLARRLTLFFEMIISNFPHPHNCGYVRGRNTRDNAQFHIGAKYILKSDIENYFPSISLRRLISFFESLGVNSGIAMQLSHFLCIDQKLPLGLPTSPIIANAISHFMDIDLNGLADKYKAVYSRYADDLTFSSNGNLPQVSEVSEIVARHKFQLSSDKTKYSTRGQNHYVTGLSVSEENAPHAPRKMKLALRQELYFSKKYGLNDHLDHLGISDSYQRQSYINHLDGRVKYVAFQEPRLASKIGPLWQEVLEDSGEAVNYSPKNQHQTSFQFYVDETEFTLDGEKYLALGISASQHQEQLNNVTKRIWEDYIANPWSDGDLDAITKNGIHFTDTTEDLRRTYLTALQPLPFTGYIVFGKLGVDYQGCYLSLLKTVLKRRLMAAESRGAYFYFEQTSKVTKSAITETVKAAWSELKNDNNRHPEFVATEIVDKSYFGIAVPDFMLAVFRRYLMADSKDKQYRRKVNMFEMLRDKIRVIVNADTGEEFGRRNPIRNLDIENT

SEQ ID NO: 7020 - protein, 589 aa, unidentified
  source 1..589: note = Related to JAKRFC010000017.1; note = Epibacterium sp.
MAHDYDLRLISTKAQLLTYIGVEEEWFDVACGFDVAAYDQALCQDTESEIGIYHHHPFTRHEIPKRNPARGKRVVWEAERYLNNTYKGLARRLTRFLETAITGFPHPQCFGYVRGRNIRDNAGRHVGATLLLKADIKDFFPSIDKARVEKLFVDLGVNSEVATQLTSFLTIEGKLPLGLPTSPIIANAICHGMDGDLSKLATNSDSTYSRYADDISFSTNVTLPKAEAISVIVARYGFELAKDKTRVSKRGQNHYVTGLSISDPRAPHAPRSMKRNLRQELYFARKFGLDDHIRSLGITEGDEIQRYINHLDGSVRYVAFHEPTKARDLLVQWYAILEESGSSPSFEPKNQHDAQFCFFVDETEFEWNDKKYLALCLSATQQQDVINTTTERILKDYLANPFSDGDREAISRHGMHFYHATEDLKSLYFRALQKLPFQGYIVFGEQSGTYEADYTKLLSQIIKRRLMAAESKAAFLCFEQNSKVSKHAIEEVVRRSWEELDRTNNRRPKYATVEMVDKSYYGVGVPDFLLGVFRKYVSGVPAASPPQRQHNMFEGLRDKIRVIVNADTGEEFTRRHPFDNFSINDLRER

SEQ ID NO: 7021 - protein, 571 aa, unidentified
  source 1..571: note = Related to JAGHQQ010000003.1; note = Thalassospira sp.
MERFIGVKSDLLDLVLDFDSESSNSFSEQNSRIYMLSMPLFICHKIPKKNPNRGERVVWEALMDLRDVYKSFSRKLDIFFQKQIETYPHSCSYGYLGGRNTRGNAEKHVGKKYLLNADLCNFFDSISADKVRLLFVSCGVDEKISQILSRFLTISSRLPMGLSTSPVIANVLAHKMDCELSDLAEKFNCQYSRYVDDLTFSSDEILPEISHIEEIVARHNFSLAHEKIKFSKSGQAHYVTGLSVSDTEAPHVPRKIKKDLRKSLYYMDKFGIYDHFGRLGIHEHENVQREVNRIDGLVHYVSYHEPRKSFEINAIWQKILRDSGFRPYFSAHKQEYEVFNIIIDEAEFSHNGTNYLALAASVTNKQREIDNSIFEILDNFLSNPWSDGKVDLIKERGLHYVDCTEDLKKEFIQCLQILPFNGYISINAVGESNYRDRYIENFKNIIMRNYYKIDRSIVFVSIERNSKISNDDIYGVVDYVNSYHLNDKRVILPKGNVSFVGKECLGVSVPDFLLGCFAGYIKDNQTVSGGAKSRKFLQFEMLRDKIKVVSDLTTNQHFTRRNPFSKSKLKI

SEQ ID NO: 7022 - protein, 583 aa, unidentified
  source 1..583: note = Related to JADGCJ010000180.1; note = Magnetococcales bacterium
MNQKDMPRGFDRNRIKFDFRVLKDLNTLKLFIGVDNITESFINTKHEVHRWFIQHRIPKKNTTSHDKYRIVWQPINGAERLYKTLNRRFEIFIRDIDRRYPHPCSYGYVRGRNTLDNAKLHIGASVILHADISNFFHSIKIDRIKKLFISYGIDATIANYLSEIVTLNGSLPLGVHTSPMLANVCCLDLDDKLYKLSQRYSCAYSRYADDISISGSDLPSKDEVEMIFSEEGFVLSQNKFSISKLGQKHFVTGLSVSDPLTPHVPRQIKKSLRQELYYCNKFGVIGHLERIYDGSFDFIQKNINRIDGFVRYVSFIERKPNFKADWMAMLSQENLRINYRNKSNEQSNECVIYIDETKFEFNGASYLAIALVQTSNFDLIESESRRIYEEYIADPFAAGRKDNIAKNKIHFTDVHPDLQGRYIDWLYGIAFDAYIAFCKEESANYQSLYLSLLSRILPDRLRHLRNHNVKLILEQNPEVSSESIKNKVFGIDNYLKLQQIRSAKTSVIVGSKQEYYGFSVPDFVLGLSARYAISNSGKQQNDSSNPPARDTLLFEKMRDKIRVVYDVDAKRKYTRHRPFVPFQ

SEQ ID NO: 7023 - protein, 581 aa, unidentified
  source 1..581: note = Related to JADJEE010000002.1; note = Deltaproteobacteria bacterium
MLDLRNMRDASDLAKYLGISEGRARQLLVASPEEVFKTYEIPKRGNRGVREIWEVTETWAADMYKGLARRLNALFVGALAGFPHPSAHGYVAGRSTWTNALAHLGQRRVLCTDIRAFFKSIQHERVRQLLLRCGLNNEAAAALSRILSWDDHVPLGLHTSPIVANAVCHDLDARLRALAPAGRYTRYADDLFFSGPELPTRNDVAAALAADGFEIAPRKWGLAKAGRGLYVTGLSLEHGDRPRAPRSMKRRLRQDLHHADRYGLRQHLGRRGYPSFQSGINKIHGTIQYLRGIERDLGDRLNKEWMELLGREGVAVAYPTQERLAGRTVLFLLDESVPPDRDVLLLCLTVVEDVEWVSAEVQRFLDDRIADTMTAESERAVLKQRGLHWNELTPDNRTRATELLRTLPFRSFVAYAALPKQDKASYAETYARTLAQLLRDRMIRYDGCTLKIVGEENPRVGRRLLSEIANSIFSELECLGARRPAAVPSCEVLSKGSNPALPLPDLVLGVLGDFALSIVRSEREEVGDGKKKRRSGDQASIRFEQISHKVKAIYDLQSGVVYSRRNPFTAWPLDNASTGGE

SEQ ID NO: 7024 - protein, 595 aa, unidentified
  source 1..595: note = Related to NZ_CP060731.1; note = Pseudoxanthomonas mexicana
MSLDDYIPQLARPANVEQLAKALGVATQIFTFIADNSEPERIYRRHLIPKRAVRALPSVPVEDARGIVTLSLDSFDLSKYRVVWEAHSPVIKHAHKSAARVLERYLSRPGALFPHEAAFGYVKGRSTRHNARRHVGAKRLLSADIQDFFPSITLARVELALEAAGLQPAVTNALGRFLTIEGSLPLGLNASPMIANLVATPLDHDLSALAKEWGLTYTRYADDITLSGDGELPTREIIETVLKRHFFRLNKSKFRTSKLGQKHYVTGLSVADKAAPHAPRAMKHKLRQELYYIEKFGFLEHLSRGGEGGTEQHNVNRLDGTVNYVSSIEPRLAHRLRAAWKKVCDENDIAKSFEPRPVIQLRPASWFVDEAEIVHPDGTRLLALCLADVLEPGRLDTELRTLFAEEAGDAFGTADPLSIIQKGLHWSDATWSQREAVVKLIAASPVRVMVAMAPLTSPSEYTTTYTDLLCEILETALKIADDAEIAIHVEENRSKVSKADVQGAVTRAYTELETKNQRRPLQAPEVNIVSKGATPCCCVPDTVLGALHRYAVSRKDGKEGSLAVTLFERLRNHYSVIFDHHANKIYHHRSPFKRW

SEQ ID NO: 7025 - protein, 371 aa, unidentified
  source 1..371: note = Related to CP059266.1; note = Pseudoxanthomonas sp.
MGSAQPGHQACPQVCRTGTGALPLPARLPVSHEAAFGYVKGRSTRHNARRHVGAKRLLSADIQDFFPSITLARVELALEAAGLQPAVTNALGRFLTIEGTLPLGLNASPMIANLVATPLDHDLNALAKEWGLTYTRYADDITLSGDGELPTREIIETVLKRHFFRLNKSKFRTSKLGQKHYVTGLSVADKAAPHAPRAMKHKLRQELYYIEKFGFLEHLSRGGEGAPNSTTSIVWMARSTMYPASNRVWRIDCALPGRRYATRMTSPNHLSLGPSSSCDLLRGSLMRPRSSIRMAHGFSRSALPTFWSLAGWIQNYGRCSPKRPEMRSGQPIRCLSSRRGCIGVMRHGPSVRPWSSLSPPHLSGSWSPWRR

SEQ ID NO: 7026 - protein, 595 aa, unidentified
  source 1..595: note = Related to NZ_MADO01000098.1; note = Xanthomonas translucens
MSLDNYVPQLSRPSSVEQLAKALGVATQIFTFIVENDDPERIYRRHLIPKRAPRRLPLVPVEDAGGIVEVSLDSFDFSRYRIVWEAQNPVIKVAHRSAARVLERYLSRPGSQYPHEAAFGYIKGRSTRHNARRHSGAKHLLSADIKDFFPSITLARIELALEQAGLNSTVCNALARFLTIKGSLPLGLSASPMIANLVATSLDHDISALAKEWGLSYTRYADDITLSGDGPLPAREIIENILKRHFFRLNKAKFRTSKKGQKHYVTGLSVADKVAPHVPRVMKRKLRQELYYIRKFGFLDHLSRSGGRGTEQHNVNRLDGTVNYVSSIEASFGYKLRSDWKGICEDNGISRSFEPRPVINLRHASWFIDEAEIIHPDGTRLLALCLADVLEHDRLNVELVTLFAEEAGDAFGTADSLSIIRKGLHWAEATWSQREAVVKLLAVSPFRAIVAVAPLPNPQEYSRVYTDLLKQILATALKTSDDAAVNMYVEENRSKVAESEVQIAVKTAYFDLEEKNQRRPLKLPCVNIVPKGATPCCCVPDILLGALHRYAISKKVDAESGLAVTLFERLRNRYSVIFDGHAEKIYHHRSPFKRW

SEQ ID NO: 7027 - protein, 571 aa, unidentified
  source 1..571: note = Related to JALBDV010000008.1; note = Stenotrophomonas maltophilia
MARQIFEFIADNENPELIYRRHLIPKRAARPLPSVPIESMDGGVEFSLSGFDLSRFRVVWEAENPVIKHAHKSAARVVERFLTRPGTGFPHSASFGYVKGRSTRHNASQHIGRKYLLSADIKDFFPSITAARVQLALEEAGLKAVAAEALSRFLTVQGSLPLGLNASPVVANLVALPLDKELDEFARKLGLSYSRYADDVTLSGDQMLPSKDEVDQIFKRHFFRMNRVKFRTSKRGQKHYITGLSVADKFTPHAPRAMKQKLRQELYYIDKYGFSDHISRSRCGGTEQHNVNRVDGMVSYISSVEPRHSYRLRLMWKRLRTANNIERSFEPRPVIRFRQASWFVDEAEFTHPSGVPLLAVCLADVLDSARLDEVLASFIEEEAGDAFGSVDEVSIVRKGIHWVDATWSQREGLVKILAEAPIRAMVAFAPLRNGEDYSKVYLALLRKILGTALKVADDAIVKIYAEENRSKVRKSDVVDAVSSVHSMLADKNERRPLKVPEVNVVPKAFLPSCCVPDALLGALARYATSRSESDRGGLSVTLFERLRSRYSLIFDEYNSKVFHSRSPFVRW

SEQ ID NO: 7028 - protein, 595 aa, unidentified
  source 1..595: note = Related to VCME01000027.1; note = Xanthomonas hortorum
MSLDNFYPDLTRPSTVPQLAKALGVPLDIFQMIMDCSDPSLIYRQHFIPKKVCSIMPGTPVANSDGTIEIVLPNHDLSRYRVVWEPTNNVVKFAHRSAAGVLERFVSRPNSQAVHPCAFGYVKGKSTRKNAQQHLGKYFLLSADIKNFFPSVSVARIEVALRVIGIKDEVVESLAKFFAIENSLPLGLNASPIIANLVAKPLDEDLLSLAEGFNCSYTRYADDLTFSGNESLPKKEDIEFILRKHRFKANQSKFRYSKRGQRHYVTGLSVADVHSPHAPRKMKKRLRQELRFIEKFSLDDHFSKIKKSGERQHEINRIDGTVSYVASIERKLGADIRIQWKAICDKEQVGRSFEPRPTTLLRSAVWFIDETEFDARDGTKLLALCLADVLDPQRLNIDLLTLFSDESGDAFGLGAAAGKMIHDGLHWVDSNLTQREKVVNVLSISPIRVMVAMDSVEGATYQNVYLDLLRRLINVNLRGADDARVHIVIESNKSKVPRQLVIQAVRDECALLEAANQRRPLEIPSINVEGKDWTPAMCVPDVFLGVLAQYANSKQKGQGEFIVSLMERLRNRFAVVFDEHEGAIYHSGNPFRRWS

SEQ ID NO: 7029 - protein, 503 aa, unidentified
  source 1..503: note = Related to NZ_FNPT01000014.1; note = Lysobacter sp.
MNIDRFIHAHAPSFIHENAYGYIKYRSTRANASRHKGAKIIVSADIKEFFPSISIGHVEHALRKTGMKKETASLLAKFLTINNSLPLGLNASPTIANLVANPIDIEFTNLAKRINCTYTRYADDLTFSGDNTLPSHDEINGILGKFGFRSNERKFRASKRGQKHYVTGLSVADPKQPHVPRGLKRKLRQELYYIQKYGLKNHVEKSDSESTQRIINRLDGTISYVTSVESQLTRKLRSAWTSICQTEKVGRSFEPRPLHILRDAYWFIDESEIPRPDGSTCLALCCVELSANTIQADEASLTSLIEKETSDAYQTAKSSLHWAESTLSQRERIVDTLMPRLFSTFVVLENLSDEPYKDTYIRALKLVIDPILRRSDDAIVEIMIEANPSKISQQSVTSSIKDSYLRLVELNERRPVEMPKIRVEKKGARPALLLPDIMLGALSTYAKFQPGSNSTLEYSFFEKLRTKYTIIIDTAEKKLYHRKNPFTPWHTRNNTKIQPSKAE

SEQ ID NO: 7030 - protein, 573 aa, unidentified
  source 1..573: note = Related to NZ_JAKWJS010000001.1; note = Dyella sp.
MNTAPPGSQQLFRLADVRTIDQLARALGVPLQIFQDVIACEDPQQIYALHAIPKRHPRNPEDYRIAWECRQEPVARSHKAVARRLDDFARRRPISYPHAAVHGYVRGGSTRSNAQPHCGARVAIRADIENFFPTITLERIEAMLRTIGMQAAPAKALARFVTIKGALPLGLAESPVISNLVCLGLDKDLQSLAEERGVRYTRYADDITFSGDANLPSREQLRATLAKHGFRLSERKFRKSKRGQAHFVTGLSISERDYPHVPRKLKRMLRMELHFCERFGIGFHAEKINEDFRKTYLRLEGMVKYVAYIERRKSKEINDQWQRVLAVHRGPTSHAKIESRKRDDRFVIADETEFTVDGVKYLAFCCVRIANLERVEEAIQILLGDYLTKPGAKGDLDVLQAVGIHYTDAHFDLRTKTLDLMTDFLSWSASIHFARLDSSSKYKDTYLKLFADSIRQELITSDEWTLHILVERNDKVKLPSLTRVMEAEYQRAATDGARRPSSLPSVQRVEKASTSSLTLPDFVLATFRNYAQLVPDDRVLDFERIRDRVRYIHDADRGVYYTRKKPFVGIGSA

SEQ ID NO: 7031 - protein, 574 aa, unidentified
  source 1..574: note = Related to NZ_CP049872.1; note = Thermomonas sp.
MTTVSMQPCAHFRLADVRTVDQLARALGVPLQVFHEVIACQDPGLIYAMHSIPKRSQRNPDGFRVVWESRTEAVARSHKAAARRLDDFARRQEIGYPNPAVHGYVRGGSTRSNALPHCGARVVVRADIEDFFQTITLERVESAFRAIGIAPETAHSLALFSTINGKLPLGLPESPVVSNLVCLDLDRDLKALADRHGVKYTRYADDMTFSGNENLPSREEIRTVLLRHGFRLSDRKFKKSKRGQAHFVTGLSVSERDYPHVPRKLKRMLRLELHFCEKYGLATHAENRRESERKTYLRIDGMVNYVSFIERRKSAAIKGQWDRIRKKHLGSTLYARLAGKEIGDRFVVADETEFEVDGIGYLAICFVRLSNLEDVEKSLDLLLGDYLTKPGAKGNLDVLKKVGIHYADAHFDLRTMTLDLMTEYLQWSASICFSRLRTSDDYKEAYLRMFAELVKQEFVTSDGLRVEMLVENNDKIKLPALTQVCEAEYRRSESEDGRRPISLPSIRSVKKSEIRSLTLADFVLAAFRAYVLRAHDDRVLDFERIRDRVRYVRDSDSDNFYTRKKPFLGIGDVT

SEQ ID NO: 7032 - protein, 422 aa, unidentified
  source 1..422: note = Related to CP089414.1; note = Dyella terrae
MLPARLLAKFVTINGLLPLGLPESPIISNLVCLDMDRELQAMADERDLRYTRYADDITFSGYANLPSKEDIRHLLTGQGFRLSDRKFRISKRGQAHFVTGLSVSERDYPHVPREMKRKLRQELYFCERFGLDVHAIEQGETSQKTFNRLYGLVNYVSYVERRQADRLHQKWGRIVRRELGEAAYATVQGREYRDIHLIVDESEFKIGEQKYLAICVVRLSELDRKQRVVRKLLLDYVTTLGAKGEIDALKDVGVHFTEVHYDLRTKTLDLMLEMLWSASVHFAKYESGEDYEFTWLKLFKEAMHQELVTADGIGLEVLVEENDKVSSSALKSIVDAQYQHMELAGSRRPRVKPDVKRVGKSDTPILTLPDFVLAAFRHNVLQVADERVLDFERIRDKVRYIHDHDLDAFYTRKKPFVEVGSA

SEQ ID NO: 7033 - protein, 589 aa, unidentified
  source 1..589: note = Related to CAADFF010000009.1; note = Candidatus Kentron sp. LFY
MARDPVAPFIVDFRKAKDTNHLATLIGCHAEMLDRIRNSATHQEFYREHRIPKRNRRRRGEYRVVWQAVSELAQIQKALLRKFENFARDTVDDYPHSAVHGYVTGRSTLTNARCHAGAKIIARADIKDFFPSISRARLEALLTELGIYQSVAEVIGGLATIDDGLGQGIHTSPFFANLVCIPLDQELSDLAGKYQAIYTRYADDLTFSSDTRVPDRIAIETVLQTHGFPLAKDKFRTTKIGQAHFVTGLSVSELDRPRIPYKFKHKLRQELYYSDRFGIMNHAERAGYRFPHHCINSIDGRISYLQGIEPELGVEMRQLWKSLLKRDGLFSTYLPTYKEGMRQIFKEVEGVSYFIDETETHFRGDVYLGLALVAVATGDVSTIEEAIAQTLDRFLHDPYASGRKEKLQKKGLHFTDDSEEIRTDFIKTIARFPIRAFVAYRKLSGITRKDAYLSLLRILVTDRLSDPLLTLNSTIIYEQLSEVPHKYFELTIHEVMGKIKERGGKFYQEPRIVCCGKRDQPCIAIADYLLGVFSHYATSEPPNETPRKRFERLRDKIRLIVDADEKRRFWRNNPFPGFSAMDGTENNLA

SEQ ID NO: 7034 - protein, 325 aa, unidentified
  source 1..325: note = Related to NZ_LPLT01000066.1; note = Burkholderia stagnalis
MTTAKLRDLKSIDDVARACGVEADFIAEYAQSEYQSHFYNFLKLPKRGKRRKGEFRVVFAAKEERLRALHRSISMVVTNSAKFGNHVQGFMKKRSTRTNAEQHLGAKVLLHADIKGFFDSITTKHVRDAFISDGTDVSVAELLASACTIDGLLRQGTRCSPTIANLVCHDMDQAFLRLARAHDCVYTRYADDITFSGESVPSDDAVQQILESRGFELRDGKCYRQYRGRSQFVTGLTIADKSAPRLPKALKRRLRMIMHYIEKFGIADHFKHAGVFDPYREEAWLRGILIYARSIEPELVEKWQEILDRSIYDRSDYDEPIDDDY

SEQ ID NO: 7035 - protein, 316 aa, unidentified
  source 1..316: note = Related to NZ_JAIZQK010000007.1; note = Burkholderia vietnamiensis
MKSIDDVARACGVEADFISEYAQSKYQKDYYNALKLAKRGKRRKGEFRIVFAAKEKRLRALHRSISMIVTNSTEFGNHVQGFMKKRSTRTNAKQHLAAKILLHADIKGFFDAITTQHVREALISEGAAVPVAELLANVCTIDGLLRQGTRCSPTIANLVGHDMDQALLRLARAFDCVYTRYADDITFSGASVPSDDSVREVLESRGFELRDAKCFRQYRGRTQFVTGLTVVDETAPRLPKGLKRRLRLIMHYIEKFGIVDHFKRVGVSDPYREEAWLKGILMYARSIEPQLVEKWQKVLDDAISEHPPYDDLIDDD

SEQ ID NO: 7036 - protein, 330 aa, unidentified
  source 1..330: note = Related to NZ_CAKKNB010000001.1; note = Aquabacterium sp.
MTISKLRELKTIDDVARACGVEADFITEYAESPEQSTYYEALKLSKKGKRRSNEFRIVFAAHEQRLKQLHRGLSMVVANSANFGWHVQGFVKGRSTLSNAKQHLGAKVLLHADIKSFFDAITVDQVQAAFVEHGVLAPMAEVLAKLCTIDGLLRQGTRCSPMIANLVCFDMDQAFLRLAGATNSNYTRYADDITFSGDSVPSDDSVRTILKNRSFELRDGRCFRQHRGRVQFVTGLSVADTTAPRLPKRLKHQLRLVMYFIKKHGLDDHNNWVKQGYKSHPEITWLWGILNYAKSIEPTLVNQWQQVYQTAWEEQQAKRKERIKVKDWNP

SEQ ID NO: 7037 - protein, 346 aa, unidentified
  source 1..346: note = Related to NZ_CAKMLL010000115.1; note = Candidatus Nitrotoga sp. BS
MSSNPYIKTLLYPSRRCRPYMTIAKLKELKSLDDVARACGVEFDFIEAYSSSQNQKSFFNVLKLPKHGRRRKGEYRIVFEAREQRLAAFHRSISMIVTNSAVFGEHVQGFMKKRSTRTNAEKHLAAKVLLHADIKGFFDAITTEQVRNAFVTEGAAVRMADVLAKACTIDGLLRQGTRCSPTIANLICFDMDQSFLRLAHSHNCVYTRYADDLTFSGDQVPSDDSVKEILESRGFKLRDDQCYRQYRGRSQYVTGLTIADPNQPRLPTRLKRRLRLMMYYIDKHGLADHWRKVGVNDVIQEEAWLRGMLKYAGSIEPKLVNQWWQIFGEAWSNRTSYEPIPGNEEH

SEQ ID NO: 7038 - protein, 328 aa, unidentified
  source 1..328: note = Related to JADKBR010000003.1; note = Dechloromonas sp.
MTTAILKNLKSLDDVARACGIERDFIEAYSNSLDQKSFYNVLKIRKRGRRRKGEFRIVFEAREGRLASFHRALSMIVTNSTVFGDHVQGFLKKRSTRTNAEKHLAANVLLHADIKGFFDAITTEQVRNALVAEGTALPMADVLSKACTIDGLLRQGTRCSPTIANLVCFGMDQAFLRLSRSHNCAYTRYADDLSFSGDEVPSDDSVREILESCGFKLRHDQCYRQYKGRSQYVTGLTVADPNRPRLPKRLKHRLRLVMYHIEKHGLTDHWNKVGVDEALRAEAWLSGMLRYAGSIEPHLVRQWQQIFDKARSNRDPYKPLPDCDEGQG

SEQ ID NO: 7039 - protein, 327 aa, unidentified
  source 1..327: note = Related to PDZJ01000001.1; note = Janthinobacterium sp.
MTKAKLKDLTTLDDVARACGIEPDFILGFVKNTIQKDYFYVVKMAKRGRRRKGEYRVVFQAREKRLSDFHRSISMIVSNSACFGDHVQGFRKKHSARTNAEHHLGAAILLHADIKGFFDAITTAQVKTALISEGSPPPVAELIAKACTIDGFLRQGTRCSPVLANLVCVAMDQSFLRLARSHTCNYTRYADDLTFSGERVPCDEAVREILAADGFALRDGKCYRQFRGKTQYVTGLTVADPNRPRLPKQLKHDLRTTMYFIERHGLADHWERIGEEHPMKKEAWLQGMLRYAWSIEPNLVRRWQYILDRAFTERAPYIIDITDEDYG

SEQ ID NO: 7040 - protein, 367 aa, unidentified
  source 1..367: note = Related to NZ_LPJO01000032.1; note = Burkholderia pseudomultivorans
MIQSALATVVDFSGYVRGRDSAVRSLENFLYPSTVATDMTQSRLSEIRDIGDLARATGIPKDFIAAYANSQAQSDAYSVVLIPKKGRKRRGHFRATFSANQEWLSQLHRGVAMIVLNSVDFGEHVQGFIKKRSIRTNAEHHLGAKQLLHADISNFFDSITTNQITQNLITVGAAPEAASLIAKSCTIDGLLRQGTRCSPILANLVCRSLDADMISLAQSIGAKYTRYADDLTFSGDQTPSSDSVDAIITQHGFTLRDGRCYLQQKGHRQYVTGLTVADTAQPHLPKRLKSRLRLVMHYIERNGVRAHFAHDCKRPIARNANELWGMLRFAKSIEPDLASTWLDQWKAGERIDSSKERRRLKKLARWL

SEQ ID NO: 7041 - protein, 323 aa, unidentified
  source 1..323: note = Related to JAIZRF010000030.1; note = Burkholderia cepacia
MTQSRLSELHDIVDLARATGVPAEYIDSYANEATQADAYHVLRIPKKGRGRRGQFRVAFSAKEEWLAQLHRGIAMIVVNSVEFGEHVQGFLKKRSIKTNAAQHLGAKQILHADISNFFDAITTELVSESLVTVGVPPKMAVLIAKSCTIDGLLRQGTRCGPALANLVCRPLDADMLSLAAATGAKFTRYADDITFSGALLPTGDSVRAILNKHGFALRDDRCYIQRKGRSQYVTGLTVVDTVQPHLPKRLKARLRLVMHYVAKNGLQALFAQHHDRPIAQSESELWGMLRFANSVEPALAAKWFAQWEAGELVDAQRGPKQAA

SEQ ID NO: 7042 - protein, 332 aa, unidentified
  source 1..332: note = Related to JAKZHX010000030.1; note = Undibacterium sp.
MTKTKLVDLKTLEHVAQACGVSAEFIVQYANDQRQRDYYFRIKIPKRGKNRNRQFRIVFQAKEYQLASLHRSVAMIIANSVQFGEQVQGFRKKRSSRSNAQQHLAKAVILHADIKSFFDSITTEQVHVAFVSQGVSNEIAQLLAKACTIEGLLRQGTRCSPILANLVCAGLDNKLLALAHSCHSVFTRYADDLTFSGDQVPSSAAVKTIVESEGFTLRDDKCKLQRQGRCQYVTGLTVSDGNMPRLPRRLKSRLRLIFHYIEKNGLTEHWQKTGQKNGRRKEQWLDGMLQYAASIEPDLANKWQDILTTAKVQKAATARQKYFVDCGIDDID

SEQ ID NO: 7043 - protein, 308 aa, Pseudomonas sp.
  source 1..308: note = Related to NZ_JAJSLV010000001.1; note = Pseudomonas shirazica
MTTTKLLDIHDLAELSYAVGVRAELIEEYLTAPRQVDYYEVIRIAKRGRNRKGEYRQVYKAKSNWLSQLHRSISMIVTNSVEFGEHVQGFLNGRSTVSNAKLHMRKDIVVHADIKDFFNAITEAQVCQSIMSLGCAQFIASIIARACTIDGRLLQGTRCSPVISNVVCRNLDLDMLELARATKSTFSRYADNITFSGKAPPNKENIEAVVNARGFILQPKGCYVQYRGSRQFVTGLSVVDGVMPRLPKQVKKKLRLIAYYVKKYGDGHFEFSSGNHSIAPTRTQLEGFIAYAHSVEPEFAKKLWSMVS

SEQ ID NO: 7044 - protein, 308 aa, Pseudomonas sp.
  source 1..308: note = Related to NZ_CP027729.1
MTTTRIEDVHDLAELSFAVGVKAELIESYLNAPWQAHHYQIIKIAKRGRNRQGEYRQVYKAKNKWLAQLHRSIAMIISNSVEFGEHVQGFLAGRSTVSNAKLHMKKDVIVHADIKDFFNAITEVQVCQSILALGGNLLIAQILARACTIDGYLLQGTRCSPVLSNIVCRRLDSDMLELARTTKSTFSRYADNITFSGITPPAPENIEAVINGNGFQLQAKGCYVQYRGARQFVTGLSVVDHERPRLPKKMKKKLRLIAYYIKKHGDGHFEFPSRSHSIAPTRAQFEGFIAYAHSVEPQFAKKLWSMLN

SEQ ID NO: 7045 - protein, 308 aa, Pseudomonas sp.
  source 1..308: note = Related to FMUZ01000023.1
MTATKIDDIHTLDDLSLVVGVKAQLIQQYVHAPCQADYYQIIRIAKRGKGRRGEYREVYKAKEFWLAQLHRSIAMIIANSVQHGQHVQGFVYGRSTLTNAQYHLLKKIIVHADIKNFFNAITESQVEQAFLTIGGHSSVAHILARVSTIDGRLLQGTRCSPAVSNIVCRNLDLQMLEVARVTSSVYTRYADNITFSGDKPPSSSNIEAVVKGCGFELQGKGCYTQHRGARQFVTGLSVVDDERPRLPKQMKKKLRLIAHFVKKYGDEHFEFSADSSSIAPTRTQLEGLVAYAYSIEPQFAKKIWSMIN

SEQ ID NO: 7046 - protein, 308 aa, Pseudomonas sp.
  source 1..308: note = Related to FOTU01000012.1; note = Pseudomonas syringae
MTTTKINQIHSLEELGCAVGVPVSDIKTYLNSNRQVSFYRKLRIPKRGKARKGEYREVYKASEAWVAQLHRLMALIIRNSVEFGLHVQGFVDGRSTISNARQHMKKEVIMHADLKDFFNTITEVQVAEYFLAIGAHPEMAPVFARLCTIDGYLLQGTRCSPAVSNIVCDRLDSDMLRLARSTSSVFTRYADNLTFSGDNPPSAKQIEGLVEANGFKIRGTGCYSQHRGSRLFVTGLSVVDQERPRLPKQMKKRLRLIAYYVGKYGEDHFEHSEHARSIAPSLTQLEGLLAYAYSVEPQFARKIWAMLN

SEQ ID NO: 7047 - protein, 309 aa, Pseudomonas sp.
  source 1..309: note = Related to PPYB02000023.1
MTSVKIADIQTIDELCLAIGANREEVLQYLQSPRQVDYYELICIPKRGKRRRGEYREVYKAKYQWIAQVHRSVAMIIKNSASFQECVQGFLDGRSTLSNALLHMGQEVIVHADIKDFFNAITELQVKDAFSVMGASLIIADILARMCTIDGFLRQGTRCSPGISNLVCRRLDLDMLGLANSKSSVYSRYADNITFSGCSPPSYNLIKAVVENNGFELRGSGCYTQYRGARQFVTGLSVVDDKMPRLPKKMKKKLRLIVYYVSKYGEEHFEASAGAHTITPTMTQLLGMIAYAYSVEPVFAKKLWAKLAP

SEQ ID NO: 7048 - protein, 311 aa, Pseudomonas sp.
  source 1..311: note = Related to NZ_LR134308.1; note = Pseudomonas aeruginosa
MTTRRLKDIHSAHELAQAVGVSESKILDYAVSDCQEGFYEKLEIPKRGRNRKGEFREVYKANHKWVTQLHRSVSMLVANSASFGTHVQGFLKGRSTLTNAELHLRKSLILHADIRNFFNVITEPQVAKAFLTIGATPEISKLLARISTIDGFLRQGTRCSPIISNLVCKGLDQAMLDLASTHDCMYSRYADNMTISGAEIPDISAISTIVTNNGFELRGSGCYIQRRGSRQFVTGLSVVDRERPRLPKKLKSRLRLAVYYASKYGKEHFERSRHVDTVTPSWAQMKGMIAYAHSIEPDFAEKLWKLLRHSR

SEQ ID NO: 7049 - protein, 311 aa, Pseudomonas sp.
  source 1..311: note = Related to NZ_RAFS01000009.1; note = Pseudomonas aeruginosa
MTTRRLKDIHSVEELAQAVGVSVAKILEYAVSGSQEGFYEKLEIPKRGRNRKGEFREVYKASYKWIAQLHRSVSMLVTNSVSFEGHVQGFLKGRSTLTNAELHLRKSIILHADIRNFFNVITECQVAKAFLTIGVKSEVAQLLARVCTIDGFLRQGTRCSPIISNLVCKSLDQAMLDLASTHDCIYSRYADNMTISGEQMPDIRVVAQIVKDNGFELRDTGCYTQLRGARQFVTGLSVVDREKPRLPKQLKRRLRLIVYYASKYGREHFDRSRQVDTIAPSWTQMEGMIAYAHSIEPEFANKLWKILRKSR

SEQ ID NO: 7050 - protein, 334 aa, unidentified
  source 1..334: note = Related to NZ_JPMI01000298.1; note = Archangium violaceum
MALTPFSRIRHVGDLALHLGCSPEELLHFANTQPQRQFYDLLRIPKRRGRDKVRIVYRANEESLARMHKTLAGELAPQEGEDFDECVQGFVRDRSIVTNARKHLGCKVLLHADIQNFFESITLAQVMSVFETLGCNSGVAALLGRLCTLDGFLPQGAHASPALANRVCLHLDTDLKQLAARHGCVYTRYADDIAFSGDEVPEPQRVEAILNKHGFKLRAEKCRIQRRGHSQFVTGLSVADTQGPRYSRQAKRWLRLVLHYASRYGLENHLKRTGRGSANPKLAYAELEGMVRFLRSVEPRTTERMNPLLAEIGFRLHADAREEAHEGEDENGEP

SEQ ID NO: 7051 - protein, 328 aa, unidentified
  source 1..328: note = Related to NZ_CP071091.1; note = Myxococcus sp.
MTGVEFPFKTIRDERDLAQHLECEANTLLFLADPSRQHEFYAELRIPKRKRGGFRLVYRSREDVLSRIHKALAVAVADAARFRPCVQGFVKKRSIVTNARQHLGKQLLLHADIEHFFESIRLPSVISCFQSLGCRPQVAELLGRLCTRKEVLPQGAHASPVLANIACRHLDQDFEQLAEVHGCTYTRYADDLTFSGDEVPEEGNIQSILAGYGFKLRDGKCRRQQRGRGQFVTGLSVGDPVGPRIPKKMKRQLRRDLHYATRYGLEDHLRHVGRPTVDPWEEYSVLEGRTRYLASVEPKIASAMWKQLVRIRAQLDKSADTGSEEAPS

SEQ ID NO: 7052 - protein, 325 aa, unidentified
  source 1..325: note = Related to SSMQ01000014.1; note = Polyangium fumosum
MWMSLRNFAFVRNIQDLSRELGCERAQLEEYISSRQREFYKEMRIPKKGRRRREFRTVYKPCRELAVLQKNIATLLQRNPLPEYVQGFVSDRSIYKNAKIHIGQKILLHADIHEFFESITLERVRDAFETCGSNREVATLLAKLCTLDGFLPQGSSASPVLANLVCRHLDTDINALAISYGCRYSRYADDITLSGDRVPPAESVENLLKRHAFELRPGSCRTQRRGHGQYVTGLSVEDAVPRIPRRMKRRLRLVLRLARSAMQHADLLLSETKIDGWLAFFHSVEPNLASKLSAEWDPIRARLNNRHTGSPDDPSEEVTEEEPSD

SEQ ID NO: 7053 - protein, 307 aa, unidentified
  source 1..307: note = Related to SECP01000091.1; note = Myxococcales bacterium
MLPLRFSDLRSVQLVCAHLQTTPRALQSFLREPERYYTPIDLPQAPGRRPRRVFEVGAPLRRIHRVLAVALAPHVDAQPSYIQGFRSGRSIRSNAAMHVDAEVVVTADIRGFFDEIDVERVTSLFQSLGATFQAATLLARLTTFQGHLPQGGRASPAISNLAVPDLDKALVRLGGRCAYTRYADDLTFSGSAAACPTEEQIRRVLESSGFQLRPRSFRRQLKGSGQIVTGLSVVSGSPTLTRRTRREIERALYFGARFGLSYHASRAGSERSPQREFARLCGHIAAAGGVDKTLHAKWVKLLESVNL

SEQ ID NO: 7054 - protein, 322 aa, unidentified
  source 1..322: note = Related to VBKH01000045.1; note = Deltaproteobacteria bacterium
MEHVKFDQIRNDEDLARNFGCKVNDLRRLTEGDQRLLYLTIRIPKRGAARRGQYRIVYKALDQTLRLLQKNLASSIAARVTFADHVQGFVARRSIVTNARRHLARKYVLTADIENFFESITIERVAAAFRGLGCHEGVAQTLATLATLNGHLVQGSSASPVLANLVCEGMDADLLALGGSYDCTFTRYADDITLSGDERVPSGEEIADVLARHAFVLRDGRVRVLRRGRRQYVTGLSVFDAERPRIPRVHKRRLRLLLHYASKHGLEKHFERIGIEPENRYRELRRMEGWIQFMRSVEPRRAAEFAAQLDDARAADARGLPK

SEQ ID NO: 7055 - protein, 334 aa, Nostoc sp.
  source 1..334: note = Related to JAIVFX010000002.1
MIELNFKALENIDHIARAVNCFPSFINIVLERPSLFYTLKKIPKRGKRQKGQYRIIYEVESELNIIQKNISTAVTSKQQFPEYVQGFVSKRSIATNASLHLSQKYVLNLDVKNFFNSITQKQVSDVFKELGCTEKSAEIFTKLCTFNGHLVQGASTSPVLANLVCKELDQDFAGLAQQYNCSYSRYADDITFSGDLTPRKKDIEKCLNKYKFELNPAKWKHQRRGRSQYVTGLTVFDNTKPRIPKFIKKQLRQILYYASKYGWDNHQYKVNSHNHKNMYYDIKRIDGLIAFMYSVEPDRAFEFDLQWQKILKEEGIVDEQERDPYAIFARHSPV

SEQ ID NO: 7056 - protein, 340 aa, unidentified
  source 1..340: note = Related to AP018314.1; note = Sphaerospermopsis kisseleviana
MIQLDFQSLEDIDTVAMVLGCFPSFINTVIDTPSRFYTLKKIPKKGKGQKGQYRLVYEVDSELNVIQKNIATAIASKIQFPEYVQGFVNKRSIATNAALHLSQKYVLNLDIKNFFDSINQKQIIEVFKEIGCTETIAEIFARLCTFNGHLVQGASTSPILANLVCKELDQNFVELAKKYNCSYSRYADDITFSGDITPRKKEIEKCLKKYGFELNPVKWKGQPRGKSQYVTGLTVFDNTKPRIPRVIKKQLRQILYYASKYGWSNHKYKVSICIQKNMYYDIKQIDGMIAFMYSVEPEQALKFDLQWQKILKEQDIDYVKGRDPNVIFARRSQVQTDISE

SEQ ID NO: 7057 - protein, 340 aa, Nostoc sp.
  source 1..340: note = Related to VJOX01000264.1
MINIDFTTIEEISQIEIAFGCSIGFIQTVLDKPSLFYDQLQIPKKGRGQKGKYRIVYKVEDELNLLQKNIATVINSKISFPEYVQGFVSKRSIATNASLHLSKKYVLNIDIKDFFDTIHQQQVCEVFKNLGCVDKIADVFAQLCTFNQHLVQGSSTSPVLANLVCQELDEAFVDLAKQYNCSYSRYADDITFSGEKTPGKKEIKRCLKNYGFELNSNKWKSQSRGRSQYVTGLTVFDTTMPRISKSLKRILRQILYYASKYGLENHLNRVHDFNHKNMRYDIKTIDGLIAFMYSVEPNRALQLDMEWQRILNAQEAEQAESSSRKGKRNPEVIFARRSKL

SEQ ID NO: 7058 - protein, 330 aa, unidentified
  source 1..330: note = Related to SCQE01000079.1; note = Nitrospirae bacterium
MRRIEFSEIRNIDDLAKCLSCTNEDLRRLAFDATSAKHCRKMLIPKKNKSGHRIVYKSFDKSLSLIQKNLETTINHNEIFPECVQGFVRKGCIAKNAGKHLAKRYVLNADIEDFFESIGMLQIVNAFKRIGCNDDIAIMLSRLCTLDEQLVQGFSTSPVISNLVCHGMDEDFVTLSKQYNCTYTRYADDMSFSGNAVPTQGDIEDILSNHGFKLNKKKFFLQKRGDKQYVTGLTVFDDKYPRIPKRIKKKLRLTLYYADKYGLLNHFEKIGIDWSFVDWEINKIDGWIAFMFSVEPALAKNFKAKWNIILDEHKKSMSSESGAYNVFPEN

SEQ ID NO: 7059 - protein, 318 aa, unidentified
  source 1..318: note = Related to JADLDG010000084.1; note = Nitrospirae bacterium
MKKIKFSKIRDVNDLARSFGCSKDDFKIIESPSEAVSHYSRMLIPKKNRKNAGSYRVVYKVLNPKLRLLQKNISTALEYACFFPEYVQGFVRGRSIATNARHHLAKKCILNLDIKDFFESISQDRVIRVFEHIGCNSEIASILAKVCTINGYLPQGTSSSPIIANLVCKDMDEELNSLAMSYSINYSRYADDITFSGDACPQREEIEVILGRNNFRMNNEKFVMMKRGQNQYVTGLTVFDAESPRVPRKIKKQLRLILYYSKKYGIEDHLERIFADKVGCPYKKEFEKRKIEGWIGFLCSVEPPLGYKLKEQWLEIVK

SEQ ID NO: 7060 - protein, 366 aa, unidentified
  source 1..366: note = Related to NZ_LT545989.1; note = Chryseobacterium sp.
MKHTELSTKKDLANYLRCDLLFLEKAIEDDYFIRNIDTFNQEDVLLASLTSLNNNIISVDQFKLRKKGHNGGFRTVHKIWTLQLKNSLKILNNHLIQIFTPLDIVHGFVKGKNIRSNAECHLAKKLVLSVDIKDYFETITEKMVEEALISIGYNENIALWIAKIVTIDNHLVQGFCTSPTLANIVTNQLDKELKKLCGKKITYTRYADDLYFSSNTEEIPLESIKLTIEKHNFLLNDKKTKFMKRGQKQYVTGLTIFDSYIPRISKKRKKNIRLEINYIERVGYRSHTVHKLIKEGEDPDSLDFYSKLGEEIKLTRNRLYGWLHFIQSIEPQFAKKYYKKLNDIDQKYILMAKLNALKKNARNSDI

SEQ ID NO: 7061 - protein, 361 aa, unidentified
  source 1..361: note = Related to CP016378.1; note = Elizabethkingia meningoseptica
MKHTELSTKQDLANYLRCDVAFLEKAIEEDYFIRNMDTFDPEEILLSSLKSNISVYRFKLKKKGQNGGYRTVHRIWTAQLNNSLKILNAYLTQIFQPLEIVHGFVKGKNIKSNAQSHLAKKIILSVDIKDYFETITEEMVKNGLMSLGYREDISLWIAKITTINNQLVQGFCTSPTLANIVTHKLDKDLKKLCAKDVTYTRYADDLYFSSDTKEIPLENIASLIEKHSFVLNNKKTKFMKRGQKQYVTGLTTFDSNIPRISKQRKKNIRLEINYIKKFGYTAHAKHRLIKRGEDPNGLDFFNKVGDEITLTRNRLYGWLHFIQSIEPQFTKKYYRKLNDVDKNSVLNSSLKEILKQFRQNM

SEQ ID NO: 7062 - protein, 365 aa, unidentified
  source 1..365: note = Related to CP033929.1; note = Chryseobacterium indoltheticum
MKHSELITKQDLANYLRCDLEFIEKIIEDDYFIRNLDRRNIEELRSALTSNKILVDRFNLRKKGQNGGFRTVHRVWTAKLNNTLKILNHYLVKIHQPSEMVHGFVKGKNIRSNAECHLEKKIVLSVDIKDYFETITESMVTNSLKKLGFKDNVALWIAKITTIENQLVQGFCTSPTLANIVTHSLDEELKSLCGSNIRYSRYADDLYFSSNTDILPLDDIQLAVEKYGFLLNEKKTKFMKRGQKQFVTGLTIFDSHSPRISKNRKKNIRLEINCITKFGYTAHAKHRLIARGEDPKDLGFLSKLGDEVTNTRNRLYGWLHFIQSIEPQFAKKYYKKLNDVGENSVLRSTQALEILLQIRAGQKES

SEQ ID NO: 7063 - protein, 342 aa, Flavobacterium sp.
  source 1..342: note = Related to JAJQXA010000019.1
MKHTEIETRQQLANYLRCNIHFLEKAINNEFFIRDTKISEDVIPTISIPPSEITVSKYYIKKKGKNGGFRIVHHIWTYQLENSLKILNNYLNEIFIPFDFIHGFVKGKNIKTNADTHLAKKIILSVDIENYFESISKEMIILGLCKIGFKEEIAESIASIVTINGFLPQGFCTSPTIANIVTHDLDQQLKKICGTNIQYTRYADDLYFSSDIENIPLLEITKIIEIYGFILNENKTKWMKRGQLQYVTGLTTFDSNTSRISKKRKKNIRLEIYYLTKFGFRKHIKNKLIKSGENINAEDFEYKLIDEIDKTRNNLFGWLHFIKSIEPEFSAKYYSRLKKAKR

SEQ ID NO: 7064 - protein, 336 aa, Flavobacterium sp.
  source 1..336: note = Related to SEBM01000517.1
MEHNEIDTLKDLANYLRCDIEFLESAVSYEYYVKDAGVDFKDSISKIIVSKFNIAKKGKTGGFRTVYQCWSHFLSSSLKILNTNLNEIFIPNQFSHGFVKGKNIQTNASCHLGKKLLLSVDIKNYFESISKDRICKSLEKLGFKKHVAEWISNITTLNNHLPQGFATSPTLANIVTQELDNELSLLCGDLITYSRYADDLYFSTNLDEISLAEITSIIENYGFNLNSKKTKFMSRGKKQYVTGLTVFDVKYPRISKRRKKNIRLEIYYLSKFGYKRHIRKKLIKSGMNPKDPDFKSHVSVEADITRDKLYGWLHFINAIEPDFAKKYYPKLKKAKQ

SEQ ID NO: 7065 - protein, 345 aa, Flavobacterium sp.
  source 1..345: note = Related to PRDM01000001.1
MKHSDLRTINDLANYLRCDVAFLERATSNEFDVLDLANGDKLKLSPSGVTVTIARIKKKGKKTGFRKVHKIWTDEFKNSLKILNNYLREIYIPKDCVQGFIKNRSIKTNANLHLGKRLVLSVDIKNFFESIKIKMIVSGLTELGFQKSIAEFISEFVTIEGSLVQGFSTSPVLANIVSSKLDLELIKFCGNSLIYSRYADDLYFSTDDNEIELDAIEKIISSHGFSLNHDKTKLMKRGQLQYVTGLTVFDSDRARISKQIKRNLRLEIYYITKFGYRRHIRVKLKKEGFDSSLEHFRLFVNEEIEATISRIFGWLNFIHSVEPDFTAKYYKTLIKIKPNYYRKLN

SEQ ID NO: 7066 - protein, 361 aa, unidentified
  source 1..361: note = Related to UGQP01000001.1; note = Myroides odoratimimus
MSSYPIIRINYYLPYPNAHLYIFDMNLLEINTKKQFLYLLRCRESFLNLINSREYVIIDYTKNENVDVEISEGTIVIERFYIEKRNPTLGYRTIFKSLNFELDSCQKILNSLLLDVYTPLDCVQGFVQKKNIKTNASVHLAKKQILRLDIKDFFETITKEQIIESLIKLGVNIQISEWISNIACVEERLVQGFSSSPILANIVAREMDLDILKNIDSTINYTRYADDLYFSSNLSKPNLELIVDSVIKFGFKINYAKTKVMKRGQKQYVTGLTVFDGLFPRIPKKIKRELRLEAYYIGKYGYEEHIIHKLKIKKHQLKDKETQRLVVNEIDITRHRIYGWLHFINSIEPEFSKKILTELKK

SEQ ID NO: 7067 - protein, 342 aa, Flavobacterium sp.
  source 1..342: note = Related to NZ_FNRD01000015.1; note = Flavobacterium gillisiae
MDLLQIETKKEFLYFLRCRESFLDSVNLREYVIIDNKKNKNVDFEILENTIAIERFYIEKRNPTLGYRTIHNSLNHELEHCQKTLNTGLSNIYKPLGCVQGFVLKKNIKTNAFVHLAKKQILTLDIKDFFETITQKQIIESLTKLGINIQVSEWISNIACVNGYLVQGFSTSPILANIVAIEMDLEIFKNIDETINYTRYADDLYFSSDSTQMSLELITKIITKYGFEINNSKTKLMKRGQKQYVTGLSVFDHNYPRIPKKIKRELRLEAYYIGKYGYEEHIMRKLKIKKHQLKHQEIKGLIINEIDKTRDRIFGWLHFINSIEPNYSKKITQELKKTSANR

SEQ ID NO: 7068 - protein, 328 aa, Flavobacterium sp.
  source 1..328: note = Related to NZ_LIYD01000005.1; note = Flavobacterium akiainvivens
MENRDYYIFEEYSEAVVSTAINIKRFHIPKKNPALGHRTIHKPFTGNLEFCLKLLNSEISKLFVPGIAVHGFVAKRNIRSNAYSHLSRKYLLSVDIKNFFESISSPQIVESLVKIGVNRDIAESVTSVVTINGLLVQGFSTSPTLANLVAKEFDDDIQMFVGADITYTRYADDLYFSSDTSLPEVDKIEAILTQYGFSLNHSKTKYMPRGKAQYVTGLSVFDKAYPRIPKKIKRNVRLEIHYIKKDGFKVHIIKKHKIDEDQVPKDILDAIIEFETYNIKQNLFGWLRFINSIEPAYAQKYLAELSEIERANSLDKVELNEINPNITL

SEQ ID NO: 7069 - protein, 359 aa, unidentified
  source 1..359: note = Related to NZ_CP094326.1; note = Zhouia spongiae
MEKHKLVTLVTASFYMKVSDINNLNLLANYLKLDKNLLKTICENDYIGLSAREILKYRADNSDLTLVIKKIKIYKKNGGIRTVYSPVSDSVINCLKVLNKKLSKIYVPSKNVFGFIKGRSVQSNASQHLGKKYVYKVDLKDYFECINSDMLEKAFMRLGFNKAVLDCLCKIVTINNTLAQGFHTSPTLANIVFIDLDNVFSNISKNITYTRYADDLYFSSDEEFEIHDFIVENLKKFGFEVNESKTRMMKRGSKQYVTGLTVFDPDYPRIAKRIKKKIRQEIYYIKKYGYKGHVMHKLKVKNKDYKTNEDVKNKVDLAISELQSKINGWLLYINSIEPKFSKKYSEFLYKKSFKPISNN

SEQ ID NO: 7070 - protein, 336 aa, unidentified
  source 1..336: note = Related to NZTP01000094.1; note = Proposed Altibacter sp.
MKPTEINTTKRLVNYLKLDEMSFKLMTNNDYVVINDVENEIEIPDALKIRKLNISKKNGGKRVVYSCQSDVLSNTLKILNSNLNSLYKPPTSVHGYVKGRNIKTNATKHLTKKYVLVLDIENYFDTVKSSLVEQSFKDLGFTTDTAAYLTKLVTFQSALVQGFNTSPTIANIVFYPLDKKMEKLDKNITYSRYADDLYFSSDKEFNIEAKVQEIISEFGFRINKPKSKLMKRGWHQYVTGLTVFDKESPRISKKTKRKLRQQIYYINKFGYRSYVLYDLEKTPQDYFSSSSLRDEVDSKIEYLQRKLNGWLLFINSIEPRFAKKYSDLLTHRKIEP

SEQ ID NO: 7071 - protein, 344 aa, unidentified
  source 1..344: note = Related to DNSL01000055.1; note = Bacteroidales bacterium
MKQINSSYLNHCYFIMSHKKIDTVKKLSNFLNIEKEILSELSKNDYIIIERNNSSTDILNNVLTVEKIEIPKKSGGFRVVYSPSSDNLTNCLKVLNSKLRKIYVPSSCVHGYIKGRGIKTNASEHLGKQYILKVDIENYFEKITKERIIKSLNNLGFQNEISSLIAKITTHNNVLVQGFHTSPTLANIIFHELDLIFSKFTNASYTRYADDLYFSSKEEIDILSKVEEQLLKFGFTINKSKIKLMKRGQKQYVTGLTVFDNKKPRISKNKKKEIRQQMHYINRYGYKGHIMHEFGISNEEYLNNDEIKENVDYKIHELKTKIKGWLLFINSIEPEFSKKYITLK

SEQ ID NO: 7072 - protein, 334 aa, unidentified
  source 1..334: note = Related to NZ_JQNQ01000001.1; note = Salegentibacter sp.
MKLEEIVNIQLLANHLKIEKESLQFIVDNDYITEITSKKDFKKGCLINEIKIKKRSNGYRYVYSPVSDILVNTLKILSGKIKELYKPTEYVHGFVPGRNTKTNAQEHLAKRVVYCVDIDKYFENIDIEKVKSAILSIGYNEYCSDKISKIVTHKNQLVQGFHTSPVIANIVFHEIDLKLSRLGDENVSYTRYADDLYFSTSGRINFEKDIEDILNSYGFKVNSKKTKFMIRGRSQFVTGLTVFDEMYPRIPKKIKRSIRQKIHFISLFGYRGHVLHKLNIEKQLYDQNEEIQKHVDSKIYLEKLNIEGWLNYINSIEPDFSKKCYSKLSKKDNP

SEQ ID NO: 7073 - protein, 341 aa, unidentified
  source 1..341: note = Related to NZ_FTOL01000001.1; note = Chryseobacterium ureilyticum
MNPQIITDTKQLSNALRINEESLNELSQNEYLIDDTCAKTFNLHPDSILNLKKFCIPKRNKKFGEREVYEPIAETLKNLLKVTNSGLNKVYVAPTSVHGFVKGKNIRTNATPHLEKKYLLSIDIENFFESINKEMVINCFKEYEFIESIAKVLANITTVDNKLIQGFHTSPTIANMYFKKIDLIFETVFPNLTYSRYADDLSFSSNEEITVTQVTDIIKIINDFGFSINHDKTKIMKRGRNQYVTGLTIFDGTLPRVPKRIKRKLRLQIFYINKYGYRNHILKKLGRKPHEYFKNSRVKESVDSYEDYLHNNIVGWLMYIKSIEPQFAALHLELLNNRRRD

SEQ ID NO: 7074 - protein, 324 aa, Flavobacterium sp.
  source 1..324: note = Related to NZ_CP089096.1
MDLKLLNTLIDNEYIINDYCSGEVTLKFDFTILDVDRFCIPKRNKELGHRVIYKPMSESLKNCLKILNINLNGIYSPPISATGFIKGRGIKSNAEKHLKKKYILSIDINNFFETINKEMVIEVLKDYGFIEEIALKISKIVTINDKLVQGFHTSPTLANMIFKKIDLIFEKLDENIEYSRYADDLTFSSDSEITYLSKITEIIESFGFEINNKKTKIMKRGQNQYVTGLTVFDEQYPRIPKRIKKKLRLEVYYINKYGLRNHTLKKMKVNWKDFFGDELIKKKVENMEGLVHDYIYGWLVFINGIEPVFSEKCFELMRTRKIDV

SEQ ID NO: 7075 - protein, 362 aa, unidentified
  source 1..362: note = Related to DPHQ01000053.1; note = Butyricimonas sp.
MYIPSEINNVNKLAGVLRCEISQIDNLVNKVVPRSEFGELFEKVHFDGLPFHFEVSMPEDFILEIKLPKRKVHLGYRTVYSVLPHFASSALKVLKFYLNDLYVPNDCVHGFIKKRNIVTNARMHLNKKLILNVDIKNFFESINLDMVRGVYEKLGFQKDIAEILSNITTLNGRLVAGFSTSPVIANLYCNEMDEELMHVCSQNNITYTRYADDITFSGDKIDILSDVGEILRRYGFEINKSKTRYYYRGNGQYVTGLSVEDTVKPRVPKYVKKRLRAEIYSICKYGLKSNVARILGIDEGGVDETMLKKRAAKIIGWLSFISSIEYKFAKDCFDHLLRIDNARDSYYIMNALEHVSSKIKRF

SEQ ID NO: 7076 - protein, 337 aa, unidentified
  source 1..337: note = Related to JAFWXU010000033.1; note = Alistipes sp.
MYKPQDISSPLLFSGFLRCAEKAIPILKSKSEGVLEMNIPKHNPKYGYRKVYKATSQLLSYTLKQLHFELSNLYKPQSCIGGFTRGRGILYNASPHINKKVVLNIDIKDFFESIPFELIVSTFVRYGFTSEFANDLAEIVTYNKVLVAGFNTSPIVANMCCEDMDAKLLALCSAHQISYTRYADDLSFSGESIECVEDIKAIIVQYGFIINDKKTRIYRKGGPQYVTGLTVVDEKCPRIPRRIKRELRSDIYYIVKYGLESHIRYKYHLDIHIFDRYYMGDLCLNEARKIVGWIHFINSVEPMVAKRLNEMLFNKRHEDLGYFINAYGYIENLTDLK

SEQ ID NO: 7077 - protein, 363 aa, Flavobacterium sp.
  source 1..363: note = Related to NZ_QWDM01000016.1; note = Flavobacterium cupreum
MYSPSAIENFEMLSSYLRTTPDQLSKLAHGQRLIFDFKSESLLVNPPEIIIRENVTVFRKFYIPKKNKKLGYRVVYKAHKQFVKDIHKTLKFNLTNIYTPHTCVHGFIPGKNIRSNALVHLEKKHLLSLDIKNFFESIDKKSVSAAFISLGFNKSIASDLSVICTLEDKLVQGFPTSPIIANIVCTKMDEEIQNLCWVYGATYSRYADDLSISSNFDMPPVEEIELILKSFNFELNAIKTKRFLRGQNQYVTGLSISDSAYPRIPKAIKKRIRQQLYYIRKYGYHSHICKIKGLDKETDLSITKQYVREIENKLKGWISYIHSIEPLLAEKYFDIFNEIQSIEYAEVIKLLKRDPQIRRFKSK

SEQ ID NO: 7078 - protein, 355 aa, unidentified
  source 1..355: note = Related to JAIPBW010000053.1; note = Bacteroidales bacterium
MYQPKEIANLDLLSGYLRTHKHDLNNFVSGVRAVYQQKSGKICVYNHIKSWKDIDVQYDKYHIPKKNPKLGYRIVYEIRTLSALNILKVLKFNLSTLYKPHVSVHGFVLGRGVFSNAKQHLANYYLLRTDIKNFFESINIDMVYEVFIDLGFIPEIAEVLSKITTLDNHLVQGLPTSPIIANLVLKNMDTELKSLCKKYNAVYTRYADDISISSNSDLPPLKEIENIVNKSKFKLNTKKTKTFKRGQNQFVTGLSICDNLYPRIPKKIKRKIRQELYYIKKFGYESHICKKFDFDEENYNEDFVSEEKRKLEYRIKGWVDYIHSIEPKVAENFYNDLKVIQDNEIKKMDEYGDAF

SEQ ID NO: 7079 - protein, 579 aa, unidentified
  source 1..579: note = Related to JAIZPA010000026.1; note = Sulfurovum sp.
MNLNQLNSLDIISKSFNIPLKFLQSISKNEKNIKYIELFDIPKKNPKRTKKYREVIKINSPYNLFYKELLHIIEQEIEQNKAFFISNIAHGFIKERGVLTNAKQHLNKKYLFKIDIKNYFKSITKASIKSVFLKLRFSENGAEIFSDLCTFEDVLYEGFNTSPILANLYCLNLDLELKSLADEYKVGISRYSDDITFSSNNNNFPPLKAIQDIFDKYNFKINEEKTISFKYGQPQYVTGLSISNNKYPRVPKRMKRKIRQELYYLNKYPENYFNIEDGYARLRAIYGKIVYIIGIEKILGKRYQSDFINILENNNIYLENLYMDAPQKKSGMCTYHYIDESETPDKKTLILSLVSINGNFLKNTIFNKLTLLQNDLVSDLRNGLTDNQKSKLFHYCEDNITVKERYISILRELNIEAQIMFKSEQESMDKLGKEVYQNNYYALFNSLMKNILRRYKNNTNMITVEENSKISLEKLKEIVLSKGSFFPNTIIEKSGKDDILLSIPDYILGIVRDCMENNFSEKLNKLKTGQTLKENIKLNEISDKIRLIADLTNNQFFTQQNNNKMDCLKLNDYIHNKTE

SEQ ID NO: 7080 - protein, 582 aa, unidentified
  source 1..582: note = Related to JAHJEY010000048.1; note = unidentified bacterium
MNLYYLNSLDIISKSFNTPLEFLNSIFNSEVNSTYIELFNIPKKNPKHSKKYREVINIKSSYNLFYKELLCVIEQIIGQNEKNFVSDIAHGFIKNRGVFTNAKQHLNKKYLFKIDIKDFFKSIPQDGISNTFLKLGCSQDGANLLSTLSTFNGILYEGFNTSPILANLYCYNLDLELIKLADSYDVIVTRYSDDITFSSDTNSFPSIDEIEKILKQYFFNINHEKTLYLKYGQPQYVTGLSISNDKYPRVPKRLKKKIRQNLYYMNKYPENYFYKEDNYAVLRAIYGHIVYLLGIEKSLGKKYQSEFINIIENYLNLEDIYINSPQKKSTLSTYHYIDESEFIDSKTNKYYLILSLISINGEFQKNMISDKINALKNDLASDFRNGLNDEQRSKLFHYCEDNISVKEKYISILRELNIEAHIIFKYEDKPMKKQDYQDNYYALFNSLMKNILRRYKNNTNVIVVEENSKISINTLEKSILNRRFFFPNIEIAKASKDDVLLSIPDYILGIVRDCLKKDFLETLEKLKAGQRLKEDIKFDEISNKIRLIANLNNSNFFTRQNNSQLTCIKLNQYIHHKRILGS

SEQ ID NO: 7081 - protein, 572 aa, unidentified
  source 1..572: note = Related to NZ_LIWS01000003.1; note = Campylobacter sp.
MDIRKLNSLEAIAKSFNTDIGFLEFMKEPENTKTQSDYFKLLKLKKKNKKFSTSFREVLKINEPFNVFYKELLNELEKIIYSDYNKYISEYAHGFLRGKNIVSNSKEHLNKYYLCKFDIEDFFVSIKKESIEKVFIKIGCEKQAAELFSNLCTYDNALKEGLNTSPLLANLFCHKLDADIRSSIAKNIVYTRYGDDITFSSDKNNFIKTDDLQKILNKYNLKLNKQKTLFAKQGQPQYVTGLSISNREYPRVPKKLKRKVRQKLYYMNKFFESNSEEELLKRLYGEIAYIIGIEKDLGEKYKKTFLEILKNNNCTIDNASAKTFKVTTAKRIFHYIDESEIIISTDADKQYLAICVVSIISDSDKQKNIQKLGELKNSFLIDARDEFIKKEGLFHYTSDNPEVKIKVQDLLRELEYEAFIIFGKFNKKITKEEYQELYYGLFSKIFNNILLNRFGDANNYICYEENSKISTNKLSSYLCNKKHSTKFKIEKISKKDILSTLPDYVLGTFCSLAKEEKLLEKIENQKYPFALRNLNKISSKIRLIVDNNNKIYYSRQNKNKNDFLEINKNIMN

SEQ ID NO: 7082 - protein, 303 aa, Leptospira sp.
  source 1..303: note = Related to JAIZBM010000014.1; note = Leptospira mtsangambouensis
MESLNFNKIRNIDDLALYFQCTIDTLKNIIENKENYSSRRQIPKKNGGKRRIIIINNFDWSRFLKQIHFSIEKQYPYLDCIEGFLKSKSIKTNASKHINNQYLLTLDIKDFYFSIKYEDIINSFKALGANDTVSEILGQICTYNNLLYPGFNTSPLISNIAFESLDRKICDLCKEKGINYSRYADDLSFSSTNPIEILPIIKQYLSEKAFEINEYKLRFSKHGQAQYVTGLSISDKTMPRLPRKFKRNIRLLLHYAKMNGIENYHKHPKSRHLLTIYGQIMYSYSIEPHFAFKCLKIFNDIKK

SEQ ID NO: 7083 - protein, 302 aa, Leptospira sp.
  source 1..302: note = Related to NZ_NPDN01000013.1; note = Leptospira hartskeerlii
MLLLDFPNIRHKGDLIKYFQTNTETFDSVLVSKNKFAHVINIPKKKGGNREVIKLTNEDWKRFLKQINFSLHQLYTFPNCVQGFIPGRGIKSNSYFHLKNRQLLVCDIKDFYYSIKESDISNIFKYFKASDEIANLLAKLCTFEGILFPGLNTSPTLANLYCEKMDEKLSILMTSHQGVYTRYADDLTFSSNQTLPNLKDISELLENYNFKLQERKTRYSSPGQRQYVTGLSISDKRVPRLPRNFKRNIRLLVHLAEKLGVKEYHENLNSRNLFTLKGQLVFAMHIEPIFAKKYLVRLNRLI

SEQ ID NO: 7084 - protein, 312 aa, unidentified
  source 1..312: note = Related to JAKKPI010000005.1; note = Aliarcobacter butzleri
MIKLDFSKFQDETTISTNFHILKKNLDDLLTGNQEDFYEVLHIPKANKSLGYRKVYKPNWKIDGLHKYILEQINFKSKPLIHDCAHGFIKGKSILTNAQQHLNKKYLLQVDIKSFFSSISQDEVKRVFIKLGCNDYVAELFSILCTINNSLAEGLNTSPTIANIYFFELDEILNEISRRYSCTYTRYADDLTFSSNNYFDYTELLKEIEDALEKKNLTLNNKKTRFSKYGQAQYVTGLSISNEVRPRIPKKIKKRLRQEFYFIKKYGFNAHFSRCNQNIKNGHNRLNGWLLYALNVEPDYFRKLYAEYKGLK

SEQ ID NO: 7085 - protein, 555 aa, unidentified
  source 1..555: note = Related to JAGDMU010000005.1; note = Proteobacteria bacterium
MNQVVDFSGLSNLRSIASTFNTKLEFLESILKSPTRSEFYQKMFILKKNGKGYRLVYKAINKSLSLFHKNLSTSLQKLEKEFVHDCAYGFVKGKSTFDNAKIHLNRQILVQFDIENFFKSINYENIKKIFFQLCKNDDIASILTSLTTVNTSLVEGLHTSPVLANLFFYDLDIQLFELAQKHDCLYTRYADDITFSTNFKDINVKKLEKEVSAILKESNLSLNNEKTRISKKGQPQYVTGLSVSNPEFPRIPRLMKKKIRQELYYIKKYGAEDHFMNKKEKLYDGMQRLNGWIIYCHAIEKELAKKFQDQILMTDAYTDIHEYNKRLRKKEKRKEELHLYFDETLYENYFGMSCVLIQDENHQDISNDLNTFYDQLSGDQLIPKKGRIFHYCEDSHDVRGQIVDRLRKCDFQAYIVFSKLETNSYTKDDYLKIFYKVLFDRIHKNYDCTVHIYYEENNKIKTADIDDLVEDIKDKLNNQTSMVISINIQKITKQNHLSVIPDYVLGLFKDAYLKKERKDFEIRYCQKLSNKIRLVIDLDTNKYYSRHQTLSLSNE

SEQ ID NO: 7086 - protein, 327 aa, unidentified
  source 1..327: note = Related to MVRP01000128.1; note = Syntrophorhabdaceae bacterium PtaU1.Bin034
MLIKFSEIENLTMLSQFLYIKEDNLLTLLKEGAVSSCCEKMAIPKKNRALGYRVVYKVNSHLLKNVHKVLCGHLNAVYDAPAFVHGFVLGGCTRRNAAQHLNKKKILGLDIDRFFDSISENAIKEVFCGLGCRMNIAANLSKLTTINGRLPQGFNTSPVLANIMFGHLDAQLNSICNDYGCIYTRYADDITISTDDQLPPVARINDVLFTGGFRLNSSKERVMFRGKKQYVTGLTVFDPEYPRVPKRFKRRIRLQLYYLVKFGAKSYVMRELGLSEEDVRNDYEKLQLVSGRKVQLQYQIKGWIDYVNSIEPLLSEKYYESYNAIAW

SEQ ID NO: 7087 - protein, 323 aa, unidentified
  source 1..323: note = Related to JAKEIP010000017.1; note = Streptomyces muensis
MSFSVDQLAEQVGTSVENLEFLSEHLPAGEGLLYVQRRHRKKHGGIREVFEPKPPFNAVSKNLHRSFTSQFSYEAPDHVHGFVRGRSTISNASQHLAKKCVLRMDLEDFFPSIGAATIRASLREQGFDEKAAELAVSLVTIGGKLPIGLSTSPLLSNLAFLDTDRSLAAYARSEGLSFTRYVDDLTFSGDVTDRHSTDIARILDDAGWSVNTRKTAFMRRGGPQYVTGLYVGESDGPHIPRALKRKMRWILHVISKFGYEAYMTDFGGENEGMYRCRLLGWACYIAAVERDVGFSLLREFDRLVPEGSDEELHGYDEDLYDLL

SEQ ID NO: 7088 - protein, 320 aa, unidentified
  source 1..320: note = Related to JAELVG010000016.1; note = Streptomyces poriferorum
MAFSVDHLAEQAFLSVKDLEWLSAHLPAGEGTFYVQRRHRKKHGGIREVFELKPPFDTVSKNLHRSFTSRFSYEAPAHVHGFVRGRSTISNASQHLAKRCVLRMDLEDFFPSIGAAAIHDLLREQGYEEKAAELAVNLVTIGGKLPIGLSTSPLLSNLAFLSTDRSLAEYARSEGLSFTRYVDDLTFSGDVTDRHSMDIARILDDAGWSVNTRKTVFMRRGGPQYVTGLYVGESSGPRIPRKVKRKMRWILHVISKFGYAAYMTDFGGEGDEMFRRRLLGWACYIAAVEPDVGYPLLRAFDELVDEEDLEGDEEGLYDLP

SEQ ID NO: 7089 - protein, 307 aa, unidentified
  source 1..307: note = Related to NZ_JOBP01000002.1; note = Streptomyces rimosus
MPYSVHDLAQQAGVSVEVLERLSSMLPAGAGQLYVQRIYRKKHGGIREIFKPKPPFDAIGKNLHRSFTSLFSYEAPDHVHGFVRGRSTISNASQHLAKGCVLRMDLEDFFPSIDAATIKASLQERGYEEKAADFAVNLVTIGGKLPIGLSTSPLLSNLIFLSTDRSLAEYAQSEGLSFTRYVDDLAFSGDVTDRHSADIARILDDAGWSVNTRKTAFMRRGGPQYVTGLYVGESDGPRIPRKVKRKMRWILHAISKFGYETYMTEFGGEDEGMRRRRLLGWACYIAEVEPDVGYPLLRGCVGWPWAG

SEQ ID NO: 7090 - protein, 336 aa, unidentified
  source 1..336: note = Related to CP043956.1; note = Streptomyces sp.
MIALTWECDPISRRPAAEGPVEFSVNNLAEQAGVSVRNLEWLCSNLPTGAGRLYVRRTNRKKHGGVREVFEPQFPFDVVSKNLNRSFTSLFSYEAPSHVHGFVRERSTISNASQHLAKKCVLRMDLEDFFPSIDAATLKASLRGQGYEEKAAEFAVKLVTIGGKLPVGLSTSPLLSNLVFLGTDRSLAEYAQSESLSFTRYVDDLIFSGDVTDRHSADIARILDDAGWSVNTRKTVFMRRGGPQYVTGLYVGESDGPRIPRKVKRKMRWILHVISEFGYDVYMEEFGGEDEGMHRRRLLGWACYIAAVEPGVGFPLLQAFDELVPERAEEDLYDLP

SEQ ID NO: 7091 - protein, 312 aa, unidentified
  source 1..312: note = Related to NZ_CP029192.1; note = Streptomyces venezuelae
MVDDLAEQAGVSVEILEALSSALPAGAGRLYDQRIYRKKHGGIREVFNPRQPLATISKNLHRSFLHLFSYDPPNHVHGFVRGRSTVSNAGQHLAKPCVLRMDLEDFFPSIGAATIKATLGEQGYEEKAADIAVNLVTIGGKLPIGLSTSPLLSNLAFLSTDRSLAEYAQSEGLSFTRYVDDLTFSGDVTDRHSVDIAQILDDAGWSVNTRKTAFMRRGGPQYVTGLYVGESGGPRIPRQVKRKMRWILHVISKFGYYTYMSEFGGANEVMLRRRLLGWACYIAAVEPDVGYPLLRAFDELVPEPDEDIYDLL

SEQ ID NO: 7092 - protein, 319 aa, unidentified
  source 1..319: note = Related to NZ_LIPG01000002.1; note = Streptomyces sp.
MPYSIDNLAEQAGVSVELLEHLSSSLPAGAGRLYVQRVHRKRHGGVREIFKPRMDFQFVNKNLHRSFIGLLPYEAPDHVHGFVRERSAVSNARQHLAKACVLRMDLEDFFPSIRAETVKVSLMEQGYEDKAAGVAVNLVTIGGKLPIGLSTSPFLSNLAFLDTDRSLAEYAKSEGLSFTRYVDDLAFSGDVTDRHAVDVARILDDAGWSVNTRKTAFMRRGGPQYVTGLYVGESDGPRIPRRVKRKMRWVLHVISKFGYDAYMMEFGGSGEGMTRRRLMGWACYIAAVEPEVGFPLLRELDALVPDEDEEDLDYLEITT

SEQ ID NO: 7093 - protein, 316 aa, unidentified
  source 1..316: note = Related to NZ_CP094918.1; note = Streptomyces sp.
MPYSVEDLAQQADVSTEILEWLSSEIPTGFGRLYEQRIYRKRHGGVREVFKPKRPFDTVSKNLYRSFTRLFSYTAPDHVHGFVRERSTITNASQHLAKKCVLRMDLEDFFPSIGAATVQTILREQGYEGKVADLTTSLVTIGGKLPIGLSTSPLMSNLAFLTTDHSLAEYAQSEGLSFTRYVDDLTFSGDVTDRHATDIARILDEAGWSVNTRKTVFMRRGGPQYVTGLYVGESDGPRIPRKLKRKMRWILHVISTFGYDTYMAEFGGREEGMRRRRLLGWACYIAAVEPDVGFPLLRKFDELVSEGDAEYWDEEY

SEQ ID NO: 7094 - protein, 320 aa, unidentified
  source 1..320: note = Related to JAJNOJ010000002.1; note = Streptomyces sp.
MPYSVDDLAEQAGVSVEMLERLSSTLPAGAGRLYFQRRFRKKHGGVREVFKPMSPFDAVSKNLHRSFTGLFSYKAPDHVHGFVRGRSVISNASQHLAKGCVLRMDLEDFFPSIGAAAVKSALCEEGYEEKAADLAVNLVTIGGKLPIGLSTSPLLSNLAFLATDRSLAEYARSEGLSFTRYVDDLTFSGDDVTDHHAVNIARILDDAGWSVNTRKTAFMRRGGPQYVTGLYVGESDGPRIPRNLKRKMRWILHVVSNFGYDVYMAEFGGRREGMRRRRLLGWACYIAAVEPDVGYPLLRAFDELVPEDEEEEEEGLYGLQ

SEQ ID NO: 7095 - protein, 317 aa, unidentified
  source 1..317: note = Related to NZ_BBXC01000017.1; note = Herbidospora sakaeratensis
MPFSVDDLAEHAGVSAEALQKLSSSLPTGAGRLYFQRTFRKKHGGIREVIKPASPFDAISKNLNRSFTTLLPYKAPEHVHGFVRGRSVVSNASQHLAKECVLRMDLEDFFPSISATTVKALLQDQGYEEKAADIAVSLVTIGGRLPIGLSTSPFLSNLAFLSTDRSLSDYARSEDLSFTRYVDDLTFSGEITDRHSENIGRILDDTGWSVNTRKTAFMRRGGPQYVTGLYVGESGRPRIPRKIKRRMRWILHMISKFGYDTYMSDFGGENEEMYRNRLMGWACYIAAVEPDLGYPLLRAFDELVPEGYYETAVWDLG

SEQ ID NO: 7096 - protein, 330 aa, unidentified
  source 1..330: note = Related to NZ_PYAC01000003.1; note = Micromonospora noduli
MPFSVEDLAQHAGVSAEVLEVLSSALPLGEGPLYRAWTSRKKHGGIREVFKPLSPFDAITKNLHRSFTDLLPYKAPDHVHGFVRGRSTITNASQHLGKACVLRVDLEDFYPSIRAAMVKASLQAQGYGEKAADVAVGIVTIAGKLPVGISTSPFLSNLVFWDTDRSLAEYAQREGLSFTRYVDDLTFSGMVVDRHLAEITRILDDAGWSVNTRKTAFMRRGGPQYVTGLYVGEADGPRIPRKAKRRMRWILHKISKFGYETYMEDFGGEDQVMYRNRLLGWACYIAAVEPDLGFDLLRKFDDLIPEGYYSNGYADMAGLLHVINDIDDLP

SEQ ID NO: 7097 - protein, 342 aa, unidentified
  source 1..342: note = Related to NZ_LOJP01000002.1; note = Actinoplanes sp.
MTLVLTADILIGAIGYPTRVLEELALMLRGGGLQVFSLQSHRKRRGGVREIVKPRPLLDSVSKNLYRSLLELLPYRPPDHVHGFVRGRSTLTNARAHLGKPCVLRVDLEDFFPSISSTTLQGALDQQGCDEKAAELVVSLATVFQRLPIGLSTSPFLSNVVFLSTDYALSEYARANNLSFTRYVDDLAFSGDVNDQHFEAISEILNNSGWSINVDKTAFMRRGGRQYVTGLYVGMADRPRVPRSLRREMRRTFHLIEKFGYECYMEDFGGEAAAMFPQRLRGWARYIASIEPDLGYPLLRRIDELVPDQYVSARDLEAYYDYGEYQVIESAEDLYGSEGPDY

SEQ ID NO: 7098 - protein, 319 aa, unidentified
  source 1..319: note = Related to NZ_JNXY01000031.1; note = Catenuloplanes japonicus
MATFSVDDLAQHAGTDVERLEELSRGVLLGNGLLFESRSHRKRRGGIREIVKPNPWLDSITKSLNRSFLQVLPYLPPDHVHGFVRSRSTITNATAHLGKKCVLRVDLEDFFPSIGSRWVNSLLQQQGYDEKAASLCVGLTTIAGKLPIGLSTSPFLSNLAFQETDSALAEFSATEGLSFTRYVDDLVFSGDVTDEHLSAIEGIISNDGWLINLRKTAFMRRGGPQYVTGLYVGGSDMPRIPREMKRYMRWTLHIIRKFGYESYMADFGGEASDMRPQRLLGWARYITAVEPEFGRPLLGAFFELIPLDYCGPDDCEDIY

SEQ ID NO: 7099 - protein, 322 aa, unidentified
  source 1..322: note = Related to NZ_BLPG01000001.1; note = Phytohabitans rumicis
MSFSVEDLGQHSGVSVRILESLSEDLPAGAGKLFRAQSFRKKRGGLREIIKPNPWLDLITKNLRRSFLAVLPYRPPDHVHGFVNGRSTVTNASAHLGRACVLRVDLEDFFPSIGSAQLKAALQEQGYDDKAASLAVSIVTIGGKLPIGLSTSPFLSNLAFQHTDHILAEYAEAAGLSFTRYVDDLVFSGEVSDQHLAAIERILNDSGWSINQHKTAFMRRGGPQYVTGLYVGATDHPRIPRKTKRHMRWVLHIITKFGYDEYMAEFGGENADMLPQRLLGWACYIAAAEPDVGYPLLRALNEQLPPAYVPPNGWLIGIEDLD

SEQ ID NO: 7100 - protein, 332 aa, unidentified
  source 1..332: note = Related to CP061913.1; note = Dactylosporangium vinaceum
MAIFSVEDLAQHAGVSTQTLEELAESLPSGAGTLYSRLTFPKKRGGFREVVSPRKTLDVVTKNLHRSFLDVFRYRPPEHVHGFVKGRSTISNASEHLGRTCVLRVDLKSFFPSIDSTRLKAAFLERVYDEKAAELCVRVVTISDKLPVGVSTSPFLSNLVFRATDYALLDYARAEGLGLTRYVDDLSFSGEVEDRHLSDITRILEDLGWRVNTRKTAFMRRGGPQYVTGLYVGAPDRPRIPRKTKRRMRWILHVISRFGYETYMTEFGGLEAGMIPQRLLGWSCYVASVEPDVGFPLFRAFREILPESYTPPSYYAGEIAGIRIIHELDDLR

SEQ ID NO: 7101 - protein, 332 aa, unidentified
  source 1..332: note = Related to QHBZ01000345.1; note = Pseudonocardiales bacterium
MVTIEDLSEYAGTSVAKLEKLADRLRERVDFSTHVYTTYNRGRREIVAPATALDTVTKNLHRSFVAELPYNPPLHVHGFVKGRSPLTNAAQHLDKACVLRVDLREFFPSINSDRVGTALQTQGFQTDALELCTRIVTINGRLPIGLSTSPLISNIVFEPTDYTLASYCEYEGLEFTRYVDDMIFSGDVADRNLGDIKEILLADGWLVNDRKTVFMRRGGPQYVTGLFVGCADRPRIPRRIKRQMRRVCYLIEQFGYQSYMEDFGGDDARMIPNRLYGWARYIASIEPSVGYPMLRLLSEHVPEKNAHSLDQTRFDHIGITVPRIVESLDDLL

SEQ ID NO: 7102 - protein, 337 aa, unidentified
  source 1..337: note = Related to nan
MLVSLKRIASVAGSSESELRQLADEVEEGQHFHVYRARLRRRDRSIYWPDTPYDTALKQIRPALERLLSYEAPQHVYGFVKRRSTRQNAANHLDADCVLTIDLADFFASIKREAVIGALGDSGADKDASEVIGRLTTPRGVLGMGLSTSPYLSNLVFLRTDDELASLATSLDIRFTRYVDDLTFSGAIDDKKAEHIKAVLISNGWTVNDRKTRFMRRGRAQYVTGLSVSDAVAPRAPRRLKRRMRWRLNMIERYGFYTYVTRFSGGSVDSMLHEAERLRGLAQYIASVEPNLRSGWLERWYRAVPTTSHRFDNEGDTTRLIKLDEDDIRRLLEDEAQ

SEQ ID NO: 7103 - protein, 320 aa, unidentified
  source 1..320: note = Related to PBTR01000101.1; note = Leifsonia sp.
MIPVTPTVLAKRLGHSVPTLENLAQIVQSGPSDDSYRLVRGDRELRVPTPQLKVELLPVAEYLRASLPRPAEHVHGFVKKKSILTNAKEHLGAPVVLRLDLRNFFASIQSDMVHAALTKHASFTDDAAHLLVAVCVPEGRLPLGFSTSPALSNLVFDETDRALETWASANHVALTRYVDDIAVSGHVDDRHLEDLTGILNEHHWVLNETKTLFMRRGRSQYVTGLSVSDPLQARVPRALKRRMRAKLFLMEKHGFDAYMKSFGGDDRGECPQQLLGHARYIAMVEPKLGGMLLRRFSLAIEESAYAGDPEEGWEAWALDL

SEQ ID NO: 7104 - protein, 324 aa, unidentified
  source 1..324: note = Related to NZ_JAFMTA010000001.1; note = Naasia sp.
MNISRRALAARLLVSNRYLDEAASRVTVGDAYILLSLHRRRGETPRQIFVPDAATAFLVKKFHEWITSVGPRPPDHVYGFVRGRSPLENARQHLAKQAVLRIDLRDFFPSISAQKVREALLSVGLDASAAEVATRILTVNDQLPTGFASSPALSNLVFRDSDIAISSWAKDHGLTFTRYVDDLVFSGEIGTEAVSAAVAMVEKTGWRVNTDKTRLMKRGGKQYVTGLAVSDPVRPRIPPSRKRSMRMKLHLIERFGYERYMREFQGEERGDTPGHLRGTARYMAGIEQPFGSNLLARLNAVLPEYWSMEDRSDPDWLEWLGDFH

SEQ ID NO: 7105 - protein, 587 aa, unidentified
  source 1..587: note = Related to JAAMSM010000030.1; note = Cellulosimicrobium cellulans
MVGAVAFESSFERTENLIADLYEGLVSESYLDGLDSYERFKTEGFHAWNDTAEVSTAFVRFLSRNRGYKSYIYFTDRTTRPDLGADQMHAILYRDLLRNLFQEYGSRRLRLIFEQNHKLDFELIATEAAEISAVRPPYSIEVGQKRAPHSLSIVDYAMAIFSRWRDTAYSTSPTTNKFRSWCAIRRWVAIVRSVEQGALYRRGHPVVSEERGVETLTSELNARDSRTQDGTLSSQPPSVAGPSPALEPLGRTEFVRSLGVDSQILESVGAAVREGQLYRVQQIRKRRGGLRKIYSPSIELKLIQKLIREELESALVYEDHPNVFGYISGRSIIDNARVHVGASVVLRVDLRDFFASITSDRVARALIDHGATQDLVSLLVPVLTADGILPAGFPTSPFISNLAFRHMDEALLELSNSHGLAYSRYGDDLNFSGEIDRDDAFLKLVERTLELDGWTVNQKKTRFMRRGGSQYVTGLYVGDSVPRAPRRTKRAIRAQSHFVSKHGFDDIAQARGHRVNTPARLAGWLGYLQRFEPDFVDNILGVGVLTLEDDRAGSRAAVDSSARGWDEYLSRGVLRHGKGSLHRADPS

SEQ ID NO: 7106 - protein, 326 aa, unidentified
  source 1..326: note = Related to CP072596.1; note = Tessaracoccus sp.
MDIRAFLRPIGLTEPQLRSLGDEIRAGARYSKRRVRKRHGGYRDIAVPDVELKAALKLLRIRLECVLPYEAPDMVFGYVAGRSIVDNASQHLGQACVVCVDLVDFFGAINGRRLESALLSQGLAEDLVQLLLPILVVDDSTPPGFSTSPMLSNVVFEATDRALEELAGEQRVRYSRYADDLTFSGQHVDDSLVARVDAVLLRQGWVLNPRKTRFMRRGGPQYVTGLYVGDAARPHVPRRIKRRLRAWFHYIGEFGYSDCEARVALPSGRQLEGWLRHVNQVNPEVVRSIVNDLGHSDLHVAFGAMGLELKGPPRDDWDELLGELGL

SEQ ID NO: 7107 - protein, 326 aa, unidentified
  source 1..326: note = Related to NZ_RJSF01000003.1; note = Marmoricola pocheonensis
MIDLADLGSASALDADEFIRWSNLIAAGSGYSRMSIPQRRRRPRVVLRPEVALDRFLKQLTIGLSRISGYMPPAAVHGFVTGRDIATNAAVHLDQDVVLRVDLKDFFGTINEQRLVRALGDYEFDEDAADAVAGVALVNDALAQGFSTSPFLSNIVFTESDAELTSFAARAGVSYTRYVDDLTFSGPYESVNDELLEAASALLADLGWSVNTGKTRFMRRGKPQYVTGLYVGDSAGPHIPRSMKRLLRREVYFASKYGLRDARLSSPTPMLHDRLNGWVHYAAHVDPVFGKKLLVAWNDVASRRYADRESAEWDAILEDINFPEDW

SEQ ID NO: 7108 - protein, 325 aa, unidentified
  source 1..325: note = Related to VDFS01000037.1; note = Georgenia sp.
MVSIRAVAHASALDVGELLHWQQLISSGAGYTRITIPQRRRRPREVLRPSVGLDRVLKQLNIGLARVSNYSPPHAVHGFIRGRDIRTNAAQHLDKDIVLRVDLRDFFGSIDAYRLTDTLTGFGFDQNAASAVLGVTIVNGSLAQGFSTSPLLSNMTFADADLALMKLAADVGVSYSRYVDDLTFSGSFGEVDDRLLLRITDVLESAGWIVNSNKTRFMRRGKAQYVTGLYVGDAVGPHIPRSMKRLLRREVYFASKFGIDNARLRSPTPMEHDRLNGWVHYAAHADPHFGQNLRDAWATVDSRRPASRSSAHRVQILDEIDFPES

SEQ ID NO: 7109 - protein, 329 aa, unidentified
  source 1..329: note = Related to NZ_SDPU01000011.1; note = Nocardioides iriomotensis
MFEVDVETLASASYMKSADVLVRWGEMLLIEGLGYTRIAVPQKRRRPREVLRPNIGLDRVLKHLRLGLASTSGYEAPDEVHGFVQGRGTVTNAACHLAQDVVLKVDIKDFFDSIGSEEVCSALTRFGFTDECAELVASVTLVDGKLAQGFSTSPLLSNIAFHATDEALAGFAHTRGVTFTRYVDDLAFSGTKDAIDDEFLESLDVQLGNVGWRINPAKTRFMRRGGPQFVTGLYVGDHAGAHIPRPMKERLRRELYFAERFGVSDARQRSPRPMSIERLAGWVHYAAHADPAFGLPLRDRWQRIAPALDSYVPGPDWDLLDDIEFPDDW

SEQ ID NO: 7110 - protein, 325 aa, unidentified
  source 1..325: note = Related to JADCLI010000002.1; note = Pimelobacter simplex
MIDADSLAQASGMTAGYLAHLGDLVQNGTGYSHVVIPQKRRRPREVLIPSVALDRALKQLRIGLEGRSSYEPHDAVHGFVAGRDIVTNASQHLGQDVVLRVDLADFFGSIDRDRLKSSLGSAGFAPSSAEMIANVALVNGALAQGFSTSPLLSNMSFQNTDKMISDLANQKSVTYTRYVDDLVFSGDMYAVTDDLSNAIETLLQEEGWKVNIRKTRFMRRGKSQYVTGLYVGDADRPHIPRGMKKRLRREVYFASRYGLTDARQHSPTPMDPKRLGGWVHFAAYADPVFGLPLRETWRAAVRSDPPPESRTWDSVLADIGFPEDW

SEQ ID NO: 7111 - protein, 326 aa, unidentified
  source 1..326: note = Related to NZ_WJWW01000001.1; note = Aeromicrobium yanjiei
MTTTRDLATHGGPSPQQYPFWAAVLAAGHGYSTLAISKRKRREPRVVLRPNVGLDRFLKQVSTALVAGLDFAPHDAVHGFVAGRGIVSNAAQHLSQDVVLKLDLRDFFGSVRREPLTTALVQAGLDEPTASEVAAVVTVNGSLPQGFSTSPLLSNVAFDPTDDAIQAIAASRGATYSRYADDLTFSGTNGAVDDTLLSDVVSALEHQGWIVNPGKTRFMRRGRAQYVTGLSVDTADGPHVPRVFKQNLRREIYFATRYGISDARVRSPQPLRESQLHGWVEFLAHVEPHRRAELREAWKIIAPRPSARRVELWDELLDDIDFPANW

SEQ ID NO: 7112 - protein, 328 aa, unidentified
  source 1..328: note = Related to QEHL01000037.1; note = Pseudarthrobacter sp.
MTVVQQKLVWRSLKWQLQVVGSMNGRLPTTSESSEWRQWAMEHARPVRFRGRDGWRSVGPLDSLLKRMTAALQSLYVAPDSVFGFVSGKSTYSAAQVHVGAPSALVVDLKDFFGQISEQRVRDALNPLLDEEALDVFVGCCLRSNTLPLGFRTSPLISNLVFRETDRDIERLCAARAVKYTRWVDDLVFSGSAVDDSFLHDLLAVLDSHAWLPNEKKTRFMSTRRVVLGLNVAQSLTRPHVPRGMKKELRKQVYYLSKFGMAHFSHAGAWPLPRILGMIAYVKSVDPNLAALLEQQLHALPKSSRLVAYSSAVGGGRWQMAMLEEVGL

SEQ ID NO: 7113 - protein, 303 aa, unidentified
  source 1..303: note = Related to RBIR01000012.1; note = Arthrobacter oryzae
MLPASASLSEWDNWAGENSRPVRFRGRDGWRSVGPLDSLLKRMAGTLQSEYSAPDSVFGFVPGRSTFSAAQVHIGAESALTVDLKDFFGQITEQRVRAGLGHVLDAEAMDVFLGCCLRSSTLPLGFRTSPVISNLVFAETDYKIEELCARLSVKYTRWVDDLVFSGPSVDDAFLAEVLDILTSFGWVCNEKKTRFMSTRRFVLGLNIAKGLDRPHVPRGIKRELRKQVYYLRKFGVAHFSNDRAWPLPRILGMIAYVKSVDPNLALRLEQQLVQLPKDPLLAAYSSAVGGGKWQLAMLSDIGM

SEQ ID NO: 7114 - protein, 308 aa, unidentified
  source 1..308: note = Related to VFNL01000001.1; note = Microbacterium sp.
MVYMLPRRALLISWEIFSVRIQLADLPPRSAPEWDAWARKNERVVSFRTKHRWRQARRATGRLDSAHKQARALLAAGWAPSAAVHGFVRTKSTKSAAMVHSGARAALTLDLADFFGQVTFNRVVDNLRMRFDDRSCDWIEGACFRDGAIPLGYRTSPALSNLAFSLTDDEIADVARRHGVAYTRWVDDLTFSGAGVSDQLLADVQRTLAGQGWAVNDRKTRFMRRSPYVLGLYVGHDVDRPRLPRRMKQRLLVETYHFSRLGFEHFSHEGVMSPSRLFGRVAYASVIEPELAELLNERVDAGHRVGRS

SEQ ID NO: 7115 - protein, 301 aa, unidentified
  source 1..301: note = Related to CAKKLT010000065.1; note = Microbacterium oxydans
MITWLHFSARLGLYDLEPRSASDWATWASRYRVPVSFPVRGGRRVTVRSVGRLDLSLRAFKSLIAEVSFPHASAHGYVRGRSTVSAATPHVGSSLVLSVDLKNFFGQIDFARVSPVLEASFDAQVCQWIEGVCFVSGSLPLGYRSSPALSNIAFASADLEIFNFAAKAGVEYTRWVDDLSFSGEGVGDGFLEGLQALLADEGWLVNARKTRFMRRAPYVLGLYVGRDATEPRLPRRIKQRLLLESYYFAKYGMSHFDRPYVLPPLTLFGYMSYAYSVEPRLATVLGERIVKGIGKSGGRLR

SEQ ID NO: 7116 - protein, 323 aa, unidentified
  source 1..323: note = Related to AP012204.1; note = Microlunatus phosphovorus
MTLSRVRELELKMGYAPGSLDRLARIFDAGAGHSVIRISSGKSKTRHVVRPTVALDGMLKSLRRVLEAELGFEPMDCVHGCVRGRSILTNASMHLARPVVLRVDLKDFFDSISTSDISDAFKVLDVDDETAELLARCTTIHGRMRAGLSTSPLLANLVFNSTDRDLQEIAARLDLTYTRYVDDLVFSGETITDDTLATIAEQIVARGWTINARKTRFMRSGGAQYVTGLSVDVESGPHLPRRMKRFLRLEVHYATLHGFGSGSTGKRRLIGLINYAKCVEPWLGAELHDSIREAGLLVGRSESEDAFEDAEDFWDELGLRDEY

SEQ ID NO: 7117 - protein, 320 aa, unidentified
  source 1..320: note = Related to NZ_JACCBU010000001.1; note = Microlunatus parietis
MAVTVDQIERMMGVPPGTLDKTARILEAETGFTILRIPSRRGRFRRVVRLTTTLDSIIKGIRRSLEAQLSFVPRDCVHGCVKQRGILTNARAHVGKKVVLRIDIRRFFESISVSQVEDALRTSEADPESSALVARCTTLGGFLPVGFSTSPLLANMIFDGTDALLGDCAKSYSLSYTRYVDDLSFSGEHLDDQIRLEIEGVLRSQGWEIQDRKTRFMRAGHAQYVTGLSVNDPNGPHIPRNMKRFLRLEVHHVVRSGFGASVLGKRKLLGHINHVKHVDYDLGLELHDAIRSAGLLVGRPDDESPEDGLELFWEDIGIDF

SEQ ID NO: 7118 - protein, 325 aa, unidentified
  source 1..325: note = Related to JAFBCF010000001.1; note = Microlunatus panaciterrae
MRSAARLGFVAGVRASALQQMALTFDRGLGYSTLEVPKRGGGSRTVLRPVSELDHNLKLLRRGIDTLSSYSPPEWVHGFVPKRSIVTNAQAHLSKEIVLRLDLSAFFESIKKSAVREAMLRFGFSDDASTLISDCCCIHGSLPAGFSTSPTLSNMVFLPTDDALHEWAGSRTLTYTRYADDLTFSGTDITDDDCAEIARMLSSAGYAVNARKTRFMRRGGPQYVTGLYVGESDQPHVPRRMKRLLRQQAYYIAQYGYSEAQTRSSRQFTPYQLRGWINYMGTLHPELAARLRCAIFARLPQAPERPDPSDYWDDLLDELHIPDDF

SEQ ID NO: 7119 - protein, 330 aa, unidentified
  source 1..330: note = Related to WRPM01000031.1; note = Nesterenkonia alkaliphila
MRESAPRTFSHREEAPMTILSDTLTLDDLVIAATLPDTARDLMEEPVRPWQLNTITVRKSPGKFRRVVEPRDNSLARVQKKLKEFLDRDVLEPHPCVHGFTRDRGPYTNALAHLNARAALTIDISDFFSSVSSDDVQSTLVSFGASTAVARGITNVSVFENVLATGFSTSPVLSNMYFRDTDDVLATFAEEFNLTYTRYADDLTFSGEDVDDTHLAEITRVLESKGLRVNQKKVRFQRSGHPQFVTGYVIAHRDHPRVGRYFKRQLRLDLHYVMKHGLVHQAQLRGLSPQVLAKQLAGRINYLMCSERDLAVHLRQKYGHLLDDVDENPY

SEQ ID NO: 7120 - protein, 306 aa, unidentified
  source 1..306: note = Related to NZ_CP071516.1; note = Arthrobacter sp.
MTVLSRIRNLEELTVAASLPRTAIDWLAKPIAPSEVTVHTTRKSNGGYRVVCQANDEKLVRLQKRFKEFIDRQVLVAHPSVHGFTRRRGTVTNASAHLGAAALLTVDISNXFPSISRQQVEFALQEHGASETIAAAIANIATFDSALATGFPASPVLSNLVFRPLDDEFEHFANVNGLTYTRYADDLTXSGESVNDAHLEAISATLSLHGFRTNTKXVRFQRRGHRQIVTGFTVAHADHVRLPKPKKKILRQDLYYSSKIGLAAQASFRNLDEEDFRNQILGRINYFMSVEPKLARVLRHEFDLLD

SEQ ID NO: 7121 - protein, 335 aa, unidentified
  source 1..335: note = Related to NZ_CP018135.1; note = Neomicrococcus aestuarii
MRFARVSYLVGIVVIGDFRAPHPRKEEVSILKDLRTAEELQIAAALPDSALLWLCRPLSAEDIYVHEIRKSKGRFRRVYEPRDNSLARLLKQLKEFLDRQVFQPHANVHGFIRDRSIFTNATAHLGARAILAVDISDFFSSISRDQITGALISLGASDQVAVSIANVCTFRNELVTGLSTSPVLSNLVFLPLDKNFESLAVERGLTYSRYADDLTFSGDAVDDQLLAVVAERLSEHGFKINLKKVRFMRKGHRQVVTGVSVACGDKLRLPRNFKKRIRQDLYFSEKNGISLQALHRGFSNDEDFRESLKGKINHLNSVDSSAAKLFMSQLNNISS

SEQ ID NO: 7122 - protein, 328 aa, unidentified
  source 1..328: note = Related to JACOVQ010000014.1; note = Candidatus Zambryskibacteria bacterium
MHPVGINIERIKTLIELASLFDVSEEMLQGFIDNHDELVARVLMLKNRSGEYRKIVFTKSDPYRIFLRTLSAFLYEWYSHRIPDSVHGFVKRRSIITNAQQHTQKKSVTNIDIKHFFESITFKEVHGIFIKVGFQDKIAGKLTELVTVDGVLAAGFATSPVLSNIACLDLDEDFKNLANEHGLIYTRYADDITLSSNKEIPSKEEIKNILIKYGFEINENKYRIYRRGGPQYVTGLSVVDKRPRLSKKFKRRLRLELYYIKKYGFMDHWAKAIKRAIDKNTYPSRFSQVAYGGWGLEGFAAFIHSVEPKLGSKIFKTLLKRGEDEMYW

SEQ ID NO: 7123 - protein, 326 aa, unidentified
  source 1..326: note = Related to MHXK01000022.1; note = Parcubacteria group bacterium RIFOXYD2_FULL_52_8
MFPTNIDIGKIKTLSELAPILSVSESQLRYFLESKESLIKRGLILKRSGTFRRIMMAKDDSFRHFLLKLSSLFYSKYELHIPAAVHGFVRGRSIVTNAQQHTQKKIVLNVDIENFFDSISFEQVVALLISFGFQENIAKVLAELTTVNGILATGFSTSPVLSNMACIVMDGVFKSWSKKRNFTYTRYADDLTFSSEQYVPAQKEIAEILGHFGFKINLDKYRVYRRGGPQYVTGLTVVDKRPRLGRKRKRSMRLELYYIKKHGFLNHFYHALDRATKRHELPSKFTRTVFFGYGVDGFRAFMHSIEPRLACNMQQVLKKEAPKARN

SEQ ID NO: 7124 - protein, 442 aa, unidentified
  source 1..442: note = Related to SJJY01000010.1; note = Kribbella speibonae
MPGGDGLRSWRHASAPFRRCLRLPRGALRRIGQKLRLPHRLRRRPTPRRQKAPYTVDAGGAAALGTSRPRDHVMCENPAMAPPVPLFEFTCHQSVASLEVPLGKPTHALEHLATTCDSGGAYQLNYFWIRNKLRSVSAPNHQLDLVHRRINSLIFPVDLAMRREVNGFIARRSTITNARPHAGARYLQKFDIKDFFINIRTLQVRAALRNIGFGPGAATMLSRLVSCNDRIPLGARTSPRISNLVLMSFDDAMIALADERDLAYTRYADDLSFSAQAMFDVSSEVRAALTSSGFELNASKTKSFKHGQPMFVTGLAISDASRPRLRKRLKSRLRREFYFVERFGLAGHANKIGAHPERTASRLLGQFHYARSVEPEFATRLEAKYPTAFGELIPQRTDDRVERAQRSRREFLTDVENAPQQTLPFYTPTASLPFVPAHRAVE

SEQ ID NO: 7125 - protein, 357 aa, unidentified
  source 1..357: note = Related to WAAQ01000003.1; note = Microbacterium maritypicum
MAPLTRQLEFTFHETAASLESVLGKPSSAIEALASSCDAGTAYEVGVLSIRRKLRVIRVPERELDAVHRRINMFLFPVDLSMNPHAHGYVARRSTLSNASPHVGATFLQKFDVKDFFSSVSREQIAGALTRIGLGQDAAQLLSRLVTCQGELPLGARTSPRISNLVLADFDESIGAVASDAGLTYTRYADDLTFSSQSAFDVSHEVRTQLELRGFELNLAKSKSFRYGQPMFVTGLSISDKTRARVRKRFKSRLRKEFYFVEKFGIEGHAEAIDEDEHHASARIMGQFHYVRAIEPDFAAKLAATYPTAFQTLIPERYDDRIARVQRKRDEFLTDVARQPGLHLPVYLPTTPLTVGR

SEQ ID NO: 7126 - protein, 356 aa, unidentified
  source 1..356: note = Related to VYRZ01000003.1; note = Microbacterium radiodurans
MAPLDPLFEYRVHPTRASLEAPLGRDSMTLEGLAARCDEGDAYVTGFMTIRGKSRFIAAPRPELDAVQRRINLLLYPIDLSLGASPHGYVARRSTLTNARPHVGARFLQKFDVKDYFASITASRIATALTELGFGSEAATLISRLTSHRLRLPLGARTSPRISNILLIDFDDQMENLAREQGLRYTRYADDLAFSSQIAFDVSDRVEQAIRAAGFELNPMKTKQFKHGQPMFVTGLSIQDATRPRVRRRLKARLRQEFYYIEKFGIEDHAAAVGESWRGVLHRLTGQFHYCRTIEPQFTAQLTLDFPAASSSVAPVHEDSRVERAQRHRREFVAEVMRQLPTAIPFYVPQADLFEN

SEQ ID NO: 7127 - protein, 360 aa, unidentified
  source 1..360: note = Related to JADLEH010000111.1; note = Propionibacteriaceae bacterium
MSTPAGPFDYILSEQHLARALGVPVALFEYVGNLAEMGKAYEYRRKSIHGKIRELGVPVDSVMSLQRRITDFLWPLSLELHPACHGYTPGRSATTNAAPHCGARWVQRLDIKDFFPRTTPNIVTKALVERGAHQTVAELLTKLTTDRGSLPLGAPCSPLLSNLILTPVDNRVADQAASIGVSYTRYADDLTFSADAEFDMTGVVQSALQPLGYTLNLEKSRLRRRGQSIAVTGLRVAEMDHPRLPKRFKRELRQEFYFIEKFGFADHCNTRYFWHWIDEEDDEKQLDHSTRHLQGKVRYALGVEPDWMRALLDAHPVAASELTPPKRHQADQRLAALTALAAEIVGRRHVSLSREPTRLG

SEQ ID NO: 7128 - protein, 366 aa, unidentified
  source 1..366: note = Related to JAAYZP010000360.1; note = Propionibacterium sp.
TGPFQFRGTNALFATALGLTAEQLEEAIKLAGERSSYQFRTVRKRGKERTFISPRAPLLNLAQRRVADFLRPFNELLHPGCVGYVPGRRTLDAATPHSGKPWVQKLDITDFYSSAQDTIIHDTFVSLGATQEVSETLTSLVTWEGVLPTGTRTSPVVSNLVLADFDFECAAEAERRNLAYTRYADDLIFSGDDPFDMSGWVDHHLQAIGFKLNPRKSVLCRRGQPIRVAGLTIFEKDRPRLPKALKRRLRLEIYLVSKDLAAGHFESPGDEDDYPPEVEEARARFFHAQGMLRYSAGIEPAFVQSALDKHGEELRDLLLPARRRHRDELELRRLLAKILGTRAPGLGRTPSPIPSAPPISRVSSVG

SEQ ID NO: 7129 - protein, 355 aa, unidentified
  source 1..355: note = Related to NZ_RKHL01000001.1; note = Plantibacter flavus
MTPRTSPASTLRSPRHLELYLGAPLSALEAIAADLAAGVGVEVVTLRSKGKAREITCPTDETVRNVHRRILSMMTPVQMDLPDMVTGYVRGRSSVSNAQAHAGGAFLQKFDLRDFFHHISSDAVATGLRDVGFQAEVAALLAGLTTCRGLLPAGFSTSPAMANLACRALDEDIAALADSLGLIVTRYADDLTFSGAQFFDVRSDIGVMVKAHSHVLNEEKTRTLKRGQPMYVTGLSVSENDRPRLPRPFKRKLRQELHYISVFGLAEHADRHGVKVEGLRFRLGGQLAYASAVEPDLVKYFEAHFPAAYRDVARARSPISDDKRRTRLAQLAARVAARSDPLAEMYEPTVTIAAL

SEQ ID NO: 7130 - protein, 353 aa, unidentified
  source 1..353: note = Related to NZ_JACCBH010000001.1; note = Microbacterium pseudoresistens
MTPRTSSVSILRTPRHLEVYLGAPLAALESIARNLDVGIGVEVVTLRSKGKARVIACPTDEAVRNVHRRILSLLTPVQMDLPDMVTGYVRGRSSVTNAIVHAGAAHLQKFDLRDFFPHIGVDAVDEGLHAAGFQEEVARLLSRLTTCRGYLPAGFSTSPAIANLACQSMDAELAALAEQEMLNLTRYADDIAFSGMEPFDVLDEVRQIAIAHGHALNDEKTRTLKRGQPMYVTGLSVSEQERPRLPRPFKRGLRQELYYVQTRGLAEHASWRGAKAEAVRYRLGGQLAYASAVEPGWVEALTTAFPTAFQEVARRRSSQSDAKRGERLAQLAARVIARNDAAAELYEPSATIS

SEQ ID NO: 7131 - protein, 358 aa, unidentified
  source 1..358: note = Related to NZ_JAGXJI010000001.1; note = Microbacterium sp.
MEIDRRVPSFADWLNEADVANAVGMQLESLAQTARRLAEDEGVVHSRILTIRGKQRLVHTPRDEGVRQALIALMASIELPIATVLRRDEIAHGYIAGRSAYSNASSHAGAFWLQQFDIKDFFPSISATRLESALLEAGMGARAAQFVTSLTTYGGSLPLGFVPSPLLSNLVATGIDVGLNDLAQQHGLTATRYADDITLSGPHEFDCTEEIEAIAQASGFALNPAKTKAGEARHGARVTGFVVSTGSPRLPQHVKRQTRQDLFSIQRIGIEGQASMRGRTPQSLVRRLLARLGTLRKCEPVVYERLKRDYPHAFVDLESYRTDALAARARRADALEQQLLLSSSPAPAYYIPTHPAGR

SEQ ID NO: 7132 - protein, 334 aa, unidentified
  source 1..334: note = Related to FOYR01000002.1; note = Microbacterium azadirachtae
MRLSALQEIAQRLRAHPAAVHSRHLLIRGKKRLVHTPRDEGLRQALVALVGCIELPIATTMRRDEIAHGYIPGRSAYTNARCHVGATWVQRLDIKNFFPSISAAHVEAALTEAGMGEDAARFIVAFTTFGGSLPLGFIPSPLLSNLVATNIDIGLLRLARERGLCVTRYADDITLSGEELFDCHDDVATIVGESGFALNLAKMSAGTPRNGFRVTGYVLSTGDPRLPRHVKRETRQDLYSVERIGITQQAKHRGRTPQSFGRRLLARLGSIRQSEPLVYERMRSDFPLAFERLDALRESARVTREQKSAMLERELLSMPSAAPAYYTPLHPAGR

SEQ ID NO: 7133 - protein, 361 aa, unidentified
  source 1..361: note = Related to JAHJKW010000011.1; note = Actinomycetia bacterium
MTPPTHLEYSVVDSVGVLAGQLGRTAEDLFQMAEEIASNVRYETQAVRIRGKVRILTVPDDRLKYLQRDICEFLIPANDRLSPEVHGFARGRSNRSNAISHAGRIYIQRFDLKDFFGSVTSAQVLAAFRELGLSDPAAHLLTELTTYRRALPQGAPTSPILSNLVMREVDDRMRELAHSRSLSFSRYADDMAFGGNERFDLSSEVEDIIDAYGFRLNDSKTAFAGPGQPRFVTGLYIDEDRVRLRKSFKRKLTQTLHYVEKFGIDDHADRVGKAPSKAQEQLRGRIHYARQVEPAWLDKQRSSFPRTLNELVPMNYEATRGEYLLARRQGFLSGMAGMTAASALRYVPAVSYAEVKSPVVV

SEQ ID NO: 7134 - protein, 554 aa, unidentified
  source 1..554: note = Related to SDNX01000008.1; note = Candidatus Lokiarchaeota archaeon
MEDYWYIVIGMVALLVIFCLCIGFSGGKWNYAAYIKEKNERVQRKRWNKYVKFLDPVKETELLNIIKLSSDADFEAFLKEIQPLLTKKYNPYNLNEQTLLKRTIYNVINRYTTQFKYDRVKKIEAILPMLKRVFLGPRLTNQVYSKKTLKRRFKFPLKSGVEIPKLDTIIDVAFFFNISVNKILGLCYMQEKNPGAYYVKREIIYDQMGEKGIILHQKDPAMVQLDSSYAIAEPNILKKKKSNQNEGKNSEDIQEKLEEIKPSFKEYSSPFYKRKMLTKPDGRKRLIACPVSYLKKYQRKILGDILEKVALPTNCTGFVKNRSIISNAANHVGSQTLVKIDLKNFFNSMKFYHTFEVFRGFGYNRPVSGILACICTDWYTKGGRYVPQGAPSSPMIGNLYALHLDKRLEGLWTKAGFVYSRYADDLAFSSSDPKVRVRGLIFASYQFIKDEKLSPNPAKTKVLRKQHKKKVTGITVNEKINIDRRWMNAFRGELHRYSKFGLPSDGVQRSKIFSQLKGKMSFLQMIDQNKAQKYDLYFEKIRTEYAKLLGNSSQ

SEQ ID NO: 7135 - protein, 538 aa, unidentified
  source 1..538: note = Related to JAFGBS010000004.1; note = Candidatus Lokiarchaeota archaeon
MDAFRYSLYISVGFGLLVFICCLLSSKKRADYEDYRREKWNKYVSFQDPELRKSLEHDIIVSTDEEFEAFLVSLRSSVKYRRDKNGLRIRKNICMFINNIWMNSYSEKGRKIYKRLKKLEEIVPLLKRVYFGPKYTPIIYRERKYEKSYQRRKFNFPLQPDSTAPKLDTIIDVAYHLQTSIRLILAIIYTQSHSRDRNYVKITQIDKALHQKGNSYLRVVGSPIARHVDIDQSFILKDKRGKVPKNAKTTDPQDAYLEYKELDSNFYTRKTLVKPNGRKRLIAVPNEKLRSFQRIILKTILEKAALPDVCTGFTKTRSTVTNAEFHVGAQTLVKVDLHNFFNNLSLDHVFEVFRGFGYNRPVSGILANLCTDYYRSRRYLPQGASTSPMIANLYALHLDRRLEGLANKYDLIYSRYADDLTFSSKDPKIRVRTFIQAVYKIIKSEKLYPNYQKTKVYRKQHKKSVTGITVNEKVNIDRKWVNAFRGELYRYSKFGVPEEDRFRIVHQMHGKFAFLKMVNPEVAKKYETQISKFIAENS

SEQ ID NO: 7136 - protein, 524 aa, unidentified
  source 1..524: note = Related to NZ_CP042905.1; note = Candidatus Prometheoarchaeum syntrophicum
MLLEGLSGEAAGLIIIAFMIFVFCLCLAKLLGYSGYLHGDYRWNKYIKSNEPSIEKEIYYNIQSLSDEYFKTYLQSIRKTINYKFRTGDKSLKNTILKRSMLNIINKHTNELPNERIKQIEEIFPLLRRVYFGPGLNKEVYDKKHFKKKFHFKLKPEHTIPQFNSIIDLALYFKIRVNALLGYSYNQKTKRTAYYIKRKKMFENFGQNTIPDDYRYIKKSYSELKEEKKKKSKKQPEIEIPSFKELESPFYTHKFIEFPNKKRRLISNPNYWLKQLQLKILRDILEKVEIPDYCYGFVPGKSTVDNARIHLKANTLIKIDLLNFFPSLKFWHVLHVFRGIGYNRPVSGVLACLCTDWYHSKRFVPQGAPTSPMIGNLYASRMDVRINGLANKYGLKYTRYADDLTFSSINEKIQVRKFIASVYHIIRDEKLYPNLKKTKVFRKGNRKAVTGIIVNEKLNVDRKWVNSLRGELYRYQKFGLPQGEEGDIIYNQLQGKIAYLHMVNPEKANKFSLLFQKLRELNRK

SEQ ID NO: 7137 - protein, 487 aa, unidentified
  source 1..487: note = Related to WJKO01000714.1; note = Candidatus Lokiarchaeota archaeon
MASELTLILVFVGLVYFLIFVCAAAASKRMRSRYPKPKPGHRYRKLKRVRDPKIQAKVRERLTKWEGAQYEEWYKDTIKKINYKYRTNQRQKKWTVLKRAVLDIINKYTYEIPEERLKKFSQDFPLLRRVYFGPKLNKQVYNKKNLARKFKFKIKDGTEIPHLDNIVDIALFFNTSVNVLLGYAYTQDLSNKSYYIKKNYTKKRKRKDYYEQKSRFYNRTTLIKPDGRKRLISSPKYNLKNLQLKILHDILEKAELPDCCTGFKPGNSIVDNAKPHIGKSTMVQIDLYNFFPSLKFDHVFEVFRGFGYSRPVSGVLAGICTDFCNSPRFVPQGAPTSPMISNLYASHLDKRLKGLWTKRGFTYTRYADDLTFSSDADDIKVGNLIHATYEIIKDENLKPNYKKTKVYRKGHRHEVTGIVVNDKLSVNRDWIRELRAELHNYNKNGLPDGIEGQQILNKLQGKISFLNMVDPEKAARYRAQFAVLTKD

SEQ ID NO: 7138 - protein, 349 aa, unidentified
  source 1..349: note = Related to SDNE01000165.1; note = Candidatus Lokiarchaeota archaeon
MLESQEKLDLNMHDSNRSKLKIKELPLVLNLRDLINFLEISHSLLENYFTFKSSLLIYKTFFIAKKSGGHREIFIPVPKLKSIQSKILVEILEKINISKFAHGFIKKRSIVSNAQEHLESQVIYKIDLVDFFPSIKFDKVHEVFKKIGYSEYISYLFGLLCTHLRGYNEMSQEKSSLNLNKLRFLPQGAITSPIISNLVCSKLDKDLNKIARIYGFRYTRYADDIAFSSQYRKDITNKFRKKIHSIIKKHGFSINRKKECLSYNRNFQRVTGINVQNSELSLPRKWIKNLRSALHHLENDYNQIDEECIEIMKNIEGRCAYALMVNKKKYNHYYQDFISIKNNISKRSE

SEQ ID NO: 7139 - protein, 358 aa, unidentified
  source 1..358: note = Related to SEDY01000002.1; note = Proteobacteria bacterium
MFKLCLCGVIIMLKPLGSPATLLRRRELSHRELNRHLGSQPGLISSIIEKGVARHYHKKTILSGNRFMRRSHDLQKMREILEPQDDLKEIQRAISRVLSRYFVPHEIAHAYVKNRGIVTNATRHIGARSMLHIDLADFFGSITQEAVLNGLYHVLEDFYASDIETIAELCCYDGFLPQGSPASPILSNLVCFPLDMELSELARSFGCALTRYSDDIVFSTATRSLPSKLARVSDREAAYTVKLGQPLRSLFELHGFELNMKKLRFQRWPGPLKVTGVLVGERLHVPREFRHNIGAALSQWKRHGIVVAARNHPKGSAEAFAGSLKGCIDHVGHVEGRDSTHYRRLLIDLETLIARDLN

SEQ ID NO: 7140 - protein, 360 aa, unidentified
  source 1..360: note = Related to CP012199.1; note = Sphingopyxis granuli
MQYKSLERRLGLATGAVSTVMNADAGTRYTRFPVSPKRGIIRKPGWTPKKRMILAPSKDLKAIQRAIARHISSKFTAHPIAHAYENGRSIFANARQHVGARSILKIDLVNFFGSIGRQSIIDALRLLLDDFGDRDIEVIADLCCCDGYLPQGSPASPVLSNLVCYPLDVELDRLARRHGCKVTRFSDDITFSTSAEVFPPVLARTWRSGLAHGVALERPICSLLQQRGFEINIGKLMFRTRPMPLKITGLIVTDSLSVPRAFWHNLRASLHNWDRRGLDTCARTHANGCVVAFVNSLRSSIEYIGQVQGRDCKRYQRALAAFEELRSRDKEPLSAAIQRIAAARKAKKAKDENVIIPGTG

SEQ ID NO: 7141 - protein, 356 aa, unidentified
  source 1..356: note = Related to QMND01000158.1; note = Candidatus Shapirobacteria bacterium
MFKAGVSNFDLKQVLGAGLETVDEIIANKENHIERISIPKKNGGKRNIIAPDPQLKYIQKSIYWRVFRRYKADPSAHGFVLKRGIVTNADCHVGAKCLGKIDIKDFFDSISIDHLKNCLFGNKHICRYCKYYERMLDGRCNPSLYHNKTHNFDFKCEEIKAVHIPAYCEETGYISLFNRIIELCTFEGFTAQGFPTSPMLANIVMRGFDKSMKEFCATEGIAYTRYADDLAFSSKNLTKFELKKKIKQKAYQLLWAYGFAPNKKKTIWKSSAGRLKICGVVVNVKKSVQRKDVHKFRAEVHHATVKNADKTTKGDLRKLKGWASFLMSIDPVKGKKYMNQLLKFEADKFSIKSKGI

SEQ ID NO: 7142 - protein, 305 aa, unidentified
  source 1..305: note = Related to JACNHT010000021.1; note = unidentified bacterium
MNIYELLNTTSKEVSSIILELDQHYLSYPIAKRNRKTMRWIDAPQGKLKELQETFLHRYLYRFSAHPSCVGFVKGKSVRTGAERHIGTEQLLNMDLKNFFSTIKIYKVAKLLTFLTSRHSTITGKQVTFVNTDDKEKLARLLTYKNTLPQGAPSSPAIANLCAYQMDVQLTALAKNNGCIYTRYADDLTFSTKKTKDKFNIIGMIPQIRETIEKNMFSVNYKKTRVQKQNNRMTVTGVVVNKKLSTPKWYWRNFRAKLHNLEKSGVPITEEEYQEIRGTAEWIKSLHPVRGEKFLETLGKLNLTI

SEQ ID NO: 7143 - protein, 304 aa, unidentified
  source 1..304: note = Related to JACNIW010000301.1; note = Rhodobacteraceae bacterium
MNIYDMLATDKQTLKTLQTDIDNQYLSYPIAKKKGKAIRWIDAPQPELKTFQEAFLNSFLYKFTVHPCCVGFVRGKNVASGAKQHLGSKQLLNMDFQNFFGAIHIGKVRQLVKFLFSRYKKITDNVFTFTSYDVELFAALLTFKSRLPQGAPTSPAISNLCTLPLDKELAALAAQSDCIYTRYADDLSFSTKQEKAVFDVKDLIKPVSKKITRAQLTVNYKKTRVQRPHNRMTVTGVVVNEKLSTPKWYWRNFRAKLHNLQMSQVPVTPEEYQEIRGTAEWIKMLHPIRGQQFLNTIGKLNLML

SEQ ID NO: 7144 - protein, 327 aa, unidentified
  source 1..327: note = Related to WVYK01000372.1; note = Anaerolineae bacterium
MFLPLTTDEFLDRILVVKNQWKRSTIYYHAKVQHYKKHVREKKPVKNILVMGDAPVPKLREINEPCPALKWIQGYILRMVLDPATDQLMKCAHGCVPGRSTVTNAAPHVKSRWKIHMDLKDFFPTVTVQRVYGLFHKVFKYGPDLSWLLANLTQYEGKLPQGAPTSPAIANHVATPMDRHLVKLISKMGGYYTRYVDDLTFSFPRQMSDKNKTRFIKTVREIVERNGFVVNEDKTSIIGRGSKMTVTGIVVNAKTSTPRWFRRNIRAALHQRALGVPSADNDHVIGGKIAYVNMVCPEQANAFHLKTCQVDDCKKCYGLAMKSKNAS

SEQ ID NO: 7145 - protein, 517 aa, unidentified
  source 1..517: note = Related to JABHAL010000007.1; note = Candidatus Falkowbacteria bacterium
MPTEKKKKVNPLDEYTDFGTILVLSERLAQYLRLLFKLDKASWNFALDKIRQGKAYREWRKFKGRGKGYRYFAAPCAELKTVQRSIKAQFLDQIPIHFSRYGCQGGTGIVEHAAAHMGNKVAFGVDIINAYPTVLRSRIRKCLQKPFRFMLRQFGDVTWLEDDVKNMLEAVVDLLCLHDRLPQGPPTSPRILGIVCYKMDTAIFSYLHESSSPLQGFNMTSWFDDITVSSDKEIPEEMRAKILALIKEHGFIPHTRPDKTKYYSPETGEVPIVTGIVICPDGRLTMAPRKVNQLRAAFNNWLKIEVWDEHILGKVNGTLGAVRQLYPEKLPSKLRVLVGKIEDRLHAGKVAKSLQYLDNALLPSGLQDLAKQLSMVVIDGQGDVSSQLLGDNLLFVDGAARKSYQAGIGAVLIKDRTEVSTISQLIGKATSNQAEYQAIIVGLTAAKELGIAELDCFTDSMLVVNQLNGKFAVSKPHLRTLVAQVKALVKEIGTVRFHHVPRELNTSAHSLAHMALK

SEQ ID NO: 7146 - protein, 374 aa, unidentified
  source 1..374: note = Related to MFGM01000084.1; note = Candidatus Falkowbacteria bacterium RIFOXYC2_FULL_48_21
MAKRGKRKNKKPFVFKDFETVLALPERLAEFLRLLLKLDKATWSFALDKIRQGAAYREWSKSKGPGKGRRDFAAPCAELKAVQRAIKQQMLDVIPIHFTRYGCSTGVGIKENAAAHVVPGVSVCVKEFDIMNAFPTVLRSRIRKVLQKPFRFLLDQFAGMEFGDDDVKLMLESIVDLVCLHDRLPQGPPTSPRLFGIVAYRLDCALFRFLHENSTEFQSYKMTSWFDDVSISSRDEIPEEVGVKAAKIIEEHGFTAHHRKDKSKYYSPATGTVPVITGLVLCADGHLTMTPNKVNQLRAALHKWSGEKSWDEATLGQINGTLGCIKQVYGDKPPSKLRKSVREIEARLAMMKIEKLQADVARARVMPKKKSKKK

SEQ ID NO: 7147 - protein, 454 aa, unidentified
  source 1..454: note = Related to SICH01000034.1; note = Candidatus Taylorbacteria bacterium
MMGTSRFMVSLPCIMASSFKREMGKMAKTKRRKKRKRAEWTWVDFRVILDLPERLSRYLRELLHLDKPSWDFALERIRRYKQWQNEKKEKPDLGRLPRTQVAYFEWSKSKGRGKGRRYFAAPCAELKLVQKAVLNRLLASIPVHFCRHGNQPGSSILSNAARHMGFAKSVFSIDIVNAFPTVFRSRVFANLKKPFKFVLRQFAGVEFSEDDIKQMLEVLCDLICLHDRLPQGPPTSPRILDIVCAKMDQELYALLEKNSTPFQSYRITAWADDITISCDGEIPEELREQCLKVIKDNGFIPHTREDKTKYYSPETGEVPVVTGLVLTSDGRMTMAPRKVNQFRATLHQALKRSEWDAQIRGQIAGTMGYIRQIYPDKLPSALRELVPQTEARMQEECKKALQLNGEATPTVPPNSLPKKKGKAKTKPAKTPKSRTSDEAEESSATETVLCEMQS

SEQ ID NO: 7148 - protein, 437 aa, unidentified
  source 1..437: note = Related to MGKZ01000009.1; note = Candidatus Yanofskybacteria bacterium RIFCSPLOWO2_12_FULL_44_13b
MAKKAKKPRGTAPEEQKKRRRRRKEWTFTNFQNVLALPERLATYLRLLLHLDKTSWDFCLDKLRQHVKWEAEVEDKRPKVQINVKGRERTSRSGPAYLAWSKSKGRGKGRRYFAAPCDELGRVQKSILHRFISQVFVHFARYGGQVGSSIMANAGHHAGFAKSVFSLDIVNAYPTVYRSRVRATLRKPFEFALRQFKGVTFSEEDVLKMLDSITDLIVFKDRLPQGPPTSPRVFDIVCGKMDQEIFQWLESNATPFQGYRYSAWTDNLTISSDGEIPLEVRQKVIEIVRENGFFPHMREDKMKYFSPETGERPIVTGLVVLPDGRITMAPRKVNQLRARLHQLMLRKAWDKEAMMLIDGTIGFVREIYPKNLPSKLRDVVLAVEARRASMRVPVVHDESIEDEDAIMLDEDPETKVPSPSKKKDEGPTETVSEVVLM

SEQ ID NO: 7149 - protein, 436 aa, unidentified
  source 1..436: note = Related to MHXB01000023.1; note = Parcubacteria group bacterium RIFCSPHIGHO2_01_FULL_45_26
MAEKPEKRRQRRRKEWKYDNFAAVLALPERLAHFLRLWLHLDKSTWDFCLDKLRQHRAWDEQVAQFRAQEGKKRKKGEAEVPKPPRCGPAYLEWSKSKGRGKGRRYFAAPCEELKVVQKAINNRILAHITVHFARHGGQIGSSILTNAGHHAGFAKTVFSLDIVNAFPSVYRSRVKAVLGKPIRFGLQQFAGVAFSPEDEEAICASIADLLVFKERLPQGPPTSPRVFDICCGKLDQEIFALLQGHSTPFQSYRYTAWTDNLTFSSDGEIPEPVREQLVELVRKNGFFPHTRPDKMRYYSRETGEVPIVTGLVLGAEGMLTMAPRKVNQLRARLHRFERLANWDDQIQGEVAGTLGYIRQVYPKRLPSKLRDVVAAIDSRLAANKAVTTEVATAPTPAPSTRPKTSKAPGKSKGKARAKSAGKPKVKEELLAEAVS

SEQ ID NO: 7150 - protein, 412 aa, unidentified
  source 1..412: note = Related to JACRNX010000027.1; note = Candidatus Falkowbacteria bacterium
MAKGKKVKKQKLQKTDVKDFEAILQIPERLAQLLRLLFHLSKPEWDFCVAKIRQKEAYREWRESKGPGKGFRQFGAPCAELKLVQKRILQNFLANVTAHFIRHGNQPGSSMMTNVQHHAGFAKAVFGIDLVNAFPSVFRSRIRGNLRVPLERKISEFGEEVNKSLSDEDKKIMLEAVVDFLCLHDRLPQGPPTSPRVLDIVCFALDRSLAGIAAKHSTPFQQYRLTAYADNFTLSSNDEIPEEVKTEVLEEIKKHGFIAHTRPDKTEYYSPFTGKVPVVTGIVLPTTADGHMTMAPRKVNQLRARLHQYAEKSTCTDEERGVVMGTIGYIRQVYPKKVPSKLRALVEQIETRARIERLPAPAVPIEAVPKKVGTDIDLSVIPSADTAKPKRKKPTPKKSKLTKDYCGESLPF

SEQ ID NO: 7151 - protein, 426 aa, unidentified
  source 1..426: note = Related to MGFG01000027.1; note = Candidatus Uhrbacteria bacterium RIFOXYC2_FULL_47_19
MKIAKLCRWLWLVNGLQLNKKRRPGVAKKGKNKRGKRQKIVGDDFRVVLDVPERLVLLLLQFLHLTRANWSFLMDRIRQYKTDGTPVYTEWSKSKGRNKGRRYFAAPCDELKLVQKAILNRFLLSVPVHFIRHGGQRGSSILTNAETHAGFAKSMFVVDIINAFPTVFRSRIKANLRRAWLDHCRMFEGVELSEADKEMMLEAIVDLVAWRDRLPQGPPTSPRVLDIVCLRMDEQLYELFYSHSTPFQSYRSTAYVDDLTFSCNADSIPEELRSEALEIVRQNGFLPHTREDKTVYYSPETGRVPVALGLVIGRDGRITMAPYKVNQLRSRIYTLLTKKGELDDVSRGQLQGTIGFIRQVYPRKLPAKLRQIVEQAEWRLSAEKSGATVTIVVEALPELETPTSESSSEGVTSSPTQVKEAMELSA

SEQ ID NO: 7152 - protein, 407 aa, unidentified
  source 1..407: note = Related to MNWN01000009.1; note = Parcubacteria group bacterium CG1_02_58_44
MAKKGKNRRGKRQKIVGNDFRVVLDLPERLVLLLLQFLHVSRADWTFLMDRIRQHKTDGTPIYTEWSESKGRGRGRRYFAAPCEELKLVQRAILHRFLSTVQVHFVRHGNQPGSSILTSAETHAGAKSMFAVDIVNAFPSVFRSRIEANLKGPWEHACRMFQGVELSEADKEMMLETIVDLVAWRDRLPQGPPTSPRILDIVCLRMDKQLYELFISNGTVQSYRSTAYVDDLTFSCNTDSIPEELREKALEIIRKNGFIPHKRADKTVYYSPETGRVPIVLGLVICHGGRITMTPRKVNQLRARLHTLLTKEGELDDVSRGQLQGTIGFIRQVYPKKLPAKLCQIVEQVERRLTAEKSGATVTIVIEALPELETSNADPELKDAAVPQQDVGESMVSPASVQEVAAP

SEQ ID NO: 7153 - protein, 414 aa, unidentified
  source 1..414: note = Related to JACPMJ010000005.1; note = Candidatus Uhrbacteria bacterium
MATSTRRRRRHTPKEWVYKDFESVLELPERLARILRLLLHLSTQEWDFCLDKLRQKAAYREWAESKGPGRGVRRYAAPCDELKSVQRKILNRFLISIPVHFCRHGNQRGCSVKTNAEHHAGNERAFSIDIVNAFPSVYRSRIRANLRKPFTFALKQFSGQTFEAEEIKQMLESLVDLVCLHDRLPQGPPTSPRILDIVCCKMDQDIWKLISENSTPLQEYRITVWCDDLTISFEEEIPGELRKRILAVMKKNGFFPHERKDKTKYFTPKTGAVPVITGIVLAPDGRITLAPNKLNQFRARINKLLAVIKAEPTKQVYGEIAGTIGYLRHIYSDKLPSKVRAITEKAETELKTIKFNELAGELGKKPRRRKKTTAVTPEPQTSETSAETQIATEEPPRRRSRKKKDTADESIPFK

SEQ ID NO: 7154 - protein, 456 aa, unidentified
  source 1..456: note = Related to JABJNH010000022.1; note = Candidatus Magasanikbacteria bacterium
MPRKKTRKKSRNIARGNNFVTVLSMNDDRLAKTIRQIISFQKGDWDLLMDVLQNSFVYRVERISKGIGKPPRIVHAPNGLLKKVQRKILNRFLSEIPTHSARHGGGQKGTSNKTNALEHQDNAYAFSTDIMNAFPSILRSRVRACLKPHLKRVLYQFRPLVFEFEEKRDPREKPTCDGDIVLEGLIDLLVFDDRLPQGPPSSPRLLDIVSYKMDCDLWRLAQESSNLGDEYVYTAYVDDLSFSSAVPIPEEVQQKMLTIVRDNGFHPHHSPEKTKYHGPDTGSHPVITGILIRDGMMHLPTRKQNQLRARLHNLNVAKEAWSDNERGEAAGLLGFIRQIYPLDSHRKLPSKLKDQVLFSENRLQQRKVVVSETPFGIPVAEEDVITKVCQNNPSISDFNALAVSTRVGWTSHSGIPFTGTITERFPDKPHLAQVTYLSKGGKRCGTRLKCQRLAVL

SEQ ID NO: 7155 - protein, 420 aa, unidentified
  source 1..420: note = Related to JACQSL010000039.1; note = Candidatus Uhrbacteria bacterium
MAKRKRGGAASAGDAPTATLVADDDVAQTFQKIFAALSEPAMTFLSQWLGIPRNATDRGVGLARPYTLADAAAILENGTPYRRYFRPKSGGGVRRISEPAASVKHVQRRLLHVVFPSIPVHHASFAGLRTRSAIEAIEWHAAQGKPFFKVDLKNAYPSVSRTRLTKVLRGPLQEYLARAAPHLVAEEYEALINFVISICLDAGGLAQGAPTSLHLMNAARFELDCALAAYLRSLPGSYTYTAYVDDLIISRGDATEIPEYVRERIVRIVLAHGFLVNRSRRKRKVDYWPAGTGARRPVVLGLVPHRDGRVTISAKNRKRFRAALHHALSSPESSDAHRAQVAGVMGYLHMVYGDDRLPSELRVLYAQCRERFGRPKTPGGAYPDIDCLLAEQHPGEGKAADPHSEVDDARASGKPPTDSA

SEQ ID NO: 7156 - protein, 403 aa, unidentified
  source 1..403: note = Related to JACPHT010000008.1; note = Candidatus Uhrbacteria bacterium
MAEQSRLPISFLLDARLEEVLCQILKIDPAEWRATTALWASGNAWTIHKIPKKKGHRTIHAPSDPLKKVLRALLTQFIQGIPVHLAVHGAHPGTSIVTNARAHVGGKAFYLLDLKDAFPTVNRKRCSAIFGPTFTGYITVVTGLPEQDGKRLAETFVDLLIVDDVLPQGFPTSPAVLNVLLGQVDRNISQLLRSASATEGVVYKYTRFVDDLTISSSDEVIPKKLRQKIRQAVRSDGWTIQGTKVSYFGDGAEGDEERTTKYPEVTGIIPNQDGRLTIPRPRLNKFRAILHNLLEVADKRQSGDEEALKAVKAQMEKDVVAFRKRGISLDSNLSPDKFYAREWPLTTREHRLLVGIVGFVSMVYDQKLPSSIRELYIKAKTQFRIGTRDISQGHAYSFVKETE

SEQ ID NO: 7157 - protein, 397 aa, unidentified
  source 1..397: note = Related to JACQXU010000004.1; note = Candidatus Uhrbacteria bacterium
MPSSFLLDASLEETLCRVLKIDPAEWRATKALWESGTAWTIHHIPKKNGVRIIHAPSDPLKLVLRSVLKLFLQCIPVHMAVHGAHPGTSIVTNARAHVGDKAFYFLDLKDAFPSTNRKRCASVLGPRLATHLADATDLSEKDSKRLAETLIDLLIVDDVLPQGFPTSPAVLNVVLGAVDRVLSQLLRAESEKEGVVYRYTRFVDDLTISTDAPEISKKLRQSIRRAITHDGWTIQGTKVHYFGDAEEGDEERTTRNPEVTGIIPNPDGRLTIPRPRLNKFRAILHDLLTASTQRLEGDAEALGKLQAQFDLFRELCKKRKVWIQPNLTLQEWCGNDWPLSPRERQIIVGIVGFVGMVYDQQLPSIIRKPYNEAKVRFGIGLRDMAGINGYNLDTEIC

SEQ ID NO: 7158 - protein, 341 aa, unidentified
  source 1..341: note = Related to PFWU01000005.1; note = Candidatus Uhrbacteria bacterium CG_4_9_14_3_um_filter_50_9
MCVNSSTAARFAQQEVFMTDPSAAPASFHKLTPMIERTFVELIRETEAVWSWCHQLYTDGVPWEMRRIPKKKGFRTIHAPKDPLMAISRGILHHVLRRLPVHRSVHGSEPRSSVITNARVHAGFAKSVYNLDLENAFPSTNRKRLVANLSPKMLALLLDSTDLSEEEASVLVELLIDLMLVDDILPQGFPTSPAVLNIVLLPVDREISRYLRQVGEELGCELRYTRYVDDITISSDGDRIPKPVRNQIRKIIRHNGWKINQTKLMYHGDAEPGDDERSTKMPMVTGLVIHDDGRLTVPRWKLRKWRALMHELLQAEDVSQDQRDTLVGVVSFLTMVYDGDL

SEQ ID NO: 7159 - protein, 395 aa, unidentified
  source 1..395: note = Related to JABWCH010000247.1; note = Candidatus Brocadiae bacterium
MALKITCPQCTAEFFVVEAFSGSKIVCPQCTSAIILALKTQHPSTHISGPKAILPSQMLNIKEEAIRHLEIWLDVPSVSIKNALSMIEQDKAYEVWKIPKGESNTFREIAAPADVLKHIQRRILDRLLYRIPVSNASHGFIQGRSIVTNASFHLKTAGAVLNFDLKDAFPSVDAQRIKHLLVRYLKIPLKHLGGNIPHEALDQAIEMLVKFTTYKGALPQGGPASGYLLNIACISLDKTIYSLLQSYGNSYRYTRYADDITISSPMPFPQGLQEAIETAIHNSGFQINPKKVRYAVRSQGQRLEVTGLILEKDKVRIPSQKIEIFRAIIHQAGSLETQNLQPEKRLEIQSIIAFIKMVYGKIPYRIWGPYKAYMEKHGIFMPRKTSKAYLSLYPH

SEQ ID NO: 7160 - protein, 403 aa, unidentified
  source 1..403: note = Related to NZ_AP019860.1; note = Candidatus Uabimicrobium amorphum
MAVEIRCPECGAAFQAEDVFPGSRVSCPSCEAILILDVEKQRLSRKSIVPPVPGPKIYKPEDQDSLKRAAINHLSNWLDIPATQINEALASLQKGEGYNDWKIPKGNEYSFREISAPIQILKDIQRRVLDRLLYRIPVSNAAHGFINGRSIVTNASYHLETAQSILNIDLKDAFPSVKKERVKHLFVRYIKIPLKHLGEQIDHGVLNKVVDILVELTTHNGGLPQGGPCSGYLLNVACITLDKSIYRLLQTHSTQYIQYRYTRYADDITISANAPISNMLKSEIQKAILNNGYQINPKKIHYAERKRGQKLEVTGLIIEKNKVRIPASRLDNFRANIHQASLMNTADLTPEKKLEVQSIIAFAKMVYGKVPHRLWGPYNTYLEKHGLTHPFGRKGLQWDQYPS

SEQ ID NO: 7161 - protein, 398 aa, unidentified
  source 1..398: note = Related to JAGOMP010000071.1; note = Planctomycetes bacterium
MSIKVQCPQCNSGWNVTEAFPGSMVHCANCGCAVLLAITPTYTSQRFLTPAPQVTGPSQQEVLKEQAVGHLEAWLDVSAEQIQQALESIRLGTAYDIWKIPKGDSGFFREITSPCDVLKMIQRRILDRLLYRIPSSNAAHGFIPSRSIVTNASYHLKTAGAVLNLDIKDAFPSITSQRVKHLYVRYLKMPLQHLGVAVPHAVLDYAIALLVELTTYNNQLPQGGPCSGYLLNLACLRLDKEIFRLLSTYGASYKYTRYADDITISAPMPFPEDLSSNLMKVILHAGFQVNNKKVHYAIRDKGQRLEVTGLILEKNKVRIPNEKLEKFRTIIYQASLLDTENLTCEKRLEIQSIIAFVKMVYDSVPFRLWKPYQIYLDKHNIPLSKGSQHLSLDLYPHY

SEQ ID NO: 7162 - protein, 429 aa, unidentified
  source 1..429: note = Related to JACQVV010000429.1; note = Planctomycetes bacterium
MATTVNCPGCAREISIGRAFTGERLECPDCQTILLLKVTAAPSLDRPQTILPPPPRFAHPPAPKDEAEIDRLARAHLASWLDLSARELGAALSLVENGQGYDTWQIPKAGPSFRTISAPKEELKRVQRRILDRILYRIPVSNASHGFVPGRSIVTGARVHLEDAKEVYNLDLKDAFPSVDATRVKHVFVRWAKIPLKHLGPHVEHAVVDRVVELLVRLVTHEGKLPQGGPTSGCLLNLACLKLDKYVYRFLGRYPGDLRFTRYADDLTVSSRDTIPEEVRQGLQAVIRDCGFRVNPQKIRYLSKARNQNLEVTGLILEKGQVRIPPATLDRYRAILHQAATAHELPDEKRLEVQSILAFVKMVYPALPGAIRKPFEAYAAKHVGRPPGPRKAFGLDLYRGARPPAPEPAAPEPGALPAPAPEPPAPPTG

SEQ ID NO: 7163 - protein, 420 aa, unidentified
  source 1..420: note = Related to RFJW01000804.1; note = Planctomycetes bacterium
MERSSMEFEIHCPSCQKEYLVYHPFTGAILPCQSCGTNIVLAIPKELEKEGDLKQFRYTIKRGRKREKPHTPHLVSPEKQLLLREEALFALSRWLDLDKSTLEEALDLLKEGKGYNEFSISKGPGRGYRKISAPSPVLKKVQRQILDRLLYRIPVSNACHGFMPRRSIVTNAKFHLPTAKVVYNVDLKDAFPSVSSLRVKHLLVRYIKIPLKHLGEQIEHETLDEIIHLLVQFLTYQNSLPQGSPASGYLLNIACIKLDKYLYKLLREEGLAKEIRYTRYADDLTFSSQDSIPETLRRKIISTIRDCGFQANTSKTKYLDRGKNQVLEITGLILEKGAIRIPRDTLERYRATIHRAYLTDTSELTEEMKVEVQSIVAFVKMVYPLLPYRISKPYKMFIQKHNINPIGSSSQFPLSHYPKG

SEQ ID NO: 7164 - protein, 423 aa, unidentified
  source 1..423: note = Related to RFKQ01000043.1; note = Planctomycetes bacterium
MRAQIQCPNCSQKHHIQNPYPGSLLLCPHCQTALLLELSPELEKEFHLHPPKQYRFTIHSGRKKQPLTPTILPPETLQQLQEKALFALSRWLDLNKEHLSNVLQLLEQNQAYDEFKIPKTQPHTFRQISAPKEELKLVQRRILDRLLYRIPTSNACHGFTQGRSIVTNAKFHLPTAYEIYNLDLKDAFPTVNTLWVKHLLVRYLKIPLKHLGEHVEHEVLDEIILILTKMLTHKNGLPQGSPASGCLLNIACIKMDKYLYKLIADKYQNTIRYSRYADDLTFSSPTTIPQSFRQEVQQIIRNCGFSINPSKIKYLSKKRQQLLEVTGLILEKGQIRIPKTNLERYRATIHNAYLLPHEELTEQKRLEVHSIVAFVSMVYSHLPNRIQKPYQKFLEKHGGKPIGKLTKLGWKTYPPDPPNPKLT

SEQ ID NO: 7165 - protein, 721 aa, unidentified
  source 1..721: note = Related to JACKEL010000003.1; note = Myxococcales bacterium
MGQDTPKRKRNTAHLTIRAYQPLASYSDAAHQLLAQWLDVDVALLREVHQAIRQGDAYYHYRIPKPGRLEWRDIFEPYGALKEIQRRILDRLLYPIRVSNAAHGAVPSRSVVTNAMHHLPNAQQLLMMDIRNAFPSVRLPRVHGIFRRYVKPLFRKFGPLPNAKDAQQGPSPVDEALHFLAALTTMKQTVDTPQGPRETYALPQGAPTSGYLLNLACLEMDQKIFKIIDQNKDLGLRYSRYIDDITISTPSAIPPEVQNELELAVIKNDFRLHRGKTRLVETHNENAVICGVTLRFGRLEADPLLLERCQEVLERSVEVADPRTEIKRRSKIRGIVSFFKQVYGDQLPSGLKDVYQRYRKARDLPEEPEVAAPTLAPAEPRTAEAQDAVSLLAQWLDLSPSLVGLAGELASSGLGYEEWEIPKGNGKTRKICSPKNELKETQERILDRLLYHMPVSVASHGFVPGRSIVTNAQAHLDAQHLINLDLKDAFPSVSKHRVKLVMQIGLGNLLKKFGLRCPRSLRDDVIELIASLTTHKDELPQGAPTSGYLLNLACLTLDKRIFACLQEHKVSIAYSRYADDLTFSTQEPLPDELLGQIKKLIENAGFRWHPHKVHVASVAKGQALEICGLRLDGNQIRIPREKLKTYRSVLRRAAIKIPTGQLDADTKNHVQGIVGFVKMVYGDLPHSLAQPYQAFLQTHPEARPTGSAREKFALYPNVLPA

SEQ ID NO: 7166 - protein, 717 aa, unidentified
  source 1..717: note = Related to PCBK01000030.1; note = Deltaproteobacteria bacterium
MSDNSTVRKRNTSHLTIRKRSPLSSYSDSAYRILSQWLDVDTSLLYEVLEALKAGEAYYTYKIPKHGTYEWREINDPYGGLKEIQRRILDRLLYTVPVSNAAHGAVQARSVVTNALEHLPDAKEVLSLDIRNAFPSVRFSRVHRIFRKYIKPILRKHGPLPSPNTGGNPPLDEAIHLLAALTTYPRSIKQKGQTQKVWCLPQGAPTSGYLLNLACRALDRKIFKIFDKHPNLNLRYSRYLDDMTISSSVELPADVQRELELAVKKNDFRLNRDKTKKYGPTDTPVICGVMLRQGHVEAEPELIQRCNDLLKRSVHVDDPRVELQNRRKIRGILSFFKMVYGDQMPTEISEPYSEYRSARNLPPEPSIPAPAHPTVSARAVEHQSAMSLLAQWLDISMDTLNTAHQKSLSEDGYEHWSIDKKNGSKRQICSPCLEVKDIQDKLLSRLLYHIPVSVAAHGFVPGRSIVTNALAHANARYLLNLDLKDAFPSVSRKRVEHCLNVGLGGLIKRFGLRCPTALRQDVIGLIADFVTYKDALPQGAPTSGYLLNLACHTQDKRIFELLERTAPNVTYTRYADDLTFTSTEPLPEGFLEAIQNEINRSGFRWHPQKTHFAAVHKGQNMEICGLRLDGSTLRIPRKKLKHYRSVLRRATNKLETGGLDTETRHKIQGIVGFVQMVYGELPRSLSQPYAAFLQKHPEARPTGSAHEKISFYPNIQT

SEQ ID NO: 7167 - protein, 719 aa, unidentified
  source 1..719: note = Related to SBHC01000053.1; note = Deltaproteobacteria bacterium
MSETNTPRPRNRSHLTIQARRPLASYSDAAYRLLGQWLDVDTGLLQEALEAILAGQAYESFRIPKPGRDEWRVILDPYGGLKEVQRRILDRLLYPIPVSNAAHGAVPGRSVVTNARQHLPDAQEILSIDLRHAFPSVRFSRVHSIFRKQVRPLLRKLGPLPTAHSGTLDPVDEVIHLLAGLTTYKQTVRQQGRTTQVYCLPQGAPTSGYLLNLACLPLDGKIYKIIEKNPELNLRYSRYLDDLVVSSPNQLNDEVQKEVELAVVKSDFHLNHQKIARTQAPAPLVVCGVQLSGEQLTAEGGLIERCADMLRNAEAVRNPTAEQKLRRKIRGVMVFFRQVYGQDLPPNIAEPYQQYRTNRQLPEEPETVAQAVAPVTLATEPSNAVELLAQWLDLTPETIAEARAKIQAGEGYESWSIDKGNGSKRIITSPVDQLKDIQTRILSQLIYHIPVSNACHGFVPGRSIVTNAMTHQGATSLINLDLKDAFPSVSKHRVELGLRIGLGRVIKKFGLRFPRPMRDELIALLGELLTVDDQLPQGAPTSGYLLNIAAMSLDKRLFELIQEHDQEVTYTRYADDLTFTCKDGELTTDFLNKLKRVIRRSGFRWNPRKTHRAEVDKGQQIEICGIYVDDDGLRLPRDKMKAYRSILRRAATQIPTGQLDDATKRQIQGVVGFVEMVYGELPRRISEPYQAYLQQHPDARPKRLYRDKISFYPNIMPNP

SEQ ID NO: 7168 - protein, 345 aa, unidentified
  source 1..345: note = Related to PBSL01000014.1; note = Planctomycetaceae bacterium
MELNRPADTAFAMLARLLSTDNEVVRAGHEALSGGDAYRSWEVPKGNGKTRRIDAPVEELKQVQSLLLTRLFCHAPTSPFAHGFVPGRSIATNAAVHQQTGRSLVSLDLEDAYPSVSRQRVVKTLEWGLGYFLKHVAPCSSRESRDELYELIADLCCFRQCLPQGAPTSGLLLNMACCSLDRRCARLLRRCRDQFPELRYTRYADDLSFTSSEELSHEFLEQAIGCVVQAGFRVNRRKVKRYSVRNADLVICGIRLHEGQLTLPRRVLRRYRALLFQSLAYGPDEISEENRQFLLGHIGFLTMASSVCPPQLERLLEEVLQQHGSWLRSGVASHILPSYGEVGRS

SEQ ID NO: 7169 - protein, 344 aa, unidentified
  source 1..344: note = Related to DLVH01000085.1; note = Planctomycetaceae bacterium
MGMNAYADSTLSLLSRLLMTDRETVNSGFEALSGVAYDSWTVPKGNGRERQIDAPVPELKRLQSLLLKRLLNFAPISPFAHGFVRGRSIVTNAAVHRETARCMVSLDLKDAYPSVSRDRVVKALQWGVGSFLKHTSPETTRGEREAVFEAVADVCTHRDALPQGAPTSGQLLNMTCCSLDRHCSRLMRASREEFPGLRYSRYADDLAFTATGELSHEFLERAIGCVLRAGFEVNRRKVKRYTVANADLVICGIRLHDGQLTLPRRVLRKYRALLFQTLAREPEDMSDGARQHVHGAIGFLTMATTVCPPQLEDLLQAVLQQHGTWLRPGTVPAHFPFYSSFSQK

SEQ ID NO: 7170 - protein, 977 aa, unidentified
  source 1..977: note = Related to JAHJCH010000159.1; note = Myxococcota bacterium
MTEPTQRAARLARLMSRGAATGASEARATPHEAARRATQVLIGALLPGDVELQAALGGDLSALEHAQRPGPAQALLDALLDALEGPLSAPLAGWVELAEGGASDGALWRAVDTHLARPECLALRRALTSRWAALPSTRARLSALIDARPSLRGARGPLTGLLSAALSASESLRGSRLSEALRVEVYVSYRRFQRALLSDDLRSAGAALDDLFGYTPNRPALLISDAALCVLEGRPGEARRALSEALAFIHDHAALEAAYAALAAPPRLEKTAAAPRHSPRDLRPRLGIEGRAVRAEGRVYKPRLDRWSPRPSYARWVIEAVAAALGRAPEAIDAALTTLHRGEAYRAFTITAPSGKPRRIQAPQGALIEIQAAILEGLLYRLPVSNAAHGATPGRSLITQAVAHLPQPRQALSLDLKDAYPSVSFQRVYRVFYEGLARLLPVARLPGLEGLRPLVARDHLAHLLATLTCAPLQGARPKPKTAWALPQGAPTSAALLNLACADLDRGVYKLLRAHPGVDLRYTRYIDDLTITATGGALPEGLTRQLERLIERVGFSSQPLKRRAWRVGEGPLIICGLSLESGGVAFGPDLIARAATLSALGAPGAAELRGLAAFARQIYAQTPPFLQSWAEAAPARAWSSPRAPYLRYLQGDPTAAAPGVAQLARWLDAPMAQVERALALLEAGAAYATWRLSKGGGGEREIESPAAPLKGLQTRILHRLISRAPLSAAAHGFAEGRSIATNARAHLGAAALLNVDIEDAFPSVSAQRVRHALDRALGPRLASLGPSAEAASEALGLLTRLLTYRGRLPQGAPTSGALFNLCLTPLDRLLEDACGPRGITYTRYADDLTFSSPRVEAIDAAFGDQIKQIIHRAGFRWSARKWARMAAPRLEVCGVRLDGAHLRLSRAQLQRYRATLHRLAHAPTLDAEGRDKAAGILGFVHMIYGELPAPLRGPAQALRQRHRLEPKPKSKLDLYGRG

SEQ ID NO: 7171 - protein, 352 aa, unidentified
  source 1..352: note = Related to JADZES010000076.1; note = Deltaproteobacteria bacterium
MPGRSATTLLAKLIDLPAREVEEALALVTGGEAYDRFEIPKVGTRAPRVIQAPVERLKRVQRALIGLLEPLALHSAVHGFRRGRSIVTGAEKHLQARAILNIDLKDFFHSVDRDRVRRALQRSLLPRLVEETGELTKAEGDAVVALVTELTTYAVPGRDLPVLPQGAPTSPFLANLAARKLDQEISELLAGLPGELVYTRYADDLTISAPHEIDRRLIGEIIKRVQRAGFAANPQKVRLASTLKGSPHYRQKLEVTGLVIDPRDKVLRIPRDRLELYRLKIHQAAHLRELDPGTRQEIEGFVSFAFMVYRTLPPSLATAYERFTAAHRLAPLQAGKSRRAARRRATQKELYP

SEQ ID NO: 7172 - protein, 351 aa, unidentified
  source 1..351: note = Related to DLVH01000085.1; note = Planctomycetaceae bacterium
MCDPCGLDPQGSWPPVAIETPTVLSADCKMALADLLQLPSGQIISAWDAVRGNAAYDWHLFGAREVAVPVPLLADVQRRVLDRVLRTGPVSPAAYAGVPGRSYVAAAWRHLGGTGAETVVMDIAGAFGSTTYGHVRSALSRRLKHELWVLGLDSDDAKAVVQVIAHLVTVDMDGRSRQLPLGAPTSVALFNLVLLSLDGDLARWCVPRGIRYTRYVDDMVFSCSEGVPNQLEEFVEHNVERFRFRLNQNKTVRSAAGMGTVHGLVRTADGIVPGEGARRRFADNIQWHTRQAEDEATSEAHREKSRGFLKGLNTFLRQFYERQDLARPEMLKIHVPEGSTAASPLVDLLWE

SEQ ID NO: 7173 - protein, 301 aa, unidentified
  source 1..301: note = Related to BPBW01000218.1; note = Planctomycetaceae bacterium
MWRWWLRLAPAGRSEVAVPVPVLSDLQRQILERILRTGPVSPAAYAGVPGRSYVAAAWRHLGGSGAETAVLDIADAFPATTYGHVRAALFRRLKSELWVLGLDPADSKVLVQVLSHLVTVDKGGRSRQLPLGSPTSVAMFNLVLLPLDGELARWCKPGKITYTRYVDDMVFSQADGLPVGLETTVHRAVVRHGFRLNPAKTVRRPAGQGTVHGLVRVAAGIVPSERARERFASNIRWHSDRTADTTIPAPQRQRSRGFLKGMDTYLQQFYERQEISRPGSLEIQIPEGAAVPPPAVDLLWD

SEQ ID NO: 7174 - protein, 337 aa, unidentified
  source 1..337: note = Related to PBSL01000014.1; note = Planctomycetaceae bacterium
MTVITIPDPLSDDCRVALSDLLRLPVEQVMAAWKVSQTDRGYDWNLYGDRVIHVPQPLLSEVQRQILDRVLRTGPISPAAFSGVSGRSYVLAATRHLSGPPAETAALDIADAFGSTTYGHVRGALWKRLKQELWILGLSGSESTAIVKVLSHLATVADRARTRRLPLGSPSSVAMFNLILLPLDGEMLRWCSEYGITYTRYVDDMVFSCPDGLPPDLESRVEAVVRRHRYRLNHGKTIRHAAGSARVHGLERTTEGVVPGADAVERFAARARWHQGKAVDETSSRSQRERSYGFLRGLDVFLRQFYEAQDLQRPDSLRIVVPEGAERPVPPIDLLWN

SEQ ID NO: 7175 - protein, 332 aa, unidentified
  source 1..332: note = Related to PFNL01000093.1; note = candidate division WWE3 bacterium CG_4_10_14_0_2_um_filter_41_14
MKMLPPEWEQLWECTRSGNEVTDEVTFHALEWLYDNRTKKGTWFHNPFRVEKKNKQGQFRLISWAGPQLSIVHLAISRWLKHEYVRKSMDASTPGAGGVMVALRAHGDNKFVTLVDVANAFSSVSERSLSAALRCLMDDVTEEFLDVLLELTTVDGHVWQGWSVSKDLFNLVMLNLDPVVFDQLPFLGVEIYTRYVDNLIFSSSKPYSPITLERFLRHVFKQCGFLLGPFQHSDQGRYSYLGVMVEEGNYRPQDVKRYVVEIEKALQHPCPHLYYWTILGYFSWTLSVSRDNIPKELFEVFERYFKLVGMIPPALQRLMIMRYQMSFADLQN

SEQ ID NO: 7176 - protein, 345 aa, unidentified
  source 1..345: note = Related to JAKLSD010000282.1; note = Candidatus Portnoybacteria bacterium
MTEKKYKLQPLEKVSLDVQFSWTMGIIAKLLKITKKNLRKAKKIVSAPKYDDEILINGMPTQITFHYGFYGFIKKIKRKQRKILAPHPKLQIVFRAIKDTLVEMEPTHENAFGFVKKRNVQMAVRSLLGNAHFISFDIADAFPSITAKMVENSLKKLKLQEELIQPLTHLVTCDYDQERRLPQGSSCSPAILNLVYKPMCQEIDRVCGTHNISWFVYADDFNFAALVIPPQAKNELLAIPPKYGFSTKASKTKDNLGKTIPHMLGLTIVDEKVHIRRRTKKKFRRILYMAWKYEAYSPQQIRGVAVAIRQTYGNEKNWPGWLKEYWIKYQTKRQAEGGRYEKSAQ

SEQ ID NO: 7177 - protein, 344 aa, unidentified
  source 1..344: note = Related to JADHWO010000107.1; note = Candidatus Aminicenantes bacterium
MVREKHELQPMKNVSLDVQFSWTMGIMAKFLKTTKKELRKVKKIIDVKNLKDQIPIKGSFVKMTFTHGFYSFTKKIKRKQRKILAPHPKVQIVLKAIKDTLVELSPAHENAFGFVKKRDIQMATRSLLGNTHFISFDITDAFPSITAKMVEKALRKLKIGEELIKPLIWLTTYYYNQDRRLPQGSSCSPALLNLVYVPMCQEIDEVCKAHGIKWCVYVDDFHFAALKIVPDVKKKLLTIPSKYGFSIKAKKIKDNFDRTIPHILGLTIVNGKIHIRRCTKKKFRRIFYMAWKHGAYSPQQVEGTVAAIRQTYGKEKNWPGWLREYWTKYQTKYQTEGGRNGKHG

SEQ ID NO: 7178 - protein, 332 aa, unidentified
  source 1..332: note = Related to LBPM01000015.1; note = Candidatus Moranbacteria bacterium GW2011_GWF1_34_10
MAISNEMCPLSVASIQVQLQWTLGGLSELISVPKKQLKKAFKIVSTPKLEATIMKRGGLVRKTFLYGFASYIIKNKNKERKILEPHPEVQKVYKKIKEWLEKVDPPHERTFGFVKDRNCKKATETLSALFRGGHHVAFDIADAFPNITEEMIKEALLRLEIEVDMAEVLAWFVTYNYQGKRRLPQGSSSSPSILNLVYKPMCKEIDRFCQANGIEWSVYVDDFNFAAPSISSELKDALLSIPSQFGFSIKPKKNKDNLGKTIPHLLGLTVADGKLHFSRTQKKKFRGIFYLAVKYQEYPPEVVHGIMRYVHHIYGPKENWPGWLIKMGGTQS

SEQ ID NO: 7179 - protein, 307 aa, unidentified
  source 1..307: note = Related to PCRP01000057.1; note = Candidatus Nealsonbacteria bacterium CG23_combo_of_CG06-09_8_20_14_all_38_19
MLENKSGYRVWSIPKKSGGKRQIQAALWPLREIQARIAALIYPYSISEINHGFIPGRSHQTAVLPHLLANAMFCWDIKDAFSSTTKKQVLLKFRVIGFNNPLADLMADLVCYSATGKSEDGFLPQGYCSSPIIFNLVLKDIDRLLFLFAQQRDYQISRYVDNFAISTPKKEIPRQDRELVVRIVMNLSNGSYKVPEEKTSYFKVEEDKVCFEFLGLVIKGPKKGKREIRVTDEKLADYRWTIHDALEKGDFSDRKVREIRGKINYLKSVYQRQSLPLPIRIMELYFQYQQMAEVAKTGQLPLNLSGP

SEQ ID NO: 7180 - protein, 305 aa, unidentified
  source 1..305: note = Related to JAHJOV010000010.1; note = Patescibacteria group bacterium
MLETKKAYHVWFIPKKPAGKRQIQAARWPLNEIQVRIAGKIYPYSISEISHSFVPGRSHRTAVFPHLRANAFFTFDIKDAFPSTRKKQVAANFRWIGFKKAVADLMADLICYSPTEKSEDGFLPQGYASSPTVFNLILNTTDRVLFGFSQKRGYQVTRYVDNFAISATQKTIPEEERKLAIKIVKSLSLGNFKIPEEKTSYREAGEKEVHFEFLGLVIEGPRDGERKIGVADEKLADYRWVIQEALDKEDFSEGKFREIRGKINYLKSIYQGRALPNQVAELYNQYRLLREIINTTKRGQLSLPI

SEQ ID NO: 7181 - protein, 338 aa, unidentified
  source 1..338: note = Related to JAHIGO010000018.1; note = Patescibacteria group bacterium
MITPGRKEAISELAVALEISPNLINRALQMITDKTAYNVWSTPKKSGGERQIQAANWPLNEIQSKIAAEIYPYSVSEINHAFVAGRSHRTAVLPHLRANAFFSFDIKDAFPSVSRRQVLLKLRLLSVQLGLKDRVAELITDLVCYSPTGKSEHGFLPQGYRSSPHIFNLVLKDIDRILAGFAQKRGYQITRFVDDFLISTTEKAIPREDRRLVIKLVENLGGFKISPEKISYLESEGNDVHFEFLGLAIKGPREGERTMGVAEKKLNECRWIILGAMEQKDFSKKTFRRIKGKVNYIKGIYKSQGKPLPAKIADVFAQYRSLRAIADADKNQQVLFKI

SEQ ID NO: 7182 - protein, 328 aa, unidentified
  source 1..328: note = Related to MHNB01000007.1; note = Candidatus Portnoybacteria bacterium RIFCSPHIGHO2_12_FULL_38_9
MNNEKLKKGINEICNFLEYNPGIMDLEKAFEGRNSYQRIFIRKRGGKKKGKRVIHVPPPKLKNVQSVIHRRVLEMVEWPASVHGFVKNRSHLTAALKHSRSIPPPVALLLIDFKDAFSNVGVKKVERALDKRLQPNLLCPLSPGAIKLLAKLITYRGRLPQGAPSSPTIFNLVALDLDEVLSVYAEERGYTYTRYVDNIAVSSPKPIPKNERAEIIGLCRQFGFQVVSEKARYQEAKWGVLEMTKVLLQPYGGQKWYASYGLGLSNRKFVDKVRAMVHRAQKDPSISLASIWGKIDYVRLVDPYKLSSRLSKPMRQLRSIQSNLERRK

SEQ ID NO: 7183 - protein, 326 aa, unidentified
  source 1..326: note = Related to LCRC01000006.1; note = Parcubacteria group bacterium GW2011_GWB1_52_7
MLTPLGCRFQELVSRAAQLLAVEPALIEQALQEKGQYQRRTRKKPGKDAEGRPRIRVLHVPPPVVKEVQRAIHRHLLNLGNSWFRKLGSDFAWPIAMHGFLPRRSNLTAARDHIGNTALFTLDFADAFPSVRRERVATALRWHAKLGRQEANFIARLATYRGRLCQGSPSSPLLFNLVVLNLLKSLERLAAERGYRVTIYCDEVAITADKPIPAEERRAILQLVIQAGFAVHPKKIRYQEARWGALEVTKVLVRPDRLGLSTRHTIDRVRAFIDHLARRGTADTKELAKAKGYIGWVELVDPEKLKTRLRKSLAQLAKLEQSGGHS

SEQ ID NO: 7184 - protein, 338 aa, unidentified
  source 1..338: note = Related to JACPLK010000008.1; note = Candidatus Parcubacteria bacterium
MQQAELPLSPNNAPWPDDFRTALGLDEAALAEAWMHRADYRPHRVPKRKARRIGPKREPRVAKKKRRPIDEPHPALRVVQEAIRRKLLEQIPLSACAHGFRKGRSAKTALLPHRKSTSFFTVDFRNAFHKVTGAMLAEALRACTPIIKPRWVAPLVAFTTHRGRLPQGAPTSNDLFNIACRELDANLAAFAQTRGFVYTRYADAVIISAKAPLPTDLQREIEAKIRAYGFPLAAEKTGYTEPRYAHPVIMGIAVVDGRLRVPRRQLDRARAFLHRAKLDPTIPMEIVEGVLGNVRGLIGGLPPRLLKPYKALLMSRHLWVRYRRRRGIPYVAHSPMQP

SEQ ID NO: 7185 - protein, 329 aa, unidentified
  source 1..329: note = Related to JACPXH010000004.1; note = Candidatus Parcubacteria bacterium
MPAPWPDDFRTALGLDEAALADAWLHRADYQPHRVPKRKPRRIGPKRQPKAIKKKRRPIDEPHPALRVVQEAIRKKLLKRIPLSSAAHGFRKGRSATTALIPHRKSAAFFTVDFRNAFHKVTTAMLADALRECAPIIKPDWVPPLVAFTTHRGRLPQGAPTSNGLFNIACRGLDANLAAFAQTRGFAYTRYADAVIISAKVPLPTSLQREIEAKIRTHGFPLAAEKTGYTEPRYAHPVIMGIAVVAGRLRVPRRQLDRARAFLHRARYDPAIPMKVVEGVLGNVRGLLGGLPQRLLKPYRELLTSRNLWVHPRRRRLAPPLTPSTSSPP

SEQ ID NO: 7186 - protein, 407 aa, unidentified
  source 1..407: note = Related to LCRC01000018.1; note = Parcubacteria group bacterium GW2011_GWB1_52_7
MRDKRQLGIFIPGFLDDSMLKLAVPQTARMIGYEEKHLPFFSRTLRRVLSDPNAYRSVQIPKRLGGYRTLDIPNHDLMQVQRRIHSCILVRRYVPSPICHSFVGKLYDRSGAAEERWQAGRSIFTNAFAHLAPGPRARRDVRIPSSILTVDLKEAYPSIAADRVFRVYQELTGDPWTAQILTHLSVWRGCLPQGAPTSPMLQNLVYRELDVALATEFNKGPFRLTRYADDFTLTSLRGYIDPKIVIHLIEVVEAHGFPVNRQKVLRWRRKDRRLRVTGINIRRTAERPFSLPRKKLEQLRAALFYAVKTLQSTARYEAERRAAGTLDTTTAKALDQLQKQTWGRIHGLVGFAVQVYGDELPPTIYKWFGFLREETEVTGEELLQQIRESFPVSEVQRSGRELLGDSP

SEQ ID NO: 7187 - protein, 366 aa, unidentified
  source 1..366: note = Related to JACOZA010000081.1; note = Candidatus Sungbacteria bacterium
MQQRLSDPYCYRAKQIPKRLGGLRTIDVPCPRLKKLQRRIHDFLLRRHYRPSRICHSFVGKFYDVARPARKRWIPGRSLFTNAWVHLGVPPGVSPRSKSRRIHWRIPRSLFSVDLKDAYPSIGVDHVFRIYQELTGDPWTAQILSTLSTWNGSLPQGAPTSPLLLNFACRELDGALAHEFTRGPYRLTRYVDDFVLTSTDPEISEATRERFVAIIEQHGFKINQAKTCYWRDTDRALRVTGINLFPQERHIGLPNVVQRQFRAALYYALKSLESIHAYALQRGVLDETTAMSLRGAEKQAWGLIYGVIGFTYQVYGAKIPRPIYAWIPELTARTGVTSDTLVAKIKKYPPIAAIQQIGEEIIGSSP

SEQ ID NO: 7188 - protein, 382 aa, unidentified
  source 1..382: note = Related to LCDF01000016.1; note = Candidatus Giovannonibacteria bacterium GW2011_GWF2_42_19
MKEFENIGSILKAIVQKSMYNVIGLSNAIDLERALELARDPKTGYRRFIMEKKSGGKRPIDAPHDDLKFVQRMIYKKILLKDFTPSKICHSTLERSIVSNAYAHLGVPADVVPNPSYITIPWREPQSIHLIDLQGAFPSIKTGRIKEIYQDILHDENAAEILTELSQLRGSLPQGAPTSPLLFNLACRELDRDLEEEFADPRLPLTRYVDDISVTSLDSRVPQKKQKMLRMIVEKHGFKIKEEKVANWDVRDKPLNVTGIALNPAKRAIFLPYKTREIFRLLMFKSYKTLCEANSEWFEQERDISLMKFITQGRRRYKRAFGTICGVASLAFMVYGKDEAPKRTFSWFEGYDGDVSSATFQAILDDIRNGDLVGEIWGYNQF

SEQ ID NO: 7189 - protein, 404 aa, unidentified
  source 1..404: note = Related to JACQJT010000015.1; note = Candidatus Giovannonibacteria bacterium
MAKNPESIGSLLANLSAKEPRGSLLTNLLAKISLHETAKLIGTDERSLLRALRLAKRPDGYKRKYIPKKRGGFRPVDAPHDDLKWVQRCLHRNFLRRRHHPSSICHSFVGKCYDPQAEFGEKWRAGRSIVSGAYEHICPGEWRHPRSLFSVDMKDAFPSVTEKRVSAIYKELSGNELVAKVLTNLSVLNNSLPQGAPTSPTLFNLACRELDANLAEEFGLDGRFVITRYADDVTITSVEREIKTADRERLVKVVEGHGFKVNREKDCYWQDWRHVLRVTGINLDPEKRRLFLPRSELDRLRLLAFHSLRVLENESAAWLESKSRFDVPDFLRSLDKRATMAFGRLGGIVGFCSMVYDEQEWPSRLFGWHPALAEWSKDDFHTLLQIIKEGELANPDSDLFDFSP

SEQ ID NO: 7190 - protein, 421 aa, unidentified
  source 1..421: note = Related to JACPKW010000005.1; note = Candidatus Giovannonibacteria bacterium
MNIKKLRKEDTNLQQPSLGIQSLVEKTLGKLALEETARLIGVDVSDLVKALEIAKSSDGYRHKKILKKRGKGYRRIDVPHKDLKWVQRACHINLLLRHFKPTPICHSFVGRRFEKDSLHWIFGRSVISGAWAHLGVPPDEEPDPKSNSINWRKPRSQLAIDFKDAFPSVSRTRIKEILQKLLEQTGKYQAGADIIAEILVDLTTWNGVLPQGAPTSPVLFNLACRDLDEILIGEFSDEEQKSRIKITRFCDDISVTRLSKKIGLKTRGKIERLIHKNGFQINEEKTVHWQDSHHVLRINSINLDPINRRVFLPRETIERFRYLLYRSWQELEESFSWWLVLGRDSDNTIKYFLNQAAYGRIAGIVGYCRMIYKEDSEMPLRLFSWNPDLSGYWDQERFEQIFADISKGSLIQDLEDHLHYF

SEQ ID NO: 7191 - protein, 403 aa, unidentified
  source 1..403: note = Related to JACPYH010000043.1; note = Candidatus Sungbacteria bacterium
MLHQAIGHVADLIGLRKRDVPFLKTVYERALKDPYAYEPILIRKKRGGYRRIDIPNKGLKYVQRCIHHQLLVRRYEPTHICHSHIRKTYDVAQEYGDRWLPGRTIVSNAFAHLGVPPDVDPHDQYDDERIRWRTPCSLFAIDLKDAYPSVSEDMVFDVYGELAGDPWSAEILTRLSVWHGCLPQGAPTSPLLLNFVLRDLDAAIKKEFRPQHFCVTRYVDDVVLTSRHKRISLRIQKRLIDLVEAYGFKVNLEKNCYWQADRHVLRVTSVNLYPEERRVALSKTVVEQFRSLLYGLFTGLRANGFLLHSNLVADAFSRALDCEDPRVAEIHGMRSKQFHKMMGIIGFCHLVYGNELPKRLSAWGDRGGGDAMDVEWAIEMIKDGYFDTDVIDASYDASGYRVR

SEQ ID NO: 7192 - protein, 388 aa, unidentified
  source 1..388: note = Related to nan
MRKEVRQMFPKRIGAIVPGVMREAVLPYLAQQLAIKADMLREALEIRARPMVQGDLESPYRRYPKKKKTGGVRWITAPHETLKKVQAAIYKRLLRPRYKPTPIAHGFIRGRGIVTNAAVHIQGGREPQSALNIDLQDAFPSVRAERVVKLFRKLTGSEELALTLGYLTTWKNEQGQGAIPQGAPSSPILLNSVLQEFDAELLELAGKFGLVVTRYVDDITLSGPDARIPDKVFTYVARLAKKHGFLPNMTKLRWQHANRNPIEITGLHLIKPWVGDLEVRLPAATRRRWRGILHNLAEVPTDAFGKPEVGLGVGIIGVARHVQAVSSNAATRGHILPYELRAPACELALLDRVPSIETLRDPRAWRKFQQKHQESIRRFELAYADRQS

SEQ ID NO: 7193 - protein, 373 aa, unidentified
  source 1..373: note = Related to MHTT01000006.1; note = Candidatus Wildermuthbacteria bacterium RIFCSPHIGHO2_01_FULL_49_22b
METVVPYVEQLEFDFPGVPRRGPGRVFVVPDNIKQKIECARDFLVGRLRLPYQEMAFALTLPNACWYEITKKVGDKQRTFYVSRRPLAEMQRRIATYLEDSSKWERWSMRKRGSLHRSETDLASAFRRGTSIITNAWPHRVNRSSLTLDLRDAFESITRRHVERYLTRIFANNITHPVQSPEVTAWVLSRLVTCRGKLRQGPPSSPAVFNCMLERLDDALAEATGAPKRDVIMPAMYLGMRFQRYRELDASDRRSGASYVAPRGVLYTRYADDLCFSHPDETFPIALEEMIRKVVASHGFRINGAKTRHGRYGILEFPGVVVANGHLRPKTRLVQEILEGVSIMTAQERAGYRAFLHQFGPSGRLECLRVFDN

SEQ ID NO: 7194 - protein, 350 aa, unidentified
  source 1..350: note = Related to NZCO01000055.1; note = unidentified bacterium
MDTSRGIAARGHVDACLAGLKMYSLDPDVVLDVLLRPNAHWQRVVKEKRGKQRVCYSPSDDLRTLQWRLIRILDRSIKFHRGYCRIWDQRYAFTISKPRFPQTGWWKGSSIVANARVHRHSNSALVCDLRHAFQSITTRHIQSFLNRTQPFRIRRRRDASWTYFPESLMWVASRLLTYYGRLRYGAPASPIMFNFMIDRLAVDLATAVNAPLHVNEAALRSTQRILMTVYGDDICFSCKRGAVPESVLWRTETLVRQHGFRMNHAKTLRSGNGALLLPGVVISAHEVRPRDTYLDPLATAIQGGELTQDQANGHLGFLKPFKRPGRRALKRWGPTLYAQLQERAGVTINE

SEQ ID NO: 7195 - protein, 334 aa, unidentified
  source 1..334: note = Related to LCBS01000001.1; note = candidate division WWE3 bacterium GW2011_GWB1_41_6
MFVESIIWSMAENTTPSFDKELVRYRNTISRLVSLAERERYLKPFYVKKKSGGKRRIVPATKDLVYVQSILASWFVKTFGGSADYCYTGKGIIPAIKPHQGAKTALVVDLKDAFDHVTKEKIYKLLERRFRKMSKEVRLLIATLLTYEGTTPQGCVSTPYVFNAVVDPMDKDLLAILGNFPLRAYTRYADNMCFSFDKPVNLWAVDRAVAKIISMHDFQVSWSAGFEHMPISYLGTHVYEDRLELDPDKLDAYVLLLNEALSSPTPEVYRKQILGILTWVSQVYKTTNPEKLSPEDRAKLAYFIGLFQQYFGKVRGTPELLERLVTSFHNSRMF

SEQ ID NO: 7196 - protein, 410 aa, unidentified
  source 1..410: note = Related to JABHMO010000007.1; note = Candidatus Falkowbacteria bacterium
MTKILQSACNPLQTKGGLAAAYYLRNFLGYKDSEHKINFLELLRRAIYRNSNLYSTARIPKRNGKYRILNIPCHELKIVQRLINKTILQKTRVLKCTFGFYGGSGLEALKKVVKPEQAIFSVDIVDAFSNTTARAVYHVFRRLKFGHFASYYLTCLTTWLHPTRSFSQTKRQSDHDFAHDRSDELHAFLSFGGFNFAGKEAKLQQNSFVLPQGAPTSPRLFDLCFWQLDYNLVVRAIHVKGYYVRFADNLYFSAPEFWRDGQIDITKNNKGALLFHSPLISSIYDIMRAGYRIWIEPFQNMPRYTQKWYQIYKLHKARLLMPDDKDCLPALGYNVFPDGTIRNKRRFVLRIRMSVFNLRKALESGNYEDTWRIYQKLQGQMQFAIHDQLPPRLLKQATDLLSQINSQQAI

SEQ ID NO: 7197 - protein, 376 aa, unidentified
  source 1..376: note = Related to JAFGMD010000036.1; note = Candidatus Falkowbacteria bacterium
MLKSRTHIKNPLLKISGRKAAWYLFSTLDYPFDDFERFRKILWAAIVRSPWLYSNIAIPKRDGSKRILAIPHPDLMTIQRAINKNFLELYRHPNVYGFSGGNAREALTALARSNQAIFASDIKDAFPSTTGRAVFNFFRTEKFGYYTSYYLTCLTTWFNQQKKFNLPQVGLPQGAPTSPRLFDLCFIRFDRRFARLTKNANGVYFRYADNIFLTAEEFWPERINIQTMRDGGVRWQSPIISAIYRILKRGYEFEHSPDNEIWHNQEYGLHKSYFARQGQILHALGLNIKDDQLHNTREFKLRVRMTIFNLKKALEQKDDFETKIWPLYHKLDGMQKFLVKETSSKLWEEAEQALFQVALIRYSGQGGRYVKNISEY

SEQ ID NO: 7198 - protein, 417 aa, unidentified
  source 1..417: note = Related to JACRDY010000022.1; note = Candidatus Falkowbacteria bacterium
MAHQPIYNPLGNPWGKAAAHWLHWQLALEEDDIPWDMFASILWLAIERDPGLYYRKRKQKKSGGTRTLCVPNGDLKRIQTKIDQIVLAAEPRLPYVYGFGGGSVAQALQPHLERGYPIFTADIRDAFPNTHDMAVYNVFRRLGYRKNTAYLLTRLCTWPINSQWRAALPQGAPSSPRLFDLCCRPLDVKLHQLAANVDGSYTRYADNLFFSARSFSARQYRPDEKKRYRGSAWPEPQPLWQTAPGDDAAVISWHATLISAIYRRCTDGYELPELPRKVYRHHWSWLRKCWIHVNPSNTISDRLEYQLHKTYLWHPKQGHAFKALGLQIIDGRLCNSRRYKQRLRLLTHHVSWLLDHHRDFETEVDPVYLQLNGLLQFAVRETLPAPLLTAAAALCQRVEDIRYSGPSHTRVRHINAY

SEQ ID NO: 7199 - protein, 388 aa, unidentified
  source 1..388: note = Related to MHHZ01000002.1; note = Candidatus Buchananbacteria bacterium RBG_13_36_9
MNDKKSPLERQSGQIAAKYLFKKLKYPFKDWQKFWDLIRLAVERDKNLYRQISLSKRGGGKRVILIPCEELKYLQRLISQRLLADISGHPNASGFSEGSIREALLPIVRAKQPIFCADVKDAFPETTFGAVFSAFQRCKYGYNSSYFLTYLTTWRTYQSLFYNSALPQGAPTSPRLFDLCFEPIDNALAKFAAKIGGVYTRYADNIFFTAPTFWPARKSCRKVEGETIVKDKHGFETYYPYKRKISTIPEGKADIDKSDSGALNWHSPVISAIYQIVHTKGKGTYYQLHKSYLCDKGQLLHALGLNLINGQLHNTREFKRHLRLTIFNLQKSLSAQDDFGNKIWPLYQKLNGMMQFAIKETLPVSLVQQWEELDLAIYQIRYPRTIGT

SEQ ID NO: 7200 - protein, 366 aa, unidentified
  source 1..366: note = Related to JAAXXB010000144.1; note = unidentified bacterium
MWENKQTGSIRHEYYEPEENVAALVWLSKELGYKIVGEDVIYSLLVQLRVDKPEQNPLYHTILKRKNDGTIRKLYSPLDELKEVQYRIKRRILSSYQVSDNAFGYSGGSVFDTLQPHLPTDGEQRIMFQADIKNAFPSVSGENVFLALYGLPSSESYEHYREKGYLSWHVAAMLTELLTIYDGWSGFLPQGAPTSPKLFDLVFLGIDRNLSHLACNVGGVYTRFADNIYFSMKGEFFPEVISRAIIRTIQECRSRDDYLFDARRFYCKKVKVRPLNVESLRALGLNIINGEIHNTREFKLSIRKSIHHINWLLANSDTPEYSAKLEHAINVLKGQMSFAVEETLPEALLQDYYSLSTTLDGSVSTI

SEQ ID NO: 7201 - protein, 371 aa, unidentified
  source 1..371: note = Related to LBVV01000019.1; note = candidate division CPR2 bacterium GW2011_GWC2_39_10
MVSRIFSPCPDIVSDNEIPAIIWLSKTLGKPQDDGSVLEILKRIRQGETLYEEGFVLKRNGKLRKILKPVPELKKIQREINRRVLSDLIVHPNVSGFSGGQLHDAIRPHLNAKSIFCTDIKDAFPSVTYNDVFRCLTKGREYELTYDISDSYYVYDEEWDDFFPCIIGRKRFKILNHGFLSWYAAQIVTEIATAKDAYGRLRLAQGFPTSPRLFDAQMEPIDIKLTHLAQNVEGVYTRFADNIHFSMQEEEFPGEVARAILKTIEGRGRNLWSNKYECHKTRSFKTDGQAVRILGLNIIDGKIHNTRAFKRAVRLSIHHVKWFLERGIIDTEEFEHAYRKLNGQMGFAVPETFPVKLLDDYSQIKKTYKDL

SEQ ID NO: 7202 - protein, 408 aa, unidentified
  source 1..408: note = Related to JAIOSA010000118.1; note = unidentified bacterium
MGIYKEIVKDLVIDYKKRNPDWTEYDFSEHLVLLTYRAGNNAVLPDPLADSEEAWQATLNSEVPVKNDPVETFLSSFRLNQDGDERIIKIVERSTFYWLGKIFRMHFLDLMNLVEKIRVKGWSNFYRLEWQDKKGGGFRQLQIPNRQLMGIQTKINEKLLRDLPRYPQAFCFSGGRVIDALRPHLKFGSLLKLDIKKAFPSITAYDVRRGLTFGRKIKPVEKLQNIEDYGHFSWYLAKIICDLCVTSSLPQGAPTSGRLFDLAFYPLDVELSKLLKAAGGNYTRFADNLFFSVSERFFPSELKNSIKIIITGEKRNFLKLRYHKLWITNKRYVALRALGLNTLNGRLRNTKAFKSRLRKAMHHKQRLSELGLDTEAAQQKIGGLMGFAVKETLPNKLLKKTEQIKKDR

SEQ ID NO: 7203 - protein, 362 aa, unidentified
  source 1..362: note = Related to JAAXUE010000002.1; note = Candidatus Moranbacteria bacterium
MDRIPWSESDIEFALSLGRDTEEREANIEQYTSEWMNERTERIRGRETAAFLWLAARIGMKPNRFLFAVAGFRSGSFGYTTHFVTKRDGKGKRKITAPHKVLKAVQRKIAQELFWDHPRSPHSFGFLGGSSAEALLPHAKNASLLMVDVTNAFPSIERDVIFRWFRKRDYSWRVSGILADLATFEGRLTQGSPLSPRIFELMFEWIDERLSRLARRVGGTYTRYADNVFFSIPGAHMDKKLVWTVLKKIWRMDLICQVPRDKRYHPTFDTHKLRVRTLPGNAVHTLGLVLRDGEVHNTRDFKRTLRKRIHHVRYLLENSRETGVILSAWTMLCGTYSYARKETLPPKLIQEVEELRGRIHQL

SEQ ID NO: 7204 - protein, 365 aa, unidentified
  source 1..365: note = Related to JAAXVB010000009.1; note = Candidatus Moranbacteria bacterium
MINNQEFGYDPEFMLAFVRELEEKRIERGDQLRFELEEEKRYIRKKQLYALLWLARRIEVKPEKIIELFLAIQEKKKIHNVYFKNKSGGGKRKIIAPIKELKYLQKRISTEILKRYSRGSESCSFGFIGGSTAQALQPHLESGCLLMFDIRDAFPSVKHRHILDLFRGLGFSWYVASFLADVATYEGCLAQGSPMSPRIFELICANYIDRPLEKIARKNEGIYTRYADNIFFSVLGDGFDERLKREIFRNICPPRSSNLKSPYCPKFQTHEFRVKKLAGNAIHALGLVIHDENVHNKREFKRRFRKAIHHAKWCLKNNYDLLPEAWGKLRGLFSYAQKDTLPAKLRSDYELLKDEILNLGIDLTI

SEQ ID NO: 7205 - protein, 393 aa, unidentified
  source 1..393: note = Related to PFPB01000062.1; note = Candidatus Nealsonbacteria bacterium CG_4_10_14_0_2_um_filter_38_17
MEDCEGFSDEELDDVEYSVQLAAENEEFEWRLQREIQRKRKEIPALVWLAHQMKIAPDNLDTVLNMVRNDQSPYRMITLDKPDGGKRRIFIPIDPLKRIQRKIVKCILSDFQTGPNCYGFSGGSIVEAIEPHLQAGTILYVDIRDAFSSSSAEMVMSYLTEGRVPTFRYDYNGKSWPYCYDEDGERGLHYGSTRRLVFEGMLREGRMSWSAARIIVDLTTYPVIGSTCVLPQGAPTSPWLFDMVCKKLDEKLTAFAQKVGGKYTRYADNIFFSMDQDEFPNPVKNAVLRMIRMYGRFRPHKIRVRRMTKGAVKLLGLNVIEGQIHNTREFKRRLRLAIHHVEWFLNNRLKDTPEFDTAWHKLQGLMAFARIDTLPPKLLESYYELEDRIFKIN

SEQ ID NO: 7206 - protein, 362 aa, unidentified
  source 1..362: note = Related to JAGOSO010000002.1; note = Candidatus Pacebacteria bacterium
MNWEDELSDRFLSNGHQLTMKELEEHRLQDRIKKSRRRIDYRKKSFFWLGHKLELPHWLNLSEMLQRIDVEGSAYLYKEPQIIPKPEGGTRIILSPQADLKLVQTRINRLLLKTFPRRPETFGYMGGSCLELAQRHLGMASTLKFDIKDAFFQVPWTNVRKSVKGFRGIAPGFSGSVSHWIAKLCTYSPTPEHIRNQFGLWRGATSFLPQGAPTSPICFHLACGPLDDEMTKLAKRFGGVWSRYADNYYFSMPTPQISNKLEEIVVCEARTKGFKIHKVRRVKQGELCRILGYNLLDGRIANTRDFNRNFRGALYVLRTKLDRGLDYRDAYSRVKGFMGMAINVPENLRLEYDYCKNKIETI

SEQ ID NO: 7207 - protein, 327 aa, unidentified
  source 1..327: note = Related to MHCP01000015.1; note = Candidatus Woykebacteria bacterium RBG_13_40_15
MRSIEPVIFSSGEGRFPAEGLEVDYNRFGFNPLVYLGFLIGIPTRWIDYVIKIGADNFYTEVRIPKKGGGVRVLQVPLDPLMGIQRRILRKVLSQLEPKSSCHGFVTGRSIITNAQVHVGSTHMLVLDLESAFDQGLSSRIFRELWGERVGERRLGFLVASLITQLCTVYSGDIGERYGFRHLPQGAPTSPALFNLACRPLDGRLDHFVWRIGGVYTRYADNLAFSVPRQLTPKEEHIIRKIVDGSGFRVNDAKTRLMRQSGHSILRLPGVAINNGRIILPKRKRKQLRAAIYLAALHGETDRLRGLIGFVEQVYGPEVPRQIIGSH

SEQ ID NO: 7208 - protein, 338 aa, unidentified
  source 1..338: note = Related to MEZX01000002.1; note = Candidatus Berkelbacteria bacterium RIFCSPLOWO2_01_FULL_50_28
MPTLTGRQYAAGRKLARRLDLPPDQLFLVLEYGAAAFYGSYAQPKSGGGTRIIHVPHEPLVTIQQAILKRYFSCLPVSPIAHGCVAGRGIESNAFPHRKARSMVGFDLKDAYNQASFTRSFIQTYHHHYTTSNGEVIERWCSQRKQPWDILPMELAVLEIVSDLVDIYSDYKEVLPHYKLVLPQGAPTSPALFNFACQRMDARLEHLASNVGGVVTRFVDNIVFSWENDEVDRPVYSAIRRIIEKSGFKVNERKTVAIRNGNRNGVPLRFPGVHIIDGDLYIPRKKLRHLRMALHCAGKAHNDALYQGIKGYALQVEAQMPPQLRGVYGKARADNPRI

SEQ ID NO: 7209 - protein, 321 aa, unidentified
  source 1..321: note = Related to JACPCE010000006.1; note = Candidatus Woesearchaeota archaeon
MSLTLEIGLQDNKPAIKSYKTELSQYLSDLTHPLEVLEISHRRKELTDILLDLTETTQLSLLCDESETLDHLFDGLLQLRKEKRPLYKRFQKEINGKTRDLAVPQKPLDLFLRNYAGPIINQAECHAQAHGGENNWSLTESIKTHLPIGIALSFDLSQAFKNTHLQYVFDFYYSLIYKKTRDKKTSTDLAGFLATVSTVYYRDGGYALPQGSNIATKLFNRLLYPIDESLSNYAKNRNLTYTRWIDDFILASKDRDKTNKELIEATNIVQPYFPLSEKKTFLQRDKPVYLLGQKIVDCWITKATTKEIQSKNPMKSTTHYL

SEQ ID NO: 7210 - protein, 317 aa, unidentified
  source 1..317: note = Related to JAGVZG010000002.1; note = Candidatus Woesearchaeota archaeon
MDLAVCDQYKKVKLQVQIHTKELTDYLHSIEHSLQLLEDTNKRKDVTSILLEFTKTSQLSLLGDEAKTLDVVLENLLDLRRAKRPLYKRFKIKVGEKIRDISVPQKSLELFLKYYVSPLIDHAKCHAQSHGGEVGCTPKYSIKSILPVEFVLSFDLKDAYKNIDLQYIFDFYYDLIFEKTKDVEKSKQTAGFLAGVSTVYYADRGYALPQGSPICSKLFNRVLLPIDNLLYKYSLEIGLDYVRWVDDFIFSSSDCGLTLDKFVKTLDIVRNYFPISENKTYFQRKHPVYLLGHKIVGTDISEATTEELETRRQINLS

SEQ ID NO: 7211 - protein, 362 aa, unidentified
  source 1..362: note = Related to MFWN01000063.1; note = Candidatus Pacearchaeota archaeon RBG_13_36_9
MPAVLEEVPINDSPLVLGVPGHYYSFFGGPLFLGIHDDKLREHYEKIKIPLNILRDDEKRRNLAELLSSLNPKPGLFSGESDLEELFPLILEQKHLYQIWKQKVNGKERSFYVPQKAFKTLLTNYVLPFVKAVPAHPSCHGGEKGWTVKKSLESHLPVVSSLTFDMSAAYHQATMNYVFEFFYDSLEGRCKTEEQRRDAAVFLSAVCTIRKDYDERREECFEASLPEGSAVSSAVFNRMLLPIDEEFSRFAEKKGIKYSRWIDDFVFTSPKKRKFNHFEYVMRKAQESFTLAPRKVFFTYEGVSYLLGHKIAYNEIEKISREEFEKQRGEPYTGGMLSDTHPWDCMYEGYEEPTCDGNDIPF

SEQ ID NO: 7212 - protein, 405 aa, unidentified
  source 1..405: note = Related to JACOZR010000022.1; note = Candidatus Woesearchaeota archaeon
MEDRMYAPSGRRFRIFVDCMSMGSRLDVIPSENPDLEIDTDGTPTIFLSSVPLVPGAYFTGPWLPMSYADELVKYFSETRNPLEVLESKKEIILKTLLELLPLDNQLSMLDNKQERLEVLLDDLLALKGERKHLYQRWSQRINGKVRDISIPQDSLEHLLIEYVKPIIMEAPCHSQCHGGEQGFSPKKSLSRHLPLGTVLSFDLANAFKNTHIQYVFDFYYTLFENKIENREIRRDIAGFLTSISTVYYSDTQISALPVGSPISICLFNRLFYPIDEVLHICALKKGLRYTRWVDDITISAKETNRNPEKICGAISMVRREFPIAVNKVFFQQNVPEFYLLGHKIIGNRITKMNKEKSKDKLVPLDPECIATEREIEWIHEVYMGEIPPNQGECSLEGLEEDLPF

SEQ ID NO: 7213 - protein, 387 aa, unidentified
  source 1..387: note = Related to JAHWIP010000076.1; note = Candidatus Woesearchaeota archaeon
MSIEAEIKSCNDVFVEGSFYKHKYEDETSAILLKERLGIPVAYFRGPWLPMFYINECMEYSFSLDYPSQILEIPKRRKQIVDAMLELRSAQQQASLFNIDEKQDLESLLDRLLILKNNNRPLYKRWTQNIDGKKRELSVPQKALDVLLKNYVHDIIMLAPCHPQCHGGEKGWSVKKSLATHTPLGTVLSFDLANAFKNVDIQYVFDFYYRLFESKISDPENRRDTAGFLTTLSTVYYKDKDSFALPQGSPVSIPLFNRLFYPIDKLMQESATKRNLRYTRWIDDLIISAKESNRNRKKFFGSLSIVREDFPVNLNKTFFQQNLPEYFLLGHKIIGNLVIKVSKDEEKNRGEQIDPDCFATHYEREHLWIEDYYDGDEPGDFGEIKDF

SEQ ID NO: 7214 - protein, 310 aa, unidentified
  source 1..310: note = Related to JACQNJ010000008.1; note = Candidatus Woesearchaeota archaeon
MPVYEREFFDYVESNLHPTGSVLANPCRRGSLRRLLSPGTQEDLFGDPLEVILERLSGDIVNRKGGYMRWREKIGEKERMLSVPSKTLWKFLEDYLEPFIEKQRVHGSCHGGIKGWSPKSSLESHLPIVTALSFDMESAFQNMPARKVFDFFYCSLKGIDNYEERRDIAGFLTFISTVRYDQQRGLPQGSPISQAIFNRLMLEVDETMFWAATERGMTYSRWVDDFTVSSPDRRDVREFLGAVNLLAERFPVARDKVYFQEGEPVYLLGHKLVGGRVLKNSREERLRNKTPPLDYYKWLSNRRAFEPWIN

SEQ ID NO: 7215 - protein, 307 aa, unidentified
  source 1..307: note = Related to WJLU01000050.1; note = Candidatus Pacearchaeota archaeon
MNPKVDRLNEYCRRFGPGFRVLDDVRNVLVDFLAGLDRQLDLFESPEQRALSSLEALRVHDGSLYNRWSFSDNRKRRELSVPCEPLKVFIDDYLIPLIKRTKVHECCHGAEPGWSPRRSLEDHLPCYSVLSFDLKSAFNNFTIAEVFDFYYSLDLEGLEEDEKIAVAGFLSMISSSLVDGRRVLPTGASHSPLLFNRGLLELDDELYEGCSRKGFNYTRWLDDITISSQGKVCIEELLGAVELTERYFPVAPNKIFFQKADEPIYLLGHVIYLGRVCKNSRTERDAHKVKPLDYDEWFGDRGYEGWE

SEQ ID NO: 7216 - protein, 317 aa, unidentified
  source 1..317: note = Related to JAGVWS010000026.1; note = Candidatus Pacearchaeota archaeon
MLNEVVVNLRDESLIEAAGAVIDAAITPRNRISTLFPEVDEAYRPANLWRDVLEMLDQGRSLYSRFQKADSNGRVRDISVPQAAFLEFVNRCLIPLVKSVPSHPASHGIEKGWSAERSVKTHVPIRTAFSMDISDAIPGVGIDKVYDFYYALLEDSKFGLTERERAGVAGNLAYLSTVHYASRGTRGLAVGSGLSNTLFNKLFMGIDVAIQEGCNRRGFRYSRYLDDVTVTSEGDESNEAFLGIHPVVAAHGFRISPRKTFVQKASEGDIYLLGQVVVNGRAVMKNSREIREANKKGRLEPEYIERVLSSGDYSRWI

SEQ ID NO: 7217 - protein, 312 aa, unidentified
  source 1..312: note = Related to NZ_FQVL01000001.1; note = Seinonella peptonophila
MIIEQQSSIHITQYLNRIMEEDHTPSYQRIWIDKYHGTTIFNPQQIAELTVKQKEEPRRADQRYVRTLGPDPKTKQWCQTLNDLLLQSREPHPNSHGLEKGRNTSTYIEPHRTQKKVLSVSLYNAFSSVGKKRVTSIARHLLGIEGNAATFFGEIATKHGKLNLGNPLAPQLLNIQAYKMDRYLTDFVRKYGLEYSRFLDELTFSSAYFIQTETIAKIKRIISRCGWMIDNETVNIQSGNHFIIAGHVVVPREGVVREKKEHRKEATNTIPSINQSHTNQANKALKTLTNPSDRLSREKGLIRNLKGLLNRK

SEQ ID NO: 7218 - protein, 425 aa, unidentified
  source 1..425: note = Related to LN854281.1; note = uncultured prokaryote
MSRKQNKVSNSHNKSWSNYRQVSYIKTSVVRQIGVEELKRINKRIFVLMKRSEGFFKEEKARMLVVKQANGYFRGQKVISQADQRALKATGGKYREVTFLKDKATRKMLRKVAKLIDIPHADQVGFTRKRSIWDAAARLGDAKSIVNIDLENAFNAIPEQAVYLILRRVFDLNKKHARQLTNAITDGGYLYQGSPLAPLIFNLWTRPIMDSVRGAGFDIVAYADDLTIGSDYGAISHKMVRVFIKWIRQFNMNVNMAKVKFYNIKKAYKETVGLKSIRSGGGILTTPVKFRKGLRKLRYLTHLYTVNGVTHTRRVNKEGEPNELGFVILGSWIWLSEAERRGVARVDTALYKKLKKSVPAIIEDWKIKRRSYNVDHQSCFTTDSIPHIPQDTRGKWKVIYTSHQGRLREGVYRKRLSARVRRPFR

SEQ ID NO: 7219 - protein, 364 aa, Streptococcus sp.
  source 1..364: note = Related to NZ_POJC01000071.1; note = Streptococcus suis
MEFKDTLAKGMSYTKQSIARYNPNVNLHKLGAKIVAWHNANKGLSYSMKTMYVVKNDPLGRFKKGAKHFEKVDGITYRNIRFYKRETREKLVEILDCLDLEHPNQIGFSRGKGIKDMLKLDNIGERTKIKLDLSNAFDNITKEQLKALLVIVFEIRPKIAEEIASAWTVNGHMVQGHPLTPAVFNLLTRQAVDFVIKYVKNCGIIQYADDILIWHDTHDYVSWKTIRMVCKAFKRAGFPMNTEKEGFYHKGAEIQFVGLRYRRDTDGKYKWFPKEMRKNKARLRAYKHLKALGHLGLDHKEKGYTEWLLFRKRNKQNNKQIQTLKGEWVDFDKAVETMLKLFPTKEEPQWAEFNRLPIREFLLI

SEQ ID NO: 7220 - protein, 394 aa, unidentified
  source 1..394: note = Related to HG796529.1; note = bacterium
MYYKRENLATLRQELIRHVGIEEFNKISATVRTKLENFEYYRIGYSSFWINKRTKAKVFSKSEILKSNDEHRPIKSPKKDLKVLTKEINELFSSFTSNRYYIKGFVKDEGVQTNAEYFRKYGGIKFGLNMDLENAFNQIDYGNLKDFGKIVMGWNAKVSEKFAKLLTIKGQMVQGNPLSPTMLNLFAIPMDLTIIEFSKSQTAPLLYTRYADDMLIGSRTKIDFKTFINLLKIIKQFGFKVKKKKTKFMKNNIEITGIILYNGKRWKTKRGRKRRLVKKIRLMKHLQSLGLKHTKRLNKEGKLIEISCVISGILAWLYPASSKKKKSRKNRKTKQNSKLNRKFSKTKHDKSLAKQNKKFSKDKRQKVAKNVEEEYRIFCMTNHHILRRNSPTTT

SEQ ID NO: 7221 - protein, 343 aa, unidentified
  source 1..343: note = Related to nan
MGHKPCRSCGEGGYAERQNQFNFQLLSFSHVKLNPNSCLSATPVRVLGILTMFTRKTVYDVNRMSGQKKAREVCNPGRHLRTIHGALRRSLAPLVSALAYSAGCRKGDSPRRRLLRHLGDVHFYLIDLKSAYRAVQLAPMARILARISPSCLLPSADQSGQYNLPYLTEQESERWLLQYAFDDKFGGLMVGAPASPDLFNLYAGEMIDAPLSKLAARYGLRYSRYLDDLLFSAPADNPIGQKKRRAIRRILTEVGFAVSDHKSRLWDIRKGPIVVNGVGLDVSGRFFVPGAFMRRLNGIAHLVRRRMLPISNLGGLLGAVKNILSTQHLNRSQGKVLAAAAST

SEQ ID NO: 7222 - protein, 328 aa, unidentified
  source 1..328: note = Related to PCXO01000005.1; note = Candidatus Yanofskybacteria bacterium CG10_big_fil_rev_8_21_14_0_10_46_23
MYKISDFLAELERSAYTKPGELSLRPTFSEPPKWERWAIRDINPLSGQKKVRMLTVPNEALRFLHKGLIYLLRVSKKASSALHYARGARPGFSHQRLVSEHRGNRFFYVVDLKDAYSQVDHSLMIKIVIEFLRAIPHFEAFSEEDEAGVTIFLERYFLLPEIPGLPVGLPASPDLFNAYIGTLVNWRISKMISAGHYTHYLDDLVFSFRSRPSRKKRREIRETLKQWRLPINHGKCQFKDLKKGPIVITGIGLEYGGRMFIPRNYTRKIAGLVHRALETRDPHEIARARGMVGLVLHTLKVARQVPNQHEEKLLRSFRKLQDDPENNR

SEQ ID NO: 7223 - protein, 316 aa, unidentified
  source 1..316: note = Related to MHWW01000009.1; note = Candidatus Zambryskibacteria bacterium RIFOXYC1_FULL_39_10
MFIDIKEFLEIHDDPRFDKYTLRDVNPVSKHIKTREISNPNKSMREIHRRIIQAVKDVYLDSSNHFSSTHQNADRHNSSRFFYQTDLMHAYASVPLEGLVTILSSLKPTWGTKNVREILTTYCFDESGAGLIVGAPASPILFNIYAWQTLDIPLLEFWPYMNDEGQIFRKFYTRYLDDLTFSSPEPITDSIRRSIRRVVEQAGFQINHRKSTVRDLKKGPVVITGVGLEYRPRRSARLFLPRHYLKRMNGLLHLALKGDPRVSHSEIEGLMGVFYGVLGRKHRQSHQSTKLNATESRFLEMYGAYRAQYERATNRK

SEQ ID NO: 7224 - protein, 308 aa, unidentified
  source 1..308: note = Related to QZJN01000010.1; note = Candidatus Parcubacteria bacterium
MFILFSSFVKGLPGREAPGFKFFFLQDRNPLARRRKRRHVGAPNEAMWRLHWRLIQWLRSPGLNRGRRYSTGCGHLDSPRRNILRHRGNRFLYLLDIKDAYPNVNLDKLAKILYELAIHLVPEDKIKLFLKLFCFSPNGGLVVGGPASPELFNLYAESLLDHPLGVFCHKHGITFSRYLDDLTFSCSTPIGKRKRLEIRKIILKAGFNINHSKAKVVDLRKGPVVITGIGLNLNGKLFVPGHYRRRIDAVFHKAAKNPKDLKYLAIGMHGLFRSVIPRGELNSRSELRTINRFRSFLSANRNKEALTR

SEQ ID NO: 7225 - protein, 332 aa, unidentified
  source 1..332: note = Related to JAGQML010000021.1; note = Candidatus Nomurabacteria bacterium
MSEKQLSIDFPTDHFLLQNKSPLPGYKTEEIVTYSSSGKRKVRVICKPNETLRIMHDIMKEVLSPVYNKKNLPYAYQWIKGISTPPIAALQHHKENRKFYPRHWFVTDLKSAYHSMDLIEASIYVEIFCQINGINPVIDWTISMILYCTDPNMTLAEGLPVSPWLFNIYAHYKLDIYLALLAHKYNARYSRLGDDLIFSSPEPFGKRKRKAILGFVRNQGFTISERKTKVIDLTKNHGASINGIGIRNTVSKGELFLPRDYRAKIKGLLHVALYGLDENGRLNDPSNFPEINGMMAIFKKLVPKNVDSWTKDDDWIVENYEIFRESFHNKAG

SEQ ID NO: 7226 - protein, 321 aa, unidentified
  source 1..321: note = Related to NVSU01000009.1; note = Candidatus Wolfebacteria bacterium
MIPSLRGLLILDPEPSSQKGGGRKHNKNKLHYIPNDSLRVLHAYALRKIEEYIFEMPSATGWIKGRGSITKDHILSHTNGQGFFHEYWYITDIKDAFRSVNLQKMSWVLCNLFPYYDFTNWPDMKEYLKKYFFAPGGSGLAEGYSTSPKLFNIYAEKMIDQHFRELCTQYNISYTRFGDDLIFTSDTIIGKKKKKALLSILRVAEFTPNDNKTHSFNLNKLKEGKIINGVGIRNTSTQAEIFLPRSKRKKLEMLLYLFWYDEAKLNPRKIEGLMGWFNQVTDSSKKGKRTLNTSEEKILKYYNRASFGLKELIREMREETT

SEQ ID NO: 7227 - protein, 396 aa, unidentified
  source 1..396: note = Related to SCTI01000001.1; note = Patescibacteria group bacterium
MARRCVPVVASTPMCLDSCSLLTSGRSTQYSYSSGSPRLITGFYDLGANMPLHNTGQLELELEALMEEPLFHSFIHKDVNRLSGNVKFRRVSAPNKAMRKIHLQIRAALSRLDVEMPYVTAGLRKSKVVNHVKAHRGNQYLCCYDLKAAYDHVRPEAMADILRQHGLPESDIELVARYCFGNESGGLVTGGLVSVQLFNLYANEVIDQPLATLFAERGGITYTRYIDDLIISSGAPIGRRFRRSILQIIRAAGFEIKPAKTQLIDLAAEHSQMAVLNGIGLDLNGELHVRPHYRELLYRLIKRAQAGEIDPSVVHGCMGAFYVIKPRGQQMTPGERKLDRAYRWYVNQQRRADPGRPERRRRKQQQYRARRRLKPSYKRHGRRSGPVGTYRPRPTF

SEQ ID NO: 7228 - protein, 327 aa, unidentified
  source 1..327: note = Related to nan
MKTENNPAFTKRVYQDFNPVSRHRKTRIIYEPNRLMRQVHAKFLKEFGGFLPRGLPITACIPGASPKMNLEPHRRNRYFYLTDIHSAYSGVNIYRLASLLCSLRPDLKLFRGDKLPHEPLDLFRAEDGMVSFLRSYFFAEEGGLATGGPAAPFLFNIYCANFLDVPLMELCRKWELTYTRYLDDLTFSAADGNPIGDKKREAIRAVVISAGFEISHRKSQVLDLKKGTISITGIGLEYGGRLFMPRAYTNTLRGALYRVVRRRSDDDERVRVRGMYSAFLSLIDLRSANCTEKKIIELAGRAFPPKPKKPGYTPKTSSRRKRRRQLE

SEQ ID NO: 7229 - protein, 329 aa, unidentified
  source 1..329: note = Related to SCTI01000001.1; note = Patescibacteria group bacterium
MSKETRSITAPPATERRFINGRNGGKRREVFVPNAAMREVHAQVIRETRLQLGIPSHNFGGVRGGSAVRCAMQHWGNHYVYKLDLYNAYPSVRPEWLYPVLAEVKSELWVDQVGMEDFVRRYLATPRGRGLMTGTPAATDLFNQVAARKLDEALIELAERWSLTYTRYIDDLVFSSWEPIGRRKREAIRAVIKRSGFRLNYKKTGYYDVARRPVMITGLRLGAGPSAGEASDDINRAFAIYLPRKWLQGLEGSMYCLVNGKSNRVGKAIEPGVVEGRMGALREHLALGGFPFDRQAALVWRKYTYVKPITRPKVPLSPMEEWLQRLFRG

SEQ ID NO: 7230 - protein, 323 aa, unidentified
  source 1..323: note = Related to MEZX01000003.1; note = Candidatus Berkelbacteria bacterium RIFCSPLOWO2_01_FULL_50_28
MSNKPILAAPVEGAAFRHFFLKDVNPLGGRTKRRHISAPNAQMREVHSALISYLRSLPADLSAATGARKGHSSITNIFPHRNNRYFLLLDIKDAYGTVDEEKLVQVLLELDPTLPRDLFGSEVVTQFLQRYCLNNKGGLLTGAPASPDLYNLYVAVLLDSKLIELCKQYGLTYTRYLDDITLSSMTRIGKKKRQAIYGLMREAGLVIHESKTQILDLNRGPVKIAGFTLNQNRSIILPRSYLGKIRGAIHNAIEKGLCDKATQVQISGMMSQLLASLQDPSVRRKGGRRYRRRPNSTEKRVMDRYCAYRQLCAQTISPKLATS

SEQ ID NO: 7231 - protein, 316 aa, unidentified
  source 1..316: note = Related to MHTT01000015.1; note = Candidatus Wildermuthbacteria bacterium RIFCSPHIGHO2_01_FULL_49_22b
MSFENLVLGFELNPALLGGTPAFRIFAIRDKNPLSKREKGRRPLEAPNNAMRIIHGRLIKYLRSLKVEMPYATACRPGDSPLKNVERHRQSRFFCLLDLRRAYQSVQVGKLASVLHQADPRLKGQFWEVRAFLQRYCMSQTGGVPAGAPASPDLFNLYCAVLLDEKIGNLCRQHGLIYTRYVDDLTISGNITVSRRVRAQVRAIIASAGFKVNHLKSQTHDLQKSTLVINGIGLELGGRVFVPPFYLRHVRGLLHEGLKGDLSLAPKIQGAMSVVLGIVNQRKPTASEQRVLRQCKRFRRLIGQTKREQRKAPAPV

SEQ ID NO: 7232 - protein, 340 aa, unidentified
  source 1..340: note = Related to JACOYQ010000025.1; note = Parcubacteria group bacterium
MQLSLHDKIFGVGFDETLRTFPEPPAMRLYVRFCGHTMSGHGKMRKLEVPNKAMREVHIRLLRFLRTLPSESSYATGCKPGDSPAKNVKRHAGQCFFYLVDLRGAFHSVDIPVLAGILRKAAKLPSRQESQILALLERYCASHFGVGGLAEGVPASSDLFDLYCAVRIDKQLGPYCKWWGIRYTRYADDLVFSSERPLSRKIRQYIRRILEEAGFAISHHKCELRDLKKGPIKINGIGLQPDGRMFVPRPFTRRTQHLLHLVLEKGRWELLLQVQGRMALFRQLTDVRNPNRTEKHLLEQYAALQRILRKEKMRAREQKKRVRQSGRPEYLHVSRSPIAC

SEQ ID NO: 7233 - protein, 312 aa, unidentified
  source 1..312: note = Related to JACAFG010000002.1; note = Candidatus Saccharibacteria bacterium
MFDNLSDLLGDEPSFRVHRLRDENKVSGVTKWRTIHAPNDPMRKLHSRMIVDLRLLQTKVHGRSPYATAVLPGSSPRRNVERHRGKRYLYLLDLHSAYLYVKGGELAFILCTLAAQRDGYLVADPSELSSTHDFLKRYCLGTTGGLLTGAPASPDLFNIYAGELIDQRLAPRLKRWGLTYSRYIDDLTFSSNEPIGERKRRAIRDVIAAAGFDISYRKAKVYDLAKGPVQINGIGLDLTGRTYVPRKYLGKVNGILHLARYGMIKPAKVAGYMGVYWTATPRSHQGRNRAECHTLELFHDYQLHRNDWLIRS

SEQ ID NO: 7234 - protein, 329 aa, unidentified
  source 1..329: note = Related to JAIFWN010000002.1; note = Candidatus Parcubacteria bacterium
MIFDGIDLPRSGTKAEFKAWQKRDVNPLGRTSRMRTLHTPNEAMKYLHDRLVINLRRIKAVDLTSAASKPGGSALRNVLRHRHNRYFYLTDISSAFDSVDSHRLAAVLAGLDTQVRESEVYAFLRQFCMTEQGGLITGSPSSPDLFNIYCAVLMDGQMREYCLRHEVTYSRYLDDLTFSSKQVIGARKREKIRELISLSGLRIGHHKSRVLDLKKHRIEINGIGLEYGGRVYLPRWYLYKIRGLMHVAERSEDPKLLQRVHGMIGLLQASTDASRPRNRLETKVFSEYAQLRHQTRKKPFIPPPQGRAPIGIQTGDPWGSLDDDDDVPF

SEQ ID NO: 7235 - protein, 344 aa, unidentified
  source 1..344: note = Related to JACPSJ010000005.1; note = Candidatus Kerfeldbacteria bacterium
MILESFTTGLPGKPAWQPFRYRDVNPLGGTTKVRLLGAPNPAMRLLHHRLVRFLRGLNVPMPHAVGARPAGSPVVNVRRHLYIDNRGRPARYRPNRYFLLYDLRHAYCNVDPGLLAGIICQHCPELTVQDGAVLDFLLGYCFGPNPNKPYQLELPIGQRRRGGLVQGGPASPDLFNLYVAITLDQPLGELCQRYGLTYSRYLDDLTFSSRERSIGTKKRQVIRRKIRDAGFTVSDRKAKNLDIRKGPLTINGVCLNRQGTIFCPRWYLRRIRTLVHAARKGAAVDLAALHGMMGVFTATLPRRWELVDINGRRSERRVPVGRLRIEQKTLDEYRQLQARQRRQP

SEQ ID NO: 7236 - protein, 345 aa, unidentified
  source 1..345: note = Related to LBTF01000013.1; note = Candidatus Nomurabacteria bacterium GW2011_GWB1_37_5
MIDKLTFGIDIENATFKIVVINDKNNLSGTKKRRVIHMPSPEMRIIHKRLIRWIRGQKRLVPISASGSRPGDSVFKSVFIHKKTRKHSYVSNGYTHIDTIGWFPRHFFCLDIKDAFPSVSVSKMTEALLFAGLDPNDYSYNKVISILERYCFTKEDGLIVGANASPDLFNIYAEYFLDRNLRRYCHEHSLVYTRYLDDLIFSSNKTIGKRKRKSIYKFIDESGLKVNEKKTKIYDLRKGCAVINGIGVNEKGRMFIPRQYLDTLRGYMNLYLKGKIELKFNWLRGKMNPLFQCQEQSDLLPNRTEGKVFDLFEEVKVRLKFPINTSLDHDDLDDLAYENTDDLNF

SEQ ID NO: 7237 - protein, 327 aa, unidentified
  source 1..327: note = Related to JAGQMN010000021.1; note = Patescibacteria group bacterium
MDRILFTERMLCNIGLQILPHIKDEDFYSFREKFQEKHLHHFVVNDINSLSGQEKQREVVKLSTELDLFQKALLSRLKMHYGEVLRSEISNSHRSALNTILCHKKVDLYRGEKRIYFSRFYYSMDIQNAFGCMTTEKVLEVLKGDFQDESLEKILKLTCFDLHRGIITGASASSYLYFLYWQKKIDSKIYELCREEGIICTRYVDDFLFSSEHKITKSFSKKVLKVIRNANFEINFQKTQFYDLGRETFNVNGIVFRKKDNRGAIGIPKTRSRKLLGMLNQYEKGNIKIAQLAGAMSLLEKISQVHNGAFLSRTHQKILSRYRKLKR

SEQ ID NO: 7238 - protein, 314 aa, unidentified
  source 1..314: note = Related to NVTD01000044.1; note = Candidatus Wolfebacteria bacterium
MIFDRLCITEKPNAAFKPFINKKGRKLNRQNSDMREVHRAFLAFLKIQDIHMPSAYGTGGKARNLWHRFLQHRDKDTGKFQKEWYILDLADAYGHVNMEKLVGVILLTCDNELRRRSDDLLAFLMRHCSSTREKGLIQGATSSSFLFNLYLDELVDIPLERFCKAHGVTYTRYYDDFAFSGQKGTLLSHRRGKLIRKGIRKILIKAGFEINHLKSKCFDLTKKPTKVNGVLLDYYGRISLPRPVIKKMSGLLHRFVHGKHLSSFVVDGNLGRVQDIHDILEPTCCIEQRLLILYLEYYHHRFRGRVRTRQDDPF

SEQ ID NO: 7239 - protein, 365 aa, unidentified
  source 1..365: note = Related to JACQKC010000011.1; note = Candidatus Kaiserbacteria bacterium
MRRIVMIQQNHAVLRGSRTDAEDDPLRFVTMVGGCPRIDFHWKQDTNGKRRLIGNPNKPLRRLHRLFGQYLEEAISKMGKENYELIKFPSSTAFVRGTNPLKNAQKHQKGRFFYITDFANAYPSVDLVRLAVLIVYIKRHNVYGLEMSLRMLGQNRVLVRELQEDPLFLSILAFLESYCSGQYGRGLAVGGPRSPYLFNLYCEVYADAGLRKVCERYGITFTRYADDNVFSRDKPITSDIRRELRRRIESAGFQVNHRKSKVLCRDMGTVFVTKVGLRDQNLVAPRSESAKAAIVFPKKKRRRLHGIIGSYLHMQMDWPEKVSGRIAEFLHYYRHVERRTAADHKTFALCKEFEREWAKYRKRRK

SEQ ID NO: 7240 - protein, 352 aa, unidentified
  source 1..352: note = Related to JAGWZP010000006.1; note = Patescibacteria group bacterium
MRHVRSAAPQEPPVENWDPLHFATMVGGHPQIHFHWKEEGGKRRLIGNPNKPMRKLHEVFGQYLRKGIYAMGNDNYTLRRLPSSAAFVKGSNPLKNAQKHIEGRFFYITDVSNAYPSIDLERLAILIVYIKKYYEYGPNFSLSAFGQNASFRDQVRRDWLFPPVHAFLESFCSGMHGQGLAVGGPLSPFLFNLYCEVFMDAQVRKLCERYDITYTRYADDCVFSRHKPIIGDIRRNVRECIARAGFEVNHRKSKVLSREMGAVFVTKIGLRNRTGKEDGSETAKIVFSQKKRRRLHGIIGSYLTMQMDWPEKVSGLIAEFIHYYKNVDESTATDRKTFALCKLFEAEWAKHR

SEQ ID NO: 7241 - protein, 346 aa, unidentified
  source 1..346: note = Related to JAGOUL010000013.1; note = Candidatus Moranbacteria bacterium
MRDMIMRPELVGQACGGYPLINFEVRDVRGKSRLIGIPNRPMRSLHRQLGKFLRGIIMHTDGSGYGLRKLPSAYGCVEGSNPLRNASQHKENQYFYITDISNAYGTVSLERLALLLTYLIQYEAYEESGFSLAWFGQDERVWVLRQDEAYQPVLGLLVAHFGGLHGQGLAIGGPLSPYLMNLYCEVYIDAPLRKFCEPREITYTRYVDDLTFSAKHFIGEETRRRIRAVISRGGFTLNRQKSRAQMLSMGQVSITQIGLARDTPDGSTRLVFSQKKRRKLHGIIHSYLTRGMDWPEKVRGYAAEFLYYYKNVAVRTATDEKTFELCKRFEREWKLYGGPKHRTRSK

SEQ ID NO: 7242 - protein, 312 aa, unidentified
  source 1..312: note = Related to MHKU01000025.1; note = Candidatus Liptonbacteria bacterium GWB1_49_6
MIFLKKAHEKTCDELPLFFPRLIRRQNQKTGAWKIRRVYEPNDAMRAIHEELDEYLRSQPRFPKHAPPRPAENVAPHRGNRFFYLTDIENAFGSVKVDGLVKAFCLMNSFWIPRKRGLKNFLENYCIAPEGGLYQGAPSSPALFELYAWAFLERPIHTWYNLKKWCGWNDVTYTRYVDDLTFSSKKRIGRGTRRQIRRLLHNAEFTINNGKNFVIDLANPKTPRITITGIGLEYGGRMFVSRERLRELEKMLIAGIEGEDVNPHKIEGFMSVFWSPYGGKRRSAVLTRTQRRILSLSRAWRKLQKKNHTMTP

SEQ ID NO: 7243 - protein, 406 aa, unidentified
  source 1..406: note = Related to JAGOVW010000033.1; note = Candidatus Pacebacteria bacterium
MHLQLLVEQASATETPPAFSVVRKRVGKKVRAIAVPNASMRVLHRLLINELEAPGYLLESATAKKGSSIIQNVRPHLHARSVYLLDFAHAYRSVPVQKLAASLHFRFPTFGTEREIAHFLKQYCFVPRHGLAQGAPASPLLFELYAEWEVDTSIRQFLERVEDSIGGRINYTRYVDDLTFSALEPIPAWVRRGIRSICMSAGFSIQHRKSVVGSLGTKVVEVTGVHLLAPGRAMLSRDFCNTLERTLDTYLSQLFSEPDLRLEGMIVYYVGMMRALGDVRASNRRTVRIDKKIKAYRLRTGFAPSHKRKTFSNRTLDAIRAQLPVSQIVSRSVALKRAGKEYKGLSPFKVERTPSFFVNDQKGFYHCFASGSHGDIFTFVMFREQCGFVEAVEMLAKEAGVSLDYD

SEQ ID NO: 7244 - protein, 329 aa, unidentified
  source 1..329: note = Related to JAGQNG010000010.1; note = Candidatus Saccharibacteria bacterium
MQPALSFDIMPKRFHHNPNQPELFTLTRDGSTKVRDIYVPTDEVRMKHEAMLRRLHALEIPFPHAHGGLPGFGVIDNVRPHQQSNYFYKLDIKNAFPSVDHEWLQRTVHDMLVERRVRKSDIRDIDHFVEADALVDGCPGLPLGYPASPFLFNIYCRPTDLAIGAGLALRKDFGYQVVRYSRWLDDLTFSSLQPIDAGHRRILREWVHMTPGFEINHRKSQRHSLGQGPVTITGISLYPDRRMAPSPELLEKVRVQFGQMAELIAAGIELTPQEIGEFNGYHSVLHMAGDPLKSRSATVRLLAKWYNRLALQLPDMESAAPGEDGGSTD

SEQ ID NO: 7245 - protein, 308 aa, unidentified
  source 1..308: note = Related to JAGNKD010000006.1; note = Candidatus Saccharibacteria bacterium
MKRRTVFKPATPEDLRIHWRMLANLQSIQWEFPHSVGSLPGSHLIDNVTPHISAESEQFYLLDLKSAFPSVDTDFALRAVYDGIRTRRGRDEAAEAARFMVETSYMGRTQDEKPDKMMYGLLQGLPCSPLFFDIISQALDMRLRRHLQRVFGDDVVYTRYIDDLTFSSRRAAFTRRRRKDIVAQIETLPGYIVNHDKTRCQSLGRGTLTVTGLDMRRNRKWPTDRRVLVAPSGSQLASVEQEINEMTRKLREDLPITLSEKAHFYGMGSILHMAGDPSKSPMSSVRTLKRRFREVDKELKKLPSGRLF

SEQ ID NO: 7246 - protein, 427 aa, unidentified
  source 1..427: note = Related to MFLC01000025.1; note = Candidatus Kaiserbacteria bacterium RIFCSPHIGHO2_02_FULL_49_11
MIALKSLVPLPLFGGAPTFNPQNIFDGKKWRTVQAPNNVMRKLHKELIEVLLELPIDFTSATGSLPGKSNILNANVHAGNQFFYIFDMKDAFPSVPIDRLADTLHVCSHGHLGTRARIRSFLEDYCAGPRGLAVGAPASPLLFNIYCAVGVDPGIRKLLRSDTIYTRYVDDLVISSSRPIPRILRKRIRKVVTDAGFAIKDPKSKVLDKEKGPVTITGVVIDKKGRIAPTKECLAEVEDLLWIPPQELTPEQQKRIAGFASYLQSFREFGRQKLAEGNGTVSTAPLSPVLDTLAKRCRIRLRENKKPRTQKQQMHLVFPEVFIDEIRATASLRDVIEPYLRPGKRGLRLKKVGGEWAGLCPFHNEKTPSFTIAEEKGFFHCFGCGNHGSVIDFIMRVERLEFPDAVRFLAKKYDLPLPERKLERTKN

SEQ ID NO: 7247 - protein, 419 aa, unidentified
  source 1..419: note = Related to JAHIST010000097.1; note = Patescibacteria group bacterium
MAAPRLSCSLKKYGFNSKEVVVKVNGKKLLADLMNWPEKKIEQAITRRSRYYLVKKIDKDGSIRKTYAPDRELKKLQKRFLKYFLYRIPVGWKNLITGFRPGCSYVYNAKCHALADAKIVLRLDFANAFPTVETSYLKTILAKILSQEVEYHRKGDYPFHPLFPVKRVKWFRRAIKNYYQLDLFCDPDKIICEFLDLVLSFVTYQGRLPQGAPTSPYLFNIVLWYSGLIQKITAFLGEKRISVSVGNVFSGEVIFTAYADDLTISSSRSITKHEVNNLIDLIEQESPFRINREKICYFQADRIAPLVTGLRLVKLVKEGRELDVLMSKANLNSREKKNLKRKILNREGRWIVNSVSLPKKGIRKIRGLIHKATYAPPLIQRMLEQKIKGHLSCLKAIYGDKLPNQISKPYQKFQQSLRG

SEQ ID NO: 7248 - protein, 389 aa, unidentified
  source 1..389: note = Related to JABMPX010000007.1; note = Parcubacteria group bacterium
MISKDLLTSVLDWPEEKINKAVLFKDSYRLINRKKKDGSLRKIYAPHPDLKRFQRRFLKYFLYRIPLISSLPINGFRPKFSYIDNTKEHAQKNVRFVLRLDFRDAFPSVKIEYLRIILKKVLFLEVKGYMEKNYRQRPLFPNKRVQWFRKLLRDLPQLNLFSVDPLKILDEFVELILPLITYQGKLPQGASTSPCLLNIVLCYSGLLEKIYQFLWDNRILFSENDVSMVNSTIYADDLTISSSEPISRSSINQLIDLIEQESPFKINRQKISYFNRARIAPLVTGLRIVRLVKEEIELENFLSNKDLTYKQKKNILRRTLNKKGKWIITSVSLPKKQIRRIRGLIYRAISEKALAPIIDGHMANLKAIYGQNLPNQIMVPYKKYLITEG

SEQ ID NO: 7249 - protein, 403 aa, unidentified
  source 1..403: note = Related to JACRFM010000021.1; note = Candidatus Kerfeldbacteria bacterium
MSRIKIEGGDTLLAGVLGMPSADIRNAIVCRDNYKIKHIVKKSGGRRRLSIPCKSVKKFQKLFLKKFLYCLIERGVLDKNMTGFLPGVSVKDNALVHLNENLQYVVRLDFKNAFPSVSFRVVKEVLLHHVKNEIGTYRAVEIQRLLGKKINYPEPVLFSMRKVKWFRELVSSLSVDNSASYYLDYIVDGFIEMAAYLLTYKGKLPQGAPTSPFMLNLTVSYLKILDRIREFLKQNNIDSQVSIYADDIVISAKERINFGLIRGLIGVVEASRVFRINRAKILRFDINQTAPLITGFRLIRIRSVNRKLTESWLARLPRKIKATVEERLFYNPQSPFINITLPQKQIKKIRGIIHRAIYQPGLASKVNGYVAYLKDIYGEHLPRQIVEPYKKYLLVNQKDPEVV

SEQ ID NO: 7250 - protein, 347 aa, unidentified
  source 1..347: note = Related to LBQA01000005.1; note = Candidatus Moranbacteria bacterium GW2011_GWE1_35_17
MNTIQEKAIIVLSSLLSNKFSPEKIKEILTSGISYRYKPRKKKDGSIRDCYAPAEDLKALQQSILSEILHNIPVHKNLCGFVPGVAMKNGVEAHLRETREKKIVGRWIVKVDIKNCFPSVKIKVLKNMFEDIFTGTLYAYGVDNPAVFFEFCDILIKLTTHKGGLIQGAPTSPYLTNLVISWAGIVDDLEHYCNTRHGYDLIFSIYADDITVSPTITNKASVKKIIHAIEKSRIFRVNPKKTTQNDNRHRSHRITGMSIHQEFDQFGPSEAWTTLSRKKQKFYRGRIQKVIQFLQQGCEPSIKEHGVSINQARGYITWTRHVCGERIPSCLKKVIAVFEELVNKQAL

SEQ ID NO: 7251 - protein, 366 aa, unidentified
  source 1..366: note = Related to DOKE01000013.1; note = Candidatus Moranbacteria bacterium
MKNSKYYLSLFLKFLPILEKMKITSAMADGLIYTYYTKEPYYRTYEILEKNGKIRKIDEPCDALKLIQQELNRYFYRFPTHKSLKAYIENCEGAKETALTHQFTVWGAKPGDRQSKPPRWLLKMDLKDFFPSIKTRTVENVLFLNFLRDKDNQQLLIRLSEKLNKKFGLLFKQFIELLIWLTAGNGCLTQGAPTSPYLANLVWTESGVIEKILDYLHSRKKEFNLAIYADDISVSFLERKYPRGVIKNIAKIINDSEYFKINPKKTKLNRLKHGAHLVVGISIGKTSHFEPSFGIPQKFINTLRGELHKTITIIKTETRPIEQIHEVSIPMMRGKIGWVKSVYGDRRLPSKIKKLVEEFEILSRII

SEQ ID NO: 7252 - protein, 425 aa, unidentified
  source 1..425: note = Related to JAGONZ010000028.1; note = Candidatus Buchananbacteria bacterium
MARPTALDVLSALIGLDRQIIELALSETESYQKIEIPKRNNGRRIIHIPSEILALVQKYLLECLYSWEVHDYMHGCVIGRSPVSNAAKHLRLNKKENVRPGTGEQFLYMTVPRHVLKLDLSNAFHAVTKDAVHQMLTSALSSTWAANLHLKQGDTDVEKKRWDIINHVRSNGYFVEPLASLITQLTTTEGLLPQGAATSPYLLNMVICASGLMERVAKACKPRRGRFTVYVDDITISTKEPEIGEGFIAAMIEAVERGGRFTVNPKKTSLTDSRHRAPVITGVTLGTNADGTGRLSIEQSHLNTIRRILWCAANLLEQGIKPDFDEHGFSLDHALGHAAWVDNVYQDKAPHPLVAKPLARFRKAFLCRALGPLGTQLSLPFGEEQPKQGLRSSNRRQLLQELLDQLLDRPVEERIRAIDEFNTQH

SEQ ID NO: 7253 - protein, 343 aa, unidentified
  source 1..343: note = Related to JAHIRB010000007.1; note = Patescibacteria group bacterium
MQKSRKDAVEILANLMRLQSDFIFDALKNRNYQQILIPKRSGDVRKLHAPGEELKLVQEVILQFLYRWKVDARQFGFVLGGSPIRNAKYHIRNEFYVPHWVLKLDLENAFPSVTSTVLRKEYTRVFNPETFKELSGIDEKQFTAFIQLMLDLTTYRERLPQGSPCSPYLLNLVLVWTGVTKGVLEYCEKKGLRASLYGDDFTISAKTSNMWFSKTFFRKINSAVSRSGCLRLNHDKTHLICSRNSAPIITGVKITESHDNGAKLTLTQSTLNHWRGVIHRVTEILYWNNRLPRLEQDGVTFNQALGYVNWIEDVYRESEVPLSVRKPIKSFKVQSSRFDRRRG

SEQ ID NO: 7254 - protein, 399 aa, unidentified
  source 1..399: note = Related to SOKK01000088.1; note = Patescibacteria group bacterium
MSRKQDEVKIKNPFPAQPLLQPRTLTKIYKERRDEMDALDFLGHIVKDRQTIQEAWRIRREYKDVYVLKGNGEVRILSVPPIKVKKAQKMILEWLRDGNFISSHPRIHGLVGSSCFNFIKGHCGTSQYFYSFDIKHAYDSTPVPLIYENLLRILSNKESLLLRAYFESETGKGIQELAKTIIELTTYSQASPKRTENEKQLSFLKRGSNSILPQGAPTSPALFFVVLKTMMEKIERDVNLSEHKLSCYGDNFLISSPSPINPEVADHVLAIVKSFGFTPHKTFQHNIKQGALKICGYTIAPGNGGKDKTRIGIDKSTIRRIRALCCKAQYTTRYKDPRLYRRLQGCLAWITPVYGGNRHNLPNQIKKPLRKIGTPLKCQSKQSKRSFLLKKQRPKKRRA

SEQ ID NO: 7255 - protein, 348 aa, unidentified
  source 1..348: note = Related to JAHJGP010000039.1; note = Patescibacteria group bacterium
MRQTRIDEWFSETKQKKKLIAKIQKVSALTKTRPESFWEKLEKALPLRKDYREAKIPKRSGGYRTIYMPSPELKKVQKNILRYLQEIWQVHYGPVHGLSPGGSCVKHARIHSASRWIFQFDIKNAFPSTNIITLRKLLSQIIPVEVNLGENATKIAYTRAELIIKLTTFQEGLPQGAPTSPFLFYIVLTSRKIIPATTGGEIRLTGLFYKLWSACPRGYKISCYVDGFVISGPKPISPKTQEKIFKTIRKESFEINQKKTRIQDCRHGTVMICGLAVDGKGRISLPKKTIRKWRGIIGKARFDPENLELRQKIEGFVASLKPIYEKGTPPQITKPYNRYQRELVKTTS

SEQ ID NO: 7256 - protein, 366 aa, unidentified
  source 1..366: note = Related to JACQXN010000004.1; note = Candidatus Portnoybacteria bacterium
MKKFSSFDGLLSLLEDCRQCEIKYRIKKMPKKGGSKRIIHVPSKEVKEIQWEILDIVKAWQVDECQFGFSPGKSCVDNALFHIHGYDINASGRKIQIRGVPRWVLKTDIEDAFPSVKRKHLETLFRDLFLPLKSYPAFVSATSPDRVDKIYKKLVYQFARLATFKGRMPQGSPCSPYLFNLVLLQSGIVKKLKDKAGERAKKTKGCQVTAYKISFYGDDITVTSFKDRIPNRFIKEISAIVEEGGIFRLNNEKTQRSSKKYRSILINGITLNDKWKEGGPCFLGLSKKIRKTYRGKIHRVTVILDSGRLPELEIDGINLEKAMGIISRIKDVYRNESLPSDLERVLIKFQEARNNLIRRTINIVCI

SEQ ID NO: 7257 - protein, 416 aa, unidentified
  source 1..416: note = Related to DPTL01000176.1; note = Elusimicrobia bacterium
MWISQDLIEKTKEALYEKTKDERVLWASPLEIVCLAKQKKCKVDFNTLLRSFSANHCTAEDVANLFNYLNSHGEGNVEREMLLKVIAEPEERKVLQEVKCLIDRYYPKRKKNPLEGIPKIKQFVTRFRNKERHYRSFAIPKRNGGRRIIEAPTQELANIQRLILKKILYRNQIWNSNSSVHGFVPGRNILSNASLHKEATVIVRIDLKDAFRNTKEEMLVKHLKEYFTEKGAKILVRLCTYKGHLPQGAPSSGMLLNFVLGELDGKLKKIAGFMGWRYSRYADDLTFSCVEFNKHTVGIGKLIERVKSMIKDYSYRVNEEKIRVFKKNRAMRVTGLVLNSGKPTISRKFRRNVRAKVHNFVTKGIGNEKEVLGYISYINLANKKYAKKLLRMMEKLPSTHVPRQDAIGISSGVASE

SEQ ID NO: 7258 - RNA, 1461 nt, synthetic construct
  source 1..1461: mol_type = other RNA
atggataagacggaaattgtgcagatcgcgtcacagatgagtacccgtgaagatctcctcgcattgctgaacaggattaagcaggatgagattcgcgaaagcggctttgacgccgacaagttctatcctttcacaatgaaacagctgctttactattgcaatcctaatcacgccttccaccggtataggcagtttaagatcaaaaagaaatcgggggggtttagactcattaccactccacgcaatagaagcttcatgatgctgttgcgatccgtgaatgaaattttgaaggcgatctacacacccagcgattatgccatgggctttacagaaaaacgctccgttgtgaccaatgctgccgtgcataggaatcagaactacgtcttcaatatagatctcaaagactttttcccctccgttgagcagggaagagtcatgaagagacttactctggaaccctttaatttttcaccccaaattgccctccttatcagcggtctgtgctctatgcgggtcaaacgagagcaacccctggaaacaaagagatatgatctagacaagcagtttatgtacgtactgccgcagggcgctcccacatctccagtcataacaaacacaatatgtgatacgctggaccgcaggctggctgggttggcaaaacgcttcggtttgcggtacacccggtatgccgatgacattactttcagctctatgcactacgtgtactccaagaacagtgagtttatcaaagagctaattaggatcatcaacactcaaggcttcatgatcaacgaggctaaaacccgactgcagaaactgggttcccggcaggaggtgactggaattattgtgtcggacaaacttaacgtcaccaagaagtacgtaagggaaatccggtcactcttatatatctgggacaagtatggctatagcgctgccatgtctagattctttccaaagtacaaagcagagaaggggcacatcaaaaaagggaatccggaactgactaacgtcctagacggaaagttactgtatcttaaaatggtaaagggggataccgactcagtgtatattaagctgtacaccaagtttcaggagctcgttaatcgcgatagcggccctgacaagaccaattcttacggaataagttacattgagtctttccctatcttagagttcgagaaggataagaacaccaacatcacaatctttcacaaggacggaaacaaaagatacgcaaccttcaggatgggcgagactcatcaggtggccagtattaacaaagacgtgacgccagacgacgaacaacagaaagagaagctggcaatatcctgttgcaagaattttcgtggcgagcaattctggcttatacatctcctggataaagttactgtgttcaaaccaaagcctgtggatatcgatgaattaaacaacgacttggacctgctcctgggaatctga

SEQ ID NO: 7259 - RNA, 1461 nt, synthetic construct
  source 1..1461: mol_type = other RNA
atggacaagacacaaattgcacagatagcctcccagatgtcgacgagagaggacttgcttgcccttctcaacaggattaagcaggatgagatccgggatctgggctttgacaccgacaagttctatccttttacaatgaagcagctgttgtactactgcaatccgaaccacgccttccataggtaccggcagttcaagattaagaaaaagagcggcgggtacaggcaaatcacagcacccaggaatcaatccttcatgatcctcctgcagtctgtcaatgagatcctcaagagtatatacaccccaagtgaatatgccatgggctttaccgagaatcggtcggttgtgacaaacgcagcggttcacagagctcaaaattacgtgttcaacattgacctgaaggatttctttccaagtgtggagcagggacgagtgatgaaacgccttaccctcgctccattcaatttttcccctcagatcgctctggctgtgtccgggttgtgcagcatgcgagtaaagagagagcagcctttagagacaaaacagcacgacctagacaaacagtttatgtacgttttacctcaaggagcacctactagcccaattataactaacatgatctgcgataccctagatcgcagactcgcgggactggccaagagatttggtttatgttatactcgttacgctgacgacatcaccttttcctctatgcactatgtgtattctgaaaagggggaattcagaaatgaactggcgcggattataagcacccagggctttgtaatcaatgaggccaaaacccgactccaaaaactggggagtaggcaggaggtgactggcgtaatcgtcagcgaaaagctaaacgtaactaaaaagtacgtgcgcgaaattcgcagccttctctatatttgggataagtatggctactccgcagccatgtcaaagttttatcccaagtacaaggccgagaaaggtcacgtcaaaaaggggaatccagatcttacgaacgtgctcgatggtaaattgatgtatctgaagatggtcaaaggagatgacgatagcgtctatgtccgtctgtacaccaagtttcaggagctggtcaatcgcgacacaggctctgacaagacaaactcatacggaattacctatgtggaaacaatgccccttatgaaattcgagaaggacaagaacactaacatcataatctctcagaaagacgttaacaagcggtacgccaccttcgaactggggaaagtgcatcagatcgcttcaattaacaaggctgtgactcccgaggacgaacagcataaagaaaaactggcaatctcatactgtaggaatcccaaaggcgaactgttctggctgatccatttgctggataaagccacaactttcaaaggaaaaccggttgatgtggatgagctgaataacgacctcgatgccctgttgtctacgtga

SEQ ID NO: 7260 - RNA, 1461 nt, synthetic construct
  source 1..1461: mol_type = other RNA
atggataaaactcagattgcgcagatagcaagtcagatgtccaccagagaggacctcctggccctgctcaaccgcatcaagcaggatgaaatccgcgagctggggctagatgctgataaattctacccttttacgatgaagcagttgctttattactgcaatcccaatcacgcattccaccgatatcgacagttcaaaatcaagaagaaaacaggaggatatcggcagatcgacgcccctcggaataagagctacatgatgctcctgaagacagttaacgaggtgctgaagtcaatctacatcccgagtacctatgcaatgggcttcacggaaaagcgtagcgtcgtaacaaacgccacagtgcacaaaggacagaactacgttttcaatatcgatttgaaggactttttcccttctgtggaacagggacgcgtaatgaaaaggctgaccctatccccattcctattttctccagaaattgccctgctcatttcggggctctgtagcatgagagtcaaacgggagatcttagtagaggacaagaaacacgatctggacaagcaattcctgtacgtacttccgcaaggcgctcccacctctcccatcatcacaaacatgatttgcgacactcttgatcggcggcttgccggcctcgcaaaaaggtttggtctgcattacacaaggtatgccgacgatatcacatttagtagcatgcatcatgtgtattcaaaagagggcgaattccgcaaggagctcgagagaattattgaatcccaagggttcactatgaacgataagaagactaggctgcagaagcttgggtctaggcaagaagtcacgggcatcatagtcagtgacaaacttaatgtgaccagaaaatacgtgcgcgaaattcggtcactgttatacatatgggaaaagtacggatacaccactgctatgtccagattttatcccaaatatatcgctgagaagggacatgtgaagaaggtcaaccctgacatgactaatgtgttggacggcaaactgatgtacctgaaaatggtcaaaggcgattcggattccgtgtacattaatctgtatacaaagtttcaggagctggtggcccgagattccggttcagaaaagaccaattcctatgggctgacctacattgaaagcgttccattgctgaagttcgagaaagataagaagaccaacgttacgatcagcaaaaaagacgggaataagcgttatgctacctttaaactaggtgaggtgcaccagattgcgactattaacaaggccgtgactcctgacgatgagctgcacaaggagaagttggttatcagctactgtaggaacccaaagggcgagacattttggctcatacatttactcgacaaagtcaccacctttaaaccctatccagtgaacatagacgagctgaataacgacctcgactctttgttatctacatga

SEQ ID NO: 7261 - RNA, 1461 nt, synthetic construct
  source 1..1461: mol_type = other RNA
atggacaagacacagataacgcagatcgctagccagatgagcacgagggaggacttgctggcactgttgaacagaatcaaacaggatgagattcgggagcttggctatgatactgataaattctaccccttcaccatgaaacatctgctgtattactgtaatccaaaccacgtgtttcacagataccaccagttcaagattaagaaaaagagcggaggctttcgccagataaccgctccaaggaatcaatcctttatgatgctgctgcagacagtcaatgagatcctgaaggcaatgtattcgcctagtgattatgcaatgggcttcaccgaagaaaggagtgtagtgaccaacgcgtccgtccataagggacagaactacgtgtttaatatcgacctgaaggactttttcccgtctgttgaacaacgacgagtcctgaagagatttggggcaaaaccctttaactttaaccctgaaatcgctctccttctctctgggctctgctccatgagagtcaagcgcgagcaggccgacgagacacagactcatgatttggacaaagaattcgtgtatgttctgcctcagggagccccaacatcccctatcattacaaatatgatttgcgatacccttgatcggcgcttagccggactggcccgcagatttggccttcgctattcacgttacgctgatgacataacgttcagttcaatgcattatgtgtatgccgagaagggtgaatttcgaaaagagctggcaagaataatcgggtcacagggattcaccattaacgatacaaaaactcggctgcagaaacggggctcaaggcaggaggtgactggtatcattgttagtgataaactcaacgtgaccaagaagtacgtgagggagatccgttccctcttgtatatttgggaaaaatacggctactctgcgaccatggccaagtttctgccgaagtacaaggccgagaaaggtcacgtcaagaagggcaacccagacttgactaatgtgctggacggtaagctcatgtacttgaaaatggtaaagggggaatccgatattgtttacgctcggctgttcgagaagttccagcagctagtggcgcgtgacagcggaggggataagaagaacccctatgggatcacatacatggagacagtgcccctgctcaaattcgagcaagacaaaaataccgaggtagccatcttccacaaggaagaaggaaaacggtacgctactttcgaattcaatggcgtcaaacaggtggtatctatcaacaaggacgtttctcaaaatgacgaaatgcaaaaagagaaactagccattagcaattgtaggaaccctaagggcgagcaattttggcttattcacttagtgaacaaagtcactgtttataacctcaagcccgtggacatcgacgaacttaataatgatctagacagcttactcagcacctga

SEQ ID NO: 7262 - RNA, 1446 nt, synthetic construct
  source 1..1446: mol_type = other RNA
atggataaggctcagatagtccaaatagcctcccagatgagcacgcgcgaggatctgctggccctgctgaactccattaagcaggacgaaatcagcaagtcctgttctgacggtgataagttctacccatttacgatgaagcacctgctctactattgcaatccgaatcacgtcttccacagatataggaagttccggatcaaaaagaagagtgggggattcagacagatcactagccccagaaatagatctttcatgatgctgttacagtcggtgaacgaaatcctgaaagcaatgtacaccccatccgattacgccatgggctttactgagaaaagatctgttgtgactaatgctcggattcatcagggacagaactacgtgtttaatatagatctcaaggactttttcccctctgttgagcagcctagaatctggaaacgcctgcaactggccccatttaacttccctatcagtattgcaaatgtcctagcaggcctgtgttccatgcgcgaggtccgaaaggatatcgacggcaaggacgtcttcgtgtatgtgctcccacaaggcgcacccacaagccctattattaccaacatgatctgcgatactttggatcgtaggcttgtcggccttgctaaaaggtttgggctgcactacagccggtatgctgacgacataacattctcatctatgcattacgtttacgccaagaatggagagttccgaaaagaactcattcgtatcatcaaatcgcagggctttaccattaacgaggagaagacaaggcttcagaaacaagggagtcgacaggaagtaaccgggattgtggtatcagaatcaaaactgaacgtgcctaaaaaatacgttagggagatccggtccttgttgtatatttgggagaagtacggttatagcgtagccatgagcaggtttctgccaaagtacaagttggaaaaaggacacgttaagaaaggtaatccggatcttatcaatgtgttggaaggaaagctcatgtatttaaagatggtgaagggcgatatggaccctgtgtatgttcggctgtattccaagttccaggaactggtggccaaggacttttcattgaataaaaccaacagctatggaataacctatatagagacaattcccctccttaaattcgaggaggataacaacacaaacgtgatcattcatctgaaagactgcaacaaacgctacgcggtatttaagctaggcgggatcaatcagttcgcgtctattaataaaaacgtgccctcagactacgaacagcaaaaagaaaagcttggtattagtaactgtcgcaactccaaggggaaacaattttggctcatccatctggtggataaggtgatcgtccagaacagtaacatggtcgacatcgacgagctgaataatgacctcaatctcttactagacatctga

SEQ ID NO: 7263 - RNA, 1449 nt, synthetic construct
  source 1..1449: mol_type = other RNA
atggataagaaccagatcgcccaggtcgcgaaccaaatacaggaacgcgaggacctgttgagtctgctgaataaaatccgcaaagacatagttggagacaacggctctgagtccaaatttttccctttcaccatgaaacacctcctgtactactgcaaccctaatcacacttttcacagatatacgcagttcaagattaaaaagaagtcaggagggttccgccttatcacatctccaaggaacagctcctacatgtttctgctgcagtccttaaacgaattactcaagagcatgtatacaccggctcagtcggcaatgggctttacagagggaagatctgttgtgactaatgctaatgtccataagggccaaaactacgtgttcaatctggatctaaaggattttttcccatccattgagcagcctcgtatttggaagcgccttcaactcgccccctttaactttccttctagtatcgcgaatgtgattgctgggttgtgcagcatgaaggaaactcgaacggacactaccggaaacgacgtggttacttatgtcctgccacagggggctcccactagtcccattatcacaaacatgatatgtgataccctagatcggcggctgctgggcctgtcaaaacgcttcgggctgcgatatacaaggtatgccgacgatataacattctcttcaatgcactacgtctatgccaaggacggcgtgttcagaaaggagttaacaaggatcattgaatcgcagggcttcactattaatgaggctaagacccgactgcagaagttgggtagcaggcaggaggttacagggatcatcgtctcagacaagctcaatgtgagcaagaagtacatccggaatatcagaaatcttctgtacatttgggagcggtatgggtatagcgtcgccatgagtcgtttccttcccaaatatagagccgataaaggacacgtgaagaaaggaacccctaacctgatcaacgtgctggatggtaagcttatgtacttgaaaatggttaaaggtgagtttgactctgtgtacgtgcggctacatgacaagtttcaggagctcgtcaagagggattttggggcagagaagactaatagcctcggcattacgtacatcgacacaaagccgctgttagaattcgagaaagaaatgcaaaccaccatttcctttcagcacaagaagaacgaaaaaagggcagcatcatttttgatcgagggcattacccattgtgcctctgtgaataaaaatgtgacccccgattccgaacaacagaaagagaaactctccataagcaactgccagaacgaaaaaggcgaacaattctggcttatccatctcgtagataaaaagaccgtattcaaatccaagccagtagatatcgacgagctgaataaagacctcgacagtctgttgaacacctacaatggttga

SEQ ID NO: 7264 - RNA, 1464 nt, synthetic construct
  source 1..1464: mol_type = other RNA
atggataaaaaacagatcgttaagcaagcatctcagcttaaatcgaaagaggatctgctgaatctgctgaatcgcataaaacgggatgaaatcgaggagatgggttttgatgccttcaaatttcatcccttcactatgcgccatctgaactattactgcaacccaaacaatgtctttcaccggtaccggcagtttcacattaagaaaaagtccggaggttccagggtcatcactgctcccagaaaccgtagttttatgatgatgctccaggcagtgaatgagatactcaaggccatatactccccttccgattacgccatgggatttaccgaggggagatcagtggtgactaatgctaccattcacaagggccaaaattatattttcaacatcgacctgaaggatttcttcccctctgtcgagcagagcagggtttggaaaagattacaactgaagccgttcaatttttccaagcagatggcgaatattatcgctggtttatgctctatgcggcaggtgaaggatgttattgacgaaacaaaggagcacaacaacgacaagaaattcaaatacgtgttgcctcagggcagtcctgtcagcccaataattacgaatatgatttgcgacacacttgatcgcaggcttgcaggactcgcccggaggtttggcctccactattcaagatatgcggatgatattacattctcttcaatgcactatgtgtacgccagcaacggaaagttcaggactgaactatgtcgcctgattaccgaacaaggcttcaccatcaacgaagacaaaacccgtttgcagaagctgggagcccggcaagaggtcaccgggattattgtaagccaaaaattgaatgtgacgaaggagtatgtaagagacatccgaagtatcctatacatctgggacagatacggctataccgctgcaatcgcacagtttctgccgaaatacacagcggctaaaggtcatgtgaagaaaggcaatccagaccttcagaacgtcatagacgggaaactgatgtacctcaagatggtaaaaggggacgaggatagcgtttatacccgattatattctaagttccagtctcttatccagcgagacactagcagtgaaaagaccaatagctacggaatatcatatgtggagacaacaactgtttccaagtttgagcagatcaacaaaaccacaatcaacttcgtgcaggacggcgacgggaaaaggcatgccgagttcaccctggggggcaagaaacagtacgccacgttcatgactatcgtgaagactgacgaaattaaggataacttggctatctcgaattgtcgcaatcccaagggcgaaatgttttggctgatccataaggtggataaggtcaccgtgccagccaagcccatcatcaatattgacgaactgaacaacgacttggatacactgctcaacctccctcacgggtga

SEQ ID NO: 7265 - RNA, 1461 nt, synthetic construct
  source 1..1461: mol_type = other RNA
atggacaagaaacagatagtaaagcaggtgtcccagataaaaagtaaggaggatctgctcaatttactgaactgcatcaagagagacgaactggaagagatgggttttgatgcctccaagtttcatccattcaccatcaggcatctgaactactactgtaaccccaacaatgtgtttcacagatacagacagttccacatcaagaaaaagagcggtggcacaagggttatcactgctccgcgcaatcgcagcttcatgatgatgcttcaggctgtgaacgaaatccttaaggccctttactccccaagtgactacgccatgggcttcaccgaggggcgctctgtcgtaaccaatgccaccatccataaaggccagaattatgtcttcaacatagacctaaaggacttctttccttcagtggagcagttccgagtttggaaaaggattcagctcaaaccatttaactttccaaagcagattgcaaacattgtggccggactgtgtttcatgcggcaagtgcggaacgttattgacgaaactaaagaacatgataacgacaagaagttcaaatacgtcctgccgcagggtagccctgtctctcccatcataaccaatatggtgtgtgatactctggatcggagactggcaggactagctcggcggtttgggttgcattatagtcgatatgccgacgatattacctttagctccatgcactacgtatatgcgcccaatgggaagtttcacaccgagctctatagactcatcactgaacaggggtttattatcaacaaggataagaccagactccaaaaacttggcagccgtcaggaggttacagggatcattatttctcagaagctgaatgtcacaaagaaatacgtgcgagatatcaggaacatcctttacatttgggaccgctatggctatacaacggcaatttctaagttcctccctaagtataaagccgctaaaggacacgtgaaaaaagggaatcccgacttacaaaacgttatcgacggcaaattgatgtatctgaaaatggtcaagggcgacgaagattccgtgtatgtcaagctgtacactaagttccaggagctcgtgaatagggacagcagctcagataagacaaattcatacggtatcacgtacatagagtctttgccttttctcaagttcgagaaggataagaacactattattacgatccaccacaaagactgcaataagcgctacgcgacttttaaaattggagaaaccacacagatcgtaagtatcaataaatcggtgacccccgacgatgagcaacaaaaggaaaagctggcaatatcttattgcagggactccaaaggagagcgtttctggttaattcacttggtggacaaaatgacagagttcaagcctaaaccagtggacatagatgagctgaataacgatttggatctactgctgtcaatctga

SEQ ID NO: 7266 - RNA, 1455 nt, synthetic construct
  source 1..1455: mol_type = other RNA
atggacaagaagcagatagttaagcaggctagccagctgaattccaaagaagacctcctgaatctgctaaaccggattaaacgggacgaaattgaggagatgggctttgatgcgagtaagtttcatccattcacgatgagacacataaactactactgcaatccaaacaatgtgttccacaggtatcgtcagtttcacattaagaagaaatcaggaggtacccggattatcactgcaccccgtaacaggtcattcatgatgattcttcaggccgttaacgaaattcttaaagccatctatacaccttctgattacgctatgggattcacagagggtagatctgtggtgagtaatgctactatccataagggacagaattacgtgtttaacatcgatctcaaggacttttttccctcggtggagcaattccgcgtgtggaaaaggctgcagttgaaacctttcaatttcccgaaacagatcgccaatatcattgccggcctctgctccatgcgacaaacccgcgagataattgatgagacaaaagagcacaaaaacgataaaaggtacaagtacgtcttgcctcagggaagcccagtgagccctataattacgaatatgatatgtgacaccctggatcgcagactcgcagggttagcgcacagattcgggctgtgctatagccggtatgccgatgatatcactttctcatcaatgcattatgtctacgcccccaacggcaaatttcgaactgagctgtgtaggatcatcagtgatcaaggttttaccctgaacgaagacaagactcggctgcaaaaggtaggggcacggcaagaggtaacgggcattatcgtctctaagaagttgaacgtaacaaaaaagtacgtccgcgacattcgaaacattctatacatctgggacagatatgggtataccgcagctatcgccaagttcctgcccaaatacaaagccgctaaaggccacgtcaaaaaaggaaatccggatctgcagaatgtgatagatggcaagctcatgtatcttaagatgatcaagggcgaagaagactccgtctatatcaagctgtacacaaagttccagagcctcgtaaatcgcgacacttccttggataagacaaatacctacggaatctcctatgttgaaaccactcctattcttaagtttgaacatacaaacggcaccatcgtggttttcgtgcacgacgagggcgggaaaaggcatgccgagtttatcttaggggaaaaaaagcagtacgctaccatcatgtctgtcgttaaaaccgaggaggtgaaggaaaacctggcaatttccaactgtagaaacagtaatggtgagatgttttggttgatacacagcctcgacaaggtgactacattcaagcccgaaccagtggatatcgacgagctaaacaatgaccttgacttactgctgtctacctga

SEQ ID NO: 7267 - RNA, 1440 nt, synthetic construct
  source 1..1440: mol_type = other RNA
atggacaggactgaaattactaagatggccatgcagatgaaaactaaggaggatctgctatcactcctgaatctgattaagcgggcggaacttgaagaaattggactccaagatcagttccaccctttcaccatgaagcacatcaattactattgcaacccaaataacgcctttcatcgatatcgccaatttaaggtgaagaaaaaaagcggcggcttccgactgatcaccacccctagaaacagaagtttcatgatggtgttgtcagctataaacgagctgctgaaatctctgtatactccttctgactacgccatgggcttttctgagggtcgcagcgtggtaagcaacgcctcgatacacaaaggacagaattacgtattcaacatcgacctcaaggactttttcccttccatagagcagccaagagtttggaagagattacagttggcaccctttaattttcccgagaagattgctagtcttatcgccggcatgtgtagcatgaaggagattaggtctttcgaagacggccatcaggagacattctacgttctaccgcagggtgctcctactagtccaatcatcacgaacatgatttgcgacaccctcgaccgccggctagctggattagcaaagcgattcggcctgcattatagcaggtatgctgacgatatcaccttctcttccatgcattacgtgtaccaggaggatggggattttcgtaaagagttgaggcgtatcattgcagaccagcattttacgataaatgacgataagacacgccttcagaagaaaggagcacggcaagaagtgacaggaatcatagtgagtgataagctgaacgtcacacaaaaatatgtcagagacgtgcggaatattctttatatctggaatcggtatgggtatccgagcgccctggccaaatttattccaaagtacaaggaggagaaggggcacgtcaaaaaagggaatcccaacctggaaaatgttattgacggtaaactcatgtacctgaaaatggtcaagggtgaagaggattccgtgtaccaaaggctccacaacaaattcgtcacactggtggagaagatgaaggaaaagtcaatcaccactgagcagaaagtaacgtacatcgagacatgggctctgttggaatttgagaaaaaatactccactgaggtggtgatcaccacatcagaaaatagccacaggtacgcgcacttcatctttgggtccaagaaagcaaaggcctcggtcaataagaacataatccccgatgaggagaaagacaaaaagcagttagccatctccctgtgtatcgacggcaaaggggacaccttctggtttgtccaccgcattgataaggttatcgttcccaagaagaccgaagtggatattgatgaactcaacaacgatttgaacctcctgcttaatatttga

SEQ ID NO: 7268 - RNA, 1605 nt, synthetic construct
  source 1..1605: mol_type = other RNA
atgttattccttttatgctacgacgtgtttatgctctacatcatttgctacatctacatcaagaagattgtgtctgggtgggatctcagtcggccactaatcaatatatttgaaaggagaaggcagatggacaaagaacagattcggcagaccgccctgcagatgaagacgcgcgaggacctgctgaccctgctgaacagaataaagagggatgagatggagaaactggatttcgctgataaatttcacccttttaccgcgaaacacatgaattactactgtaatcccaaaaatgccttccaccgctatcgtcagttcaagatcaaaaaaaagagtggtggctttcggcaaattatggccccgagaaatcgatccttcatgttcatgcttgactgtctcaatgaggtgctgaaagccgtttatactccaagccagtatgctatgggctttacagaaggcaggtctgtggtgctgaacgcttcgaaacacaagggtgctaactatgtcttcaacatcgatctcaaagactttttcccctctatcgagcagcctcgggtgtggaaaaggctgcaactccagccatttaactttcccgtaccggttgcctcagcaatcgcaggcttgtgttgtatgaaagagacaagagaaatgagtgatggaaccaagaaggacttctatgtgctgccacagggagcacctacgagccctattatcaccaacatgatctgcgataagttagatcaccggttgggtgggcttgcccgacgctttggtttgaactacactagatatgcggacgatatcacattctcttcaatgcataacgtctaccaggagaattccgagtttcggaaggaacttgccaggatcattgggaaccaaggattcaccatgaatgagcaaaagacacgactgctaaaacgcgggagccgccaggaggttactggcataactattagtgacagattgaatgtcagccagaaatatgtccgtgatatcagaaacattctgtacatttgggaaaagtatggctatgcagtggcatattccaagtttctgcccaaatataaggaagaaaagggacatgttaagaagggcaatcctgacctgatgaatgtgattgacgggaagctcatgtacctaaagatggtgaaggggaaagaggatagcgtatacaaacgaatgtatgccaaattccagatcctcgtcgaaaagtcctacgacatcaaaaagaccaacgaaaagaatatcacatacatagagacgactcccctgctcgaattcgagaaaaagattggctccccagtagagattgtgatcagcaaccaggagtcccaatcagaggctgagaaaaagaaaaacgacaaaggcaggtacgcatattacaaactcgcgaacggatctaagatcaaagctagcataagtaagtacctttcagacgccgaaattaagaccaaggataagctggccatatcgacatgccgtgatgctaagtctaaggagttcatgttcattcatcgcgccggaattgtcactgtgccaccccctaagcccatagacatcgacgagcttaacaatgaactggactccttgttgtcaagctga

SEQ ID NO: 7269 - RNA, 1479 nt, synthetic construct
  source 1..1479: mol_type = other RNA
atggataaggagcagattaagcacattgctctgcagatggagtcccgtgaggacctgttgagtctgctgaacagaataaagcgcgacgagatggaagaattgggttacgctgacaaattccacccctttaccattcgtcacatgaattattattgcaaccccaaaaatgccttccatcgatacagacagttcaagattaagaagaaagccggtggcttcagacagatcaccgcacctcgaaatcgctccttcatgttcctgctcgattgcttaaatgaggtgctcaaggccgtgtataccccatcccagtacgctatggggttcactgagggccggtcggtggttacaaacgcgtgcaagcacaaaggggccaactacgtattcaatatcgaccttaaggactttttcccaagcatcgaacaacctcgcgtgtggaaacggctccagctgcagccatttaattttcctgtttcagtggctaacgctatcgccggcttgtgttgcatgagagaaacaaggatcacgagcgacggcatcaagaaagattactacatcctaccacagggggccccaaccagtccaataatcaccaacatgatttgtgataagcttgaccacaggcttggcggactagctcatcgcttcggtttaaactatacacggtatgccgacgatatcaccttttctagtatgcataatgtgttccaagagaactcagatttcagaaaagagcttctgaggataatcggagatcaggggtttgtaatgaatgagaagaagactcggttgcagaagcgtggttctagacaggaggttactggcatcatcatatctgataaactgaacgtcagccagaaatacgtgcggaatatacggaatattctgtacatgtgggaaaaatacggctatactgtagcctatgcgaagttctttcctaggtacatggaggagaaaggacacgtgaagaaaggaaaccccgacctggtcaacgttatcgacggcaaactcatgtatttaaagatggtcaagggcaaagatgactcggtgtatcagcgcctgtacgcgaagtttcaatctctcgtggcacaaatgagggatccgaaaaaaacaaacgataagcatattgcctacgtcgaaaccatgccgctcctggactttgagaaaaagataggaagttcagttgaaatcgtcatcccccccaaagaagaaaagaacagcgaaggagagatgagccaatctgggaaagggaggtttgcatattatctcctggtgggcacaaagcagctaatcagcatttctaagtacctttccgaaactgagattaaggcaaaggacaagttggcaatttcacagtgtcgcgatggaaaagggaaagagtttatgctcattcatcgaattaacatcgtcacggtccctccccccaagcctgtggacattgatgagctgaataatgaactggactccctgctgagctcctga

SEQ ID NO: 7270 - RNA, 1554 nt, synthetic construct
  source 1..1554: mol_type = other RNA
atggacaaggaacagattgccaaacttgcccatcagatggaaacgaaggacgacttggtaaccttactgaatcggataaaaaaggaggaaatggcagagatgggctttgctgacaagtattatcccttctcccagaaattgatgaactattactgcaatcctaagaatagtttccacagatataagcagttcaagatcaagaagaaaagcgggggcttcagacaaattaccgctccgcgcaataggtcctttatgctgatgttgtcgtacgttaacgtgattctgaaagcactatacacaccatctaagtatacaatgggatttactgaagggcgctctgtcgtggacaacgctcaaaaacatctgggcatgaattacgtgctcaacctagatttaaaggacttctttcccagcatcgtgcagcccagagtctggaagcgactccagctgaaaccttttaatttccctgttccagtggcctctgccatcgccggactgtgttgcatgaaagaaattcgagaagataccgatggaaagaagactgagcactttgtactgccacaaggagcccccactagcccgattattaccaacatgatatgtgacaaactggaccacaggctggcggggcttgctaagagattcgggctaaactatacgagatatgcagatgatatcactttctccagcatgcacaatgtttatcaaaagcacggtgagtttttcgcagaactctaccggataatcgaaggtcagggctttaccgtgaatgaaaaaaagacacgtctccagaaaaacggctccaggcaggaggtcaccgggatcactgtcagtgaaaagctgaatgtgacccagaagtacgtgaacgacctgaggaatattatctacatttgggaccggtacggttattctgtcgcctattccaagtttttccccaaatacaaacaggagaaaggccatgtgaaaaaaggaaatccagatctggtaaatgtgatcgacggaaaattgatgtatctcaagatggtgaaaggcgatgaggactcagtgtacaaacgcctccacgggaaattcatcaagttgctttcaaacctgaacgatcccgcgaagaaaactgagcagaacatcacatatgtggacaccctgcctctactcgaatttgagaagcggaataacaccgaggtgctggtctgtttctcagaggagaaatacgagctgacctttgataatggcatcgtggtgcagatgagcgaggaacactacgagattctgaaagataaaacacctaaggaggagataaagagtacgaggttcgtgccttcccggcgctacgcctactttaagctgcataacaagaaggtctacgtttctatcaacaagagtgttaaaccagaggaagaacacaataaggagctgctggctatatctgtctgccgtgacagcaaaaacaaggagttctggttgctccataagttagataaggtaacagtcagcacacaagttgaacttgatcttgacgagctcaataacgaccttgattcattactcaactcgtga

SEQ ID NO: 7271 - RNA, 1053 nt, synthetic construct
  source 1..1053: mol_type = other RNA
atggagcgcgagcagatagctaaaatggcagctgccatggcagataaggaagatctcttagacctgctgaacaaaatcaaacaggacgagatgatcgctacaggtttcggcgataagttctatccattttctatcaagcacatcaactactattgtaaccccaacaattcattccacaggtaccgccagttcaaaattaagaagaaaagcgggggagagagaattataacagccccacggaatcggtcgttcaaactgattttgtcctacatcaatgagattctgaagtccatgtataccccatctacatatgcgatggggtttgctgagggtcggagcatagccgacaacgcgaaaaagcatagaggcatgaattatgtgtttaacctggaccttaaggatttctttccgagcatcgaacaagctcgcgtgtggaagaggttgcagctcgccccctttaactttcctctgcctgtggctaacattattgccggtatgtgctgtatgaaagaagtcgtgcaagcagagggtgggtcacagacggcccgttatgtgctgcctcagggagccccaacttcccctatcatcacaaacatgatctgcgataacctcgatcgtagacttgccggagtggccaagcgatttggcctcaattacacccggtacgcagatgacatcactttctctagtatgcataatgtctaccaggaaaatggggagttcagaaaggaagttaggaggattattgaagagcagaagttcactataaacgataagaaaacccgcctgcaaaagaaaggcagtcgacaggaggtgaccgggatcattgtgtccgacaagatcaacgtaaccagggactacgtaagagatatccggaatattttgtacatgtgggagaagtatggatatggcgttgcctttgcaaaattctttcccaaatacaaagcggacaagggccacgttaagaaaggcaatcccgaccttataaatgtcctggacggaaagttacaatacctaaaaatggtcaagggggaagaagacagcgtctggtga

SEQ ID NO: 7272 - RNA, 1461 nt, synthetic construct
  source 1..1461: mol_type = other RNA
atgaaacgtgagcaaatcgcacaactcgctcggaatatggagaatagatctgatctgctcgccctgctgaaccgaatcaagcacgacgatgtagtcgaagagggcgtgcagttctttccctttactatgaaacagattagattctactgcaatccaaaccacgcctttcataggtatcggcagtttaagattaagaagaagtcgggaggctttcggttgattaccacaccccgaaatcgcacctacaaaatgcttctgcagtacgtgaatatcatcctgaaagctttgtactccccttctgactacgcaatgggcttcacagaagggagatcagtggtgacaaacgcggagaaacacctgggacagaactacgtgctgaacttagatcttaaggacttcttcccctccatagatcaagcgcgagtatggaagaggcttcaactggcaccgttcaactttccagtggagatcgccagtattattgccggcctctgttgcatgaagtttaaagatgacgaagtcgaaaagacacgctatgtgttgccacagggcgcacccacgagcccaattatcaccaacatgatttgcgataagctggacaggagactggttggtttggccaaacggttcgggctccattacacccggtacgctgatgatattacattcagcagcatgcacaacgtgtaccagcctaatggcgacttttggactgaactcaggaggatcatcgccgaccagaacttcaccatcaatgaggacaagacgagattacagaaaagggggagtcggcaggaagtcaccggggttatggtcacagagaaactgaatgtttcccagaagtatgtacgcgacatacgcaacattctgtatatatgggagagacatggatttaacgtcgcctatagcagattcttccctaaatataaaagcgaaaagggccacgtgaagaagggaatgccagatctagtgaatgtgctcgacggaaagctgatgtacttgaagatggtaaagggagaaaatgatcctgtgtatcttcgcctgtatcgtaagtttaaggcactagccgaccaggctcgtgatatactcactgctaacaacggggggatcaattatatcgaaaccacacctatccttgaatttgagcagaagaataacacggaggtggttattctgtggactgaggacaaaaccgacggtgataaaatgatccccgcccggcgctacgcctacttcatgctggacggcaaaaggatcaaggcttcagtcaacaaggtgataactaaagaagaggagtcccagaaagagttactcgcgatctcatcttgtcgagatggtaacgataaacctttctggcttgtccataagaaagacaaagttactgttttcccgccagaacccgtgaatattgagcagctgaacaatgagctcgacgctctattgaataagcaagacggttga

SEQ ID NO: 7273 - RNA, 1491 nt, synthetic construct
  source 1..1491: mol_type = other RNA
atggataaaaccgagattgcagctttggcccaccgtatggagagtaaggatgacattctggccttactcaatcatctcaagcaagacgagatggaagaaatgggtcagattgacaaattctatcccttcacaatgaagcacatcactttttactgtaaccccaaccacacgtttcacaggtataagcagttcaagatcaaaaagaagtccgacggctatagacagatcaccgcacccaggaaccaatcgtttatgcttctcttgagatacgtgaatgagatatttaaagctgtgtacagcccctcagactacgcgatgggctttaccgagcagcggagcgttgttaccaacgctaacgtgcataagggccagaattatatcttcaatatcgacctcaaggactttttcccttctatcgagcaacctcgtgtctggaagaggttgcagctggagcccttcaatttccccataccagtggctaacgttctagcaggaatctgcagcatgaaggaaacccgcactctagagaatggcacgaagaaggacttttatgtactgcctcagggcgcccccacaagcccaatcatcacaaatatgatatgcgacactctggatagacgactggccggactcgccaagagattcggtctgcggtacaccagatatgccgatgacatcaccttttcttctatgcacaacgtctaccaaaaggatggtgatttccggaaggaactggtgaggattattcaatcccagggctttaccatcaatgagaaaaagacacgcctgcagaagataggaggcaggcaggaggtcactgggattatcgtgtcagataaacttaacgtaacacagaaatacgtccgggacattcgaaatattttgtacatatgggaccgatatggatacggggtaacatactcaaaattcttcccgaagtataaggaggaaaaagggcatgtaaagaagggaaacccagacttagtgaacgtcctagatgggaaactgatgtacatgaagatggtgaaaggtgaaaatgattcagtgtacaaacgcttgcacgataaattcgaaaaactggtgagagaaactcgcgatcctttaaaaacgaccgctcacagcattacttacgtggagacaacaccactgctggattttgaaaagcaaaataccaccgaggttatcattactgaatccgagactagcgtcgaacagacaatgaccgattccggggagcaggcacgcccacatcggtatgcctatttcatgcttgatggcaagaagatttttgcgagtgtcaacaacggcattaaacctgagatggaaaaacggaaagaacagctctctattagtatctgtagggacaagaacgacaaacagttttggcttatccacctgtccaaaaaggtgacggtgcctccattcgagccgatagacgttgacgagcttaataaagagctggacgccctcctggatatcggacatgggtga

SEQ ID NO: 7274 - RNA, 1191 nt, synthetic construct
  source 1..1191: mol_type = other RNA
tatgctatgggcttcgcagagggtcgatccgtcgttacaaacgccaacgtgcacaaaggacagaactacgtgttcaacatcgacctcaaagacttcttcttttccatagagcaaccaagagtgtggaaaaggctgcagctgaagccctttaatttccctcttcccgtggctaatgtcattgcagggttatgtagcatgaaggaagtgagagagctggaggatggtacgaaacaggaaatatttgttttgccacagggcgcgcccacctccccaatactgaccaatatgatctgtgataagctggaccaccgtctggccggactggccaagagatttggtcttcattacactagatacgccgatgacatcaccttttcttctatgcataatgtgtatcagcctaaaagcgaattcatgaaggagttacaacgcattattctggatcaggggtttcacattaacaacaaaaagacacggctgcagaagttgggaagccggcaagaagttacaggcatcattgtctcaaataaactcaacgtgacgcagaagttcatcagggatatccgcaacatcctctatatgtgggatcgctacggatatagcgtggcctatagcaattttttccccaagtacaagaatgagaagggccatgtaaaaaaggggaatccggacctcattaacgttatttgggggaaactgatgtacttgaaaatgatcaagggcgaagaggactcggtgtataaaaggctccacgacaaattcatttcactagtcgaaaaaaccttcgacgagaacaaaactaccgatcaacatatcacttatgtagagactacccctatatctgagtttgagaagaggaataatacacagatcttcatcgagatttctcagccatacgtggagctcgaaaaagatgagaataatcccgataagactaaggaagtggaaaagacaagtcaccgatacgcgtactttatgcttaacggcaaaaagatttacgcttccgtgaataagtgcatcaaaaccgaagaggagtcaaagaaggattatctggcaatctccacctgccgggacgccaaggggaaaccgttttggctggttcacaagatagacaaggtcacagtacctagtcagcttgctgtcgacatcgatgaactgaacaacgaattagacagtctattgaacatgtga

SEQ ID NO: 7275 - RNA, 1524 nt, synthetic construct
  source 1..1524: mol_type = other RNA
atgaacaaagggaaaataataaagtatgccactgtgatgcagaccaaggtggacctccttaagttgctgaattccatcaagaaaatggaacttgaggattgtggcctgagcaaggaattccatccaatcactatgaagcagctgaattattactgcaacccaaaacacacctttcacaggtacaagcagtttgtcatacccaagaagacaggtggaaagaggattataacagccccgcagaaaggttcattcagattaatgttgagcgctctgaaccagcttttcaaatttttgtacacaccctcagattacgcaatgggctttaccgaaggcagaagtattgtgacaaatgccgatgttcacaaggggcaaaattacgttttcaacatcgacctgaaagacttctttccttcgatacgccagccgcgtgtctggaagaggatccagctccccccattcaatttcactaaagaggtggccaatgttatcgctggtctttgcagcatgcaaattaaaaaggaggatggaacgttggactatgtattacctcagggggctcctaccagtcccattatcacaaatatgatttgcgacaagctagaccgcagactggctggacttgctaagcgctttgggctgcattataccagatacgcggatgacatcactttttcttccctgcattacgtctatagcctcaatggggaattccgcaaggagctggagcgaatcatcgccgaccaaggattcaccattaacgataaaaaaacacgtctccagacgcgggccatgcggcaagaagtgactgggatcacggtcagtgataagttaaacgtaacacagaaatacgtacgagagattcggaatctcttatacatctgggaaaagtatggctatgttgatgcagtgagcaagtttctaccaaagtataaggtggaaaagcagcgaaaaggcaatcctgatctgattaacgtgctgtctggaaagctgctctatctgaaaatggtcaagggcgaggaagacagcgtctatatcagactctcacagaaattcaacaaactggtggcagacttcatggacgtgacccggagatcagccactggcctcatgtacattaagacatacactatcgacgagtttgagaagcggtttaacaccaaaatcaagatcgagactttcgagacaaacacaaaagagaaggagattaacgtgaaaaccgagaacgaaggccaggcaaaaaaaaagacccacaggtacgcatctttcattttgtccaacgaggagggcgaagatatcaagcagaacataagtattcggaggaatgttaagtggaacgacgaccccaagaccaaacgcaaactggccgtatctcaatgtcagaagggtaatgccaaacctttttggcttctacactacagggctgaaaaacaagcggtggaacagaaggatgtctccatcgaggacctgaacaatgtgctggacaatctcttgtccactctggatgatggaacgaccatttcttga

SEQ ID NO: 7276 - RNA, 1449 nt, synthetic construct
  source 1..1449: mol_type = other RNA
atggataagactagaatcgcacggctggcccatctgatgaaaggcaaagatgatctgctctccctactgaatgacatcaagcgagatatgatggctcaggccggtgccggcggatcattttatccgttcaccatgaagcacataaactactattgtaatccagggaacacatggcatcggtacaaaagttttcagatctccaagaaaagcggaggtacgagacaaataacagcaccccggaatgaatcttttaagctcattctccgctgcctcaatgagcttctcaaagccgtgtactctcccagtgcgtatgcaatgggcttcaccgagggtaggagcgtagtgacaaacgctgaagtccacaagggcatgaattatgttttcaacatcgatctcaaggacttcttcccctctattgaacaggccagggtttggaaaagattacagatcgcgccatttaacttcccagtccctgtcgcaagcgttatcgcggggctgtgttctatgcaggacgcccggactatggacgatggcaccacagccgtgaggtatgtgttgcctcaaggagcccctactagccccataatcactaatatggtttgcgacaaactggacaggcgtctggcaggtctagccaaacgctttggggtgcgatacacacgatacgccgatgacataaccttctcctcaatgcacaacgtttaccaggtgggcggggaatttcgtcaagagctgcagagaattatcgctggccagggctttaccatgaatgaggctaaaactcgtcttcagaagcggggagccaggcaagaggtcacaggtattgtggtcaatgataagctgaacgtgacccaggcttacgtacgcagcattcgcaacatcttgtatatctgggacagacatggttacggcgtggcttatgccaagtttttgccagtgtataaggccgataaggggcatgttagaagagggaaccccgacctagtgaatgtgattgatggaaagcttatgtacctgaaaatggtcaagggagatgctgatagcacatacctgcgactccgcgccaaattcgataagttgtccggcgacgtgcatgaccccagtaagaccacggaccacgccattacatacgtggaaacgaccccactgcctgagttcgagaggcggaatgccactaccgtggtcatcgctactcccgaaccgtgtgacggcggagctgcagctcacaggtacgcatattttgagattggggggaagaaggtatatgcgtccgtcaacaaagctgtcaagcctgaagatgagggacggaaggatttactgtctatttcgtcctgccgcgacaaagatgacaaaccattctggttagtgcacctgtcatcaaaaactgtgacccctgcactcgtagacgttgacgcactgaacaccgagcttgacagtttgcttgactga

SEQ ID NO: 7277 - RNA, 1341 nt, synthetic construct
  source 1..1341: mol_type = other RNA
atgaataaagaactattccttgaggagaaatacatcaagacgaagaagaagtacagaaagatagtaacatacgtggacggcgagaacttgcttagagagaagcacgaacggatcgtctcactgctcaagcaggaatgcagtgactcaatttttgcgaaagcttatattgagcacagcagcattgttaagaacgcaaaagcccacatgtataatgatatattcctcttcttcgacgtgaaggacttttttccatctatacaccaggcgcgggtctggaaaaggctgcagctaaagccactgttcttcaaacaacctatagccaatattctggctggactgtgttctatgaaagagaaagctgaagacgggagcatcaggtacgtactgccacaaggcgcccccactagtccagtcatcaccaacatgatttgcgacaatctggatcgccgtctggccggtttggccaagcgatttggtgttgtgtactcacgatacgccgatgatatcactttctcctccatgcataacgtgtataacacaagcggggaatttaggaaagaactgaaacgcatagtggaggggcagggcttcaccatgaatgaggcaaagacacgtctccagaaacttggcagtcggcaggaggtgactggcatcatcgtgtctgataaattaaacgtctcccagaagtatgtcagagacatccgaaatattctttatatctggcgcaaatatggatacgacactgccttcaacaagttttttcctaagtataaggaggccaaaggccatgttaagaaaggaaaccccgacatggtgaatgtgctcgatggtaagttgatgtacctgaaaatggttaaaggggaggacgattcagtatgtaaaaggttgagatcccaatttgatgaactctgtaactcgctgcacgacgatacgaaaactactcaacaaggaatcacctacgtggaaacactacctgtgctggaattcgagcgcaagcacaacacaaccattgccatcatgaccacgaaaccgaaggaatttttcattgtacagaagaatcaggaagctaccgaggatacccagaaatccatttctgaaaacttcatcccccatcggtacgcaagctttaagcttggagggagaatgcagaaagctagcgtcaataagagtctcaagaaggaggaggagacacagaaagatctcttatccatctctaactgccgggacgcaaagggcaagttgttttggctggtgcataggagcgacaaggttaccgtgccgcctgcaaagcccgtcgatattgacgagctgaatgatgacctggacaagctcttaaattga

SEQ ID NO: 7278 - RNA, 1500 nt, synthetic construct
  source 1..1500: mol_type = other RNA
atggataagaatagcattagcaaggccacacaacagctggaaaccaaagaggatctgctccgactgcttaaccaaatcaagcaggatgagatgacagagtacggtatgtccgataagttctacccctttaccatgaagcacttgaactattactgcaatccgaataactccttccaccgttataagcagttcaagatcaagaaaaagtccggggggtttaggctgatcactgcccctcggaaccagtcatttatgctgttgctgcgctacgtcaatgaggtgtttaaagctgtgtacaccccatccgattacgcaatgggcttcactgaaggcagaagcgttgttaccaacgctaataaacataagggtcacaactacgtgttcaataccgatctgaaagatttctttccttccatacatcaggcacgcgtgtggaaacgacttcagctgaaaccactgctcttcaagcaatcaatcgcaaacatacttgccggactctgctccatgaaggagaagacagaagacggaaatataaagtttgtcttacctcagggcgcgcccacttctcctattattaccaatatgatctgtgacaacctcgatcgcagactggccggactagccaaaaggttttccgtggtgtattcgagatacgcagatgacatcactttctcatcaatgcacaacgtctaccagacttcgggggagtttagaaaagagttgaagcgaattatcgagagtcagggctttacgatgaacgaagccaagacccgcctccagaagtttggcagccggcaggaagtcacagggattattgtctccgataagctaaatgtgagtcagaagtatgttcgggacatcaggaacatcctgtacatatggcataagtacggctatgacacagcgttcaacaaatttttcccgaagtacaaagaggccaagggacacgtaaaaaaaggtaatcccgacatggtcaatgttctggacggcaagcttatgtatttgaaaatggtcaagggagaagacgatagtgtttataaacggctgcgctctcaattcgatgcactctgcaattctctacacgacgacactaaaacgactttgcagggcattacatatgtggagacgctccccgtgctcgagttcgaaaaaaagaataacaccactatcacaatcgtaacgaccaagcctaaagagttctatacagaacataccagccaagaagccaccgaggacacacaaaagtctatatctgagaatttcatcccccacaggtatgtatcattcaaactgggagggcggatgcagaaggctagcgtgaataaaagtttaaagaaagaggacgaggaccgtaaggaacttttaagtattagcaactgtagggacgctaaagggaaactcttttggctggtgcatagatctgacaaagtgaccgtgagcccagctcagccagtagatattgacgaactgaacgacgatcttgataagttgctgaactga

SEQ ID NO: 7279 - RNA, 1452 nt, synthetic construct
  source 1..1452: mol_type = other RNA
atggataagaatgatatcgctaaagcagcccagttgctcgagacgaaggaggacctccttcacctgctgaacaaaatcaagcaggatgaaatggccgaatgtggcatgtctgacaagttctacccctttaccatgaaacatctcaattactattgcaatcccaataactcctttcacaggtacaagcagttcaaaataaagaagaagagcggcgggtttagactgatcaccgctccacggaaccagtcattcatgctactgctcaggtatgtgaatgagatctttaaagccgtgtacaccccttcagattatgcaatgggattcacggaaaatcggagtgttgtaacaaatgctaatcttcacaagggccgtaactacatcttcaacattgacctgaaagatttctttccctctattcatcaagcgcgcgtgtggaaaaggctgcaactgaagccactgtcgttcaagcagcctattgcaaatgtcgtggccgggctctgctctatgaaggaaaagatggaagacggtagtattcgctatgtgttaccgcagggggctcccaccagccctatcatcactaatatgatttgcgataacctggatcggcgactggctggactagccaagcgatttggagtcgtatactcccggtatgccgacgacattaccttttcaagcatgcataacgtctatcaccccatgggggagttccggaaagagttgaagagaattgtggaatctcaaggcttcgtgatcaacaaggataagacccgactgcagaaactcggctccagacaggaggtaactgggattatcgtgagtgacaaactgaacgtttcccagaaatacgtgagggacattaggaacatactttacatatggagaaagtacggctatgccaccgcatttaacaaatttttcccacgctacaaagacgcaaaaggacacgttaaaaaaggcaatcctgacatggtgaatgtgttagacggtaagttaatgtatctgaaaatggtgaaaggtgaggacgattcagtgtatatgcgcttgaagacacagttcgatgagcttcggcataagctgcataacacaagccaagcgactccacgcggaataacatacgtcgagacaacccccgttttggaatttgaaaagaagaatggtgccacgatcgagatcactcgctccaaaccgagtgagaaggccatcgaaccatttgtcagccacagatacgccactttccctcttggcggaaagagacagtgggcgtctgtcaacaaaacacttaagccagaggaagaaactcagaaggatctcttggcaatcagccactgtcgtgacgctaacgggaagctcttctggctgattcaccgtgctgataaaatgatggttaggcctcccgagtccgtcaacatagacgagctgaataaagagctcgacgatctactggcctga

SEQ ID NO: 7280 - RNA, 1431 nt, synthetic construct
  source 1..1431: mol_type = other RNA
atggaaacaaaggaggatctacttgatctcttaaacaagatgaagaaagatgagatggccgaatccggcatgtctcacaaattttttcccttcactatgacctaccttaactattactgcaaccccaacaatacgtttcactgctacaagcagtttaaaatacgaaaaaagtccggtgggtttaggcagatcaccgcaccacgcaatcggggcttcatcctgctgctgcactatgttaatgagatattcaaagcggtgtactcaccttccgaccatgctatgggatttacggagggcagatccgttgtaacaaatgccgggatgcataagggacagaattacgtgtttaacattgacttgaaagacttcttcccctcaattcagcaggcgcgggtatggaaaaggatacaactgaaacccctttgtttcaagcaatctattgcaaacatgatcgctgggctgtgttctatgaaggaaatcctcgaggacgggagcaatcgctatgtattgccacaaggagcccccacatccccgattttgactaatatggtatgtgacaaactcgatagacgactggctggcctagccaaaaggttcggcttgaacttttcgaggtatgcagatgacattaccttctcgagcatgcacaatgtgtatcaggggaatggtgagttccgcaaggagctgaaaagaatcattgaagatcagggattcaccataaacgaggcaaagacacgtctgcagaaactaggcagtagacaggaagtcacagggatcatcgtgagtcataagttaaacgtgactcagaagtacgtcagagatatccgcaacattctctacatctggaaaaagtatggatatagcactgccttcaacctcttcttcagtaaatacaagcaggacaaaggccacgtgaagaagggcaaacctgatatggttaatgtgctcagcggcaaattaatgtacctgaagatggtgaagggtgctgaggattcagtgtacgttcggcttaggactcgcttcgatgagctgaccattgcccttaaggatgcgcacaacacaacaacccaaggtgtcacctatgtggaaaccatacctctgctggagtttgagaagaataaccacaccgatgtcgtgatcacgacatttaaagctcgggaggaggtgaacgccgaggacgaaaataaggtgatcgcacaccgttatgcctactttaccctggggggacataaagaactcgcttccgtgaacaagtctctgcggagcgaagaagaaaaagacaagagccctctgtcaatctcctcttgccgagacgccaagggaaagccattttggttgattcataggagcggcaaggtcgtcgttccgactctgtctccagtcaatattgacgaccttaacaatgacctcgacactctgctcagtatctga

SEQ ID NO: 7281 - RNA, 1449 nt, synthetic construct
  source 1..1449: mol_type = other RNA
atggacaagacccatatcattaaacactcgttgcagctgcaacagaaggaagacctcctcaatcttttgaatcagctcaaattcgatgaaatgaatgcgatagggatcggcgacaaatatcatcctttcatccttaagcatatcgattattactgcaacccaaataacacgtttcaccgctacaggcaattcaaaatcaagaagaaaaccggaggcttcagggaaatcactgctccccggaaccgcagttacgttctactgctgcggtacgtcaacgagatcttaaaggccctgtacatgccttccaaatacgccatgggttttacagatgggagatctatcgctacaaacgcaggtaagcacattaacagtaactacatcttcaacattgacctcaaagatttctttccgtcaatcaatagggcaaggatcatcaaaaggctccagattcgcccttttaatttcagcccaaagattgccctcctgattgccggtttgtgttgtatgcgtaaagaactactctctgacgacgggaagatcttttacagttatatattgccccaaggagccccaacatcccctattattacaaatatgatctgcgacaagctcgaccatcagctggctgggttagcaaagcgattcggtttaacctacacccgatatgcagacgatattacctttagcagcaatcacaacgtgtatcacgataatagcatctttagaaaagagctggagcgaattataaagtcccagggctttaacatcaacgaaaagaaaacccgtttgcagaaactaggacatagacaggaggtgaccgggattattgtgtccgataaactgaatgtgtcacagcactatgtgcgggatattcgcaatatactgtacatatgggatagatacggctacaacatcgcttatgcaagattctttagcaagtataaagcggagaaaggccacataaaaaagggcaatccaaacctgattaatgtacttgacggaaagcttatgtatctgaagatgataaagggagagaaggactctgtctatcagcggctttattccaagttcaaaatgctgagcaattacatcgacaacaataacccgatctcaccccagtccgtcaagtatatagagacaatgacaattagcgatttcgaaacgaaaaacaacactgagattgtgttcaagatcgacgataataactcaactcccaagcggtccgcctactttactctgaatcgcactaagatctctatctccatcaagaagaacataagcaactcaaaactgaacaaagagcacctggccatctctacttgcatcgacgctaataacaggcaattttggctcattcatccaattaacgttgaaagaaccccttctcccattgatattgatgccctgaataatgacttggagagtctgcttaatctgcagtacggctga

SEQ ID NO: 7282 - RNA, 1446 nt, synthetic construct
  source 1..1446: mol_type = other RNA
atggatcgtaagcagatcgcacagcaggcctcccaactcaaagacaaaggtgacctcttgaacctgcttaatttaataaagaaggcggaaatagaggatatgggcttcgattcttctatgtatcaccctttcactgagaagcagttgaacttctattgcaaccccaaccacacatttcatagatatcggcagtttaagatcaagaaaaagtcagggggaacccgccaaattacagctccccggactcagagtttcatgatgatgttgagtgcagtcaatgagctctttcgaagcatctataccccttcggaatatgcgatgggctttaccgacgggcgcagcgttgtgacaaatgcgagcgcacatctgggcatggattacatcctgaatattgacctaaaggatttctttccgtcaattcatcaagccagagtgtggaagagattacaagttccaccatttaacttcaaccagccagtggccaacttactggccggcttgtgttgtatgaaggaatcttgcgaggacgaaaatggaaacaaaaaggacgtgtttgtacttcctcagggggctcccacctctcccattatcacgaatatgatctgcgacaagctggattactacctctcccgactcgccaaaaggtttaacatgaattataccaggtacgctgacgacattacttttagcagtatgaggtacgtatattcaaagaaaggtaaattcgtgctggagctcgagaggattattaaggagcaaggattcacaatcaacgaggcaaagacaagactgcagaaaaggggtgatcgtcaggaagtgaccggcataatcgtcagtgataagctgaacgtcacgcagaagtacgttcgcgacgtaagaaatatactctacatgtgggaccgctacggatacaatgtcgcttatggaaaatttttccccaagtataaggaagagaaaggccacgtcaagaaagggaatcctgacctgattaacgtcatagacgggaagttgatgtacctgaagatggtgaaaggtgaaaacgattccgtgtacgagaagctgcatgccaaattccagaagcttgctaacaaggatgtgatttccgagaaaaccaatagcaaaggcgtaacctacctagaaactatcggcgtcaaagagttcgagaagaagaatttcaccacagttacatttgccatctccgagaaaggaaaacactatgcttacttcatgctgaacgataagaaaatgctggtgacggtgaataagactctgactatcgaagaagagcaggataaagacgttctcgcaatctctagctgccgggggaaagacgagaagcctttttggcttatccaccggaaagataaagtgatggtgccaccgccacccgccattgatgtggacgaactgaacgccgaactagactcacttctgaatacctgttga

SEQ ID NO: 7283 - RNA, 1464 nt, synthetic construct
  source 1..1464: mol_type = other RNA
atggaccggaactacatcgcccagcaggcggctaagatggaaactaagcatgatctgttgagcctgcttaatagaatcaaaatctcttggtttgaggatatgggaatgacggtcaaattccatcctttcaccatgaaacagttgaactattacagcaaccccaaccataccttccacaggtactcccagtttaagatcaagaagaaaacagggggctttcgccagattacagccccccgctcgaaaacattcaagttaatgttgatgtgtctgaacgaaatgttcaagagcatttatagtccaagcgattttgctatgggctttacagaaggacggtccgtggtgtcaaatgcatcaatacacaaggggcagaattacatcttcaatatcgacctgaaagactttttccctagcatttatagagtcagagtgcgagcacgtctccaagcaaaaccattttgtttcaatgagaacatagctatgctcctcgctggtctttgcagtatgaagatctcttcaggccataacgatgggagggattacgtcctcccacaagggagccctactagtcccataatcactaacatgatttgcgataacctcgatcgcaggcttgccgggctggcaaagcggttcggtttacggtacagtcgatacgctgacgacatcacctttagcagcatgcataacgtgtatcagaccaatggtgagtttagaactgagctccggcgaataatcgaaggccaaggcttcactatcaatgaagcaaaaacccgcctgcagaaacagggctccaggcaagaagttaccgggctgattgtctctgacaaactgaacgtgacgcagcactatgttcgcgacatcaggaatattctgttcatttgggaacactacggttataatgcggccttcacaagatttttccccaggtataaggcggagaaaggccacgtaaaaaagggagtgcccgacctgattaatgtgcttgacggcaagctcatgtatttgaagatggtgaagggagcagaagactccgtttacatccgtctgttctctaaataccggaccttagccgataaggctcacagtatagataacaccacagaacacggagtaacttatgtggagactattcctctgcacgactttgaggtcaataactcaaccgaggtaattatcgattgggtcgtcccaacctccgatgacgagaatggccagccgaagccaaagaggagaacggcttcatttacactggacggaaagagagtttacgcctctgtaaataagaacgtgaagaaagaggacgaacagaaaaaagagctactggccatttccaattgccgcgatgccaagaacaagcaattctggttgattcattacgtgaataaagtgacagtgccgcctgccgaacccgttaacatcgaggagctatccaatgagctggacgcccttctaaactcttga

SEQ ID NO: 7284 - RNA, 1425 nt, synthetic construct
  source 1..1425: mol_type = other RNA
atggaccgagagtttattataaattatcacggggactttctgaccctgcttaacaaggtgaaaaaggtgatgctggaggagaatgggatgggggacctatttcatccattcagtctcagacagatcacttactattccaaccccaaccacacgaagaatcggtatcagcagttcgagattaaaaaaaagaccggtgggatgaggcttattactgccccacgcaacaagacatttaagatgatcctgcagtgcctcaacgaaatattcaaagcaatctacaccccctcagactacgcaatggggttcacagaaggccgcagttcagttacaaacgcttcaatccataaaaaccagaattacgtgttgaatatcgaccttaaggatttctttcctagcattacgcagtcaagaatctgtaatcggcttcgtactaaacctttcgaattcccggataaaatagctctagtcatttccggcctgtgttgcatgaaaataacaaccaaggatgaaaatggcaatgatgtagtaaggtatgtgctgcctcaaggagccccaactagccctgtcatcaccaatatgatctgcgacaaactggatcggcgcttagccggggttgctaagaggtttggcctgaagtactctcgttatgccgacgacattacttttagctccatgcataacgtctaccaaaaggacggcgagttttggaatgagttgaatcgcgtgattaccgctcagggattctctatcaatgagaagaagacaagactgcagaccaaacgaatgagacaggaagtgactggcatcgtggtaaacaagaaactcaacgtgctgcagaaatacgtgcgcaacattcggaacatcttgtatatctggggcaagtacggattcattgctgcgcagtctaggtttctgcccaaatacaaagcagacaagggtcacgtcaagaagggcaatcctgatatgataaacgttctcgagggaaaattgctgtatctgaagatggtcaaaggagaggacgatagcgtttatcaaaggctccgggagaagttcgatagattgaagaatgacgcactgggaattttaaagaccaacaccttttccaacgtgacatatatcgaaactctcccactttcggattttgaaaacaagaacggtgaagttgtaatcacctacagcgaaaaaaagcacaaacgatacgcgtacttcaatctcgacggcaacaaaaagctcgtgtctgtgagcctagatattacggaggaggaagagaaagccaaggacaatttcgccatttccctgtgtcaagacgccaagggtaagaggttctggctgctgcacaaaaaaacaaaggtcacagtgccgacccccaagcccgtcgatcttgatgagctgaacaacgacctcgatagtttgttaaatatctga

SEQ ID NO: 7285 - RNA, 1452 nt, synthetic construct
  source 1..1452: mol_type = other RNA
atggtgaagaacaccatcgccatgcaggcccggcagattacgtcaaaggaagacctgcttaatctgctaaaccggatgaagatggacgaaatggcagagagcggcatggccgactccttctgtccctttacgatgaaacacataaactattactgcaatcccaacaatgtcttccaccgctacaagcagttctgtatcaagaaaaagtctggaggcacccggcaaatcacggccccaaggaataaatcattccgactgatgctgcagtacgtgaacgagatattcaagtcgctgtacgaacctagtgactacgctatgggttttactgaagggaggagtgtggtgactaacgcgaatatacacaagggacaaaactacgtatttaatatcgacctcaaagacttcttcccttccattgaacaggcacgtgtttggaaacgtctccagctggagcccttgaatttacagaaacaggctgctaatctcctggctggaatgtgtttcatgaaagtgtcctccgaagatggggctgtcaagtttgttttgccgcagggagcccctactagtccaatcttaacaaacatgatttgcgataagcttgacagaaggctggggggcctcgcaaaacggtttggcctgcactatagtcgttacgccgatgatataacctttagcagcatgcacaatgtctacaaaatggatggagcgttccgcaaagagttggagcgcattattaacgaccagggctttaaaatgaacccggagaagactagactgcaaaagctcggggccagacaggaagtaacagggctcattgtctcagataaacttaacgttacccagaaatatgtgagggatattcgaaacatcctgtatatttggagcagatacgggtacgatactgctttcaacaagtttttccctaagtacaaggctgaaaagggtcatgtcaagaagggaaaccccgacatggccaatgtactggacggcaagctcatgtatttgaagatggtgaaaggcgaagatgacggcgtgtatctcagactgaaaaccaaattcgatattcttgccagaaggctgaacgacacatccaatgcgtctgcccgcggtgtgacatatgtcgagacaactgcactactggactttgagaagaaaaatggaacatctatcgaaatcactatgtctaagcgcccagagaatgccaccgagtcatttacaccccataggtatgcaatctttacccttgggggtaaaaaccatatggcttccgttaataagaccttgaaacctgaggaggagaagcgcaaagatatccttagcataagccactgccgggatgcaaagggcaaacaattctggctgatccatcgaaccgacaaggtgatggtgcggccagacgagctggtgaatatcgatgagctcaacaaggaattggacgatctattatcttga

SEQ ID NO: 7286 - RNA, 1227 nt, synthetic construct
  source 1..1227: mol_type = other RNA
atggacagagaggagatagcgaacacaatccgtttgatcgaaacaaaaaacgattttctggagctgctgaaccgaattaaaagagagaacatcgatttcgcagacaaccaggatcagaagacctatccatttaccatgcggcaacttaacttctacataaaccccaaacataccacaggcagatacaaggagttctacatcaagaagaagtcaggaggcatgcgtcggataacggcaccacgcacaaaaacctttcaattaatgttaagcgccgtgaacgagatcctcaaagccgtctacgtgcctactcagttcgccacaggttttgtggaaggccgctctatcgttgacaacgctgtcccacaccagaatcagtattatgtgttcaacacagacctgaaggactttttcccgtctattgatcaggcccgcgtgtggaaacgcctccaagtgaagccttacatttttcccgaaaagatcgccaatctcatcgctggtctatgctctatgcaaatgatctccaaagaagatggagaagacactataaggtatgttctaccgcagggagcccctacgtcacccattttgaccaatatgatttgtgaaaggctggatcgacagctcgctggtcttgcaaagagatacgggctgcggtacacccggtacgcggatgacattaccttctcgagtcttcacaatatttatcaggagggaggcgagttcagaaaggaactggagcatatcatcaaagagcagaggtttactatcaacaatgagaaaactcgactgcagaaggccggcgagaggcaggaggttactgggctcgtcgtaaaccaacgggtcaatgtgccaaatcagtacgtgcgcaatattcgtaacttattgtacatttgggacaggtatgggtatgatgttgcttacaattgctttctgcctaagtatcagaaagaaaaaggacacgtaaagaaagagaagccaaatttgagcaatgtgatcgaaggtaagctgctgtatctcaaaatggtcaagggggagaacgatcccgtttacagaaggctgttcgacaagttcaattcccttaccactcccgaccatgcacaagagattgaaatgtccgaaggcgtaagcatagagcagcttgtggctctcatggaacctgacattagtgacatcgataagctgaacaatgatctggacgaactgttgatgcggagctatggcgggtga

SEQ ID NO: 7287 - RNA, 1200 nt, synthetic construct
  source 1..1200: mol_type = other RNA
atggaaaagaaaattttggcaacaaaggtgcgaagtctggccacagtgggagattttttgaccttactcaaccagatgaaacgcgaagatcagggagttgaggaggacccccatcccttcactctcaagcatatcaactactacagaaatccctctcacgagggaagatataggtcatttaagatccctaagaaaagcggcggttgtagggtgatcagtgcccctaggaataagacctttaggttgatccttcgctacgtaaatgagatgctcaaagccctgtataccccaagcgaatacgctatgggtttcgcagaaggcagatctgttgtcactaacgctcagatccacctacggcagaactacgtgttcaataccgacctgaaagacttctttccctccgtggatcaagctcgcgtgtgggctagactacagattaagccgctctccctccagcgaccaattgcggggattattgccggactgtgctctgtcagactggagacagacgaaggaactgtgcgatatgtccttccgcaaggggcccctaccagcccaatcttgactaatatggtttgtgatactctggatcgccgtctgggtggcgttgcaaagcgctttggtctgcgctattcaagatacgccgatgacataaccttctccagtatgcacaacgtatacgaggtggggggcgatttcagatccgagttgcggaggattgtcgaagaccagcgatttgtcatcaacgagaagaaaacgcgcctccagaagcggggggctagacaagaagtgacagggctcacggtcggtgagcgtctgaacgtgccccaatcgtacgttcgggggattcggaacttgctgtatatctggaggaagtatggcgagggcgaggcgagggctcggtttgaagagagctatatggccgaaaaggggcatctacgtgagaaatgccctgacatgatactggtactggagggaaaactgtgctacctgcggatggtcaaaggccccaacgattcagtgtacaggcggctgtccaccgacttcgaccgacttctccacgcggatgagggcgctgtggagcctcttccatctggcggagaaaggctgttagccgaaggcttagcacttacagcaagcgccccagtggatctcgaagccttaaatttcgacctggaccagcttctgaataatgggtga

SEQ ID NO: 7288 - RNA, 1611 nt, synthetic construct
  source 1..1611: mol_type = other RNA
atggacaagcagaccgtgattaataaagcacaggacctggaaacacggcatgatctgctgaacctcctgaacgagatcaaagcggatatgcttggaagtgccgcctaccccttcagcatgaaaaagttactgattctttgtaaccccaaaaacgacggggataagaagcaggagaggtacaggaccttcagtattccgaagaaaagcggaggtgagagaactatctccgctccctgtggaaaccttaaatggatgcaactctgcttgaacgagatattcaaagctttgtatacatccagtccatacgcaatgggattcgccgaggggcgctcaatcgttgataatgcacggatgcataccaaccagaattatgtgttcaatatcgatctcaaagacttttttccctcaattgaccagaccagggtatggaaacggttacagcttgccccgttcaatttcaatccaaagatcgcctccattatcgccggcttgtgcagcatgcgcactattagataccgtgagaacctaccttttgaggaagccttcgtgctcccccaaggtgctcccacatctcctctgctgacaaatgctatctgcgacactttggatcggagattacacggcttagcgaagcggtttggcctgcattacagtcgatacgccgacgatatcaccttttcaagcatgcacaatgtgtatcagcccggctcggacttcagaaaggagctggagaggataatttttgaccagcgctttacgatcaacgccaaaaagactaggctacagcactgttctgttcgacaagaagtgacgggaatcactgtcggccagaagctgaatgtgacccgcaagtacgtcaaagacgtccgagcgattttgcacatatgggagaagtatgggatcaatgcagcctacgctaccttttatccgcgctataaatccgagaagtgccagctccatcgaggcgaaccaaacctggaaaacgtcatcagcggtaagctttgctatcttaagatggtgaaaggggagacagatccagcatacgcaaggctaagtgcccagttttctcgtctcactagctccgcaaatcctacccagaagcctcgcgacattgactatctcttcacaatgccactgcttgcttttgaaaaaaagttgggatgtaagctggaatatagaacaaggacgcatgacaacaagccttacgcctgtttccacttccaagacagatttttcgtggtcgccgtttcaaaaaatttggatgtgaacaacctccctgaaaacgtcgaaatatccctcacccggatggcggttccaattccattctacctggctccaggtgagcctatccccgaggtgaaacctaccaaggctcaagttggctacctgctccacaagccctatactgggaagaagcgtaaagcagtagataatgatcaatccgcttcaacaggggtgcctgactctctgagagagtttgtgctcgatctggctaccaagtttcccaaactgcagctacaggacgaaatgggcataattgccggccagcaggaagacgatatgctgtctcggctggtagatagcaatttcgatctgtctatcctgccatga

SEQ ID NO: 7289 - RNA, 1617 nt, synthetic construct
  source 1..1617: mol_type = other RNA
atggacaaacagactataaaggaaaaggcgaaggcgctggagactaggtttgatctccttaacttactaaatgaggtgaaagccgaccttttgggcagcacagcctatcctttcactatgaagaagctcctgatcttttgtaaccctaagaacgacggggagaaaaagcaggagaggtatcgatcttttagcatccctaaaaaaagtggaggtgagaggacaatctctgcaccttgtggcaatctgaagtggatgcagctgtgcattaatgaaattttccaggccctctactcccccagtccctacgcaatggggttcgctgagggtcggagcatagtcgataatgctcgaatgcacacaaaccagaactatgtctttaacattgatcttaaggacttcttcccctctatagacatcaaaagggtctggaatcggctgcagagagcaccctttaatttcaatgcaaaggtggcctatactatcgccggattatgtactatgcgtacaatccactatcgtgaggatctgccttttgaagaggcattcgtgcttccacagggagcccctaccagtccactgctcacaaatgccatttgcgatacattagatcgcaggctgcatggactggcaaagagatttggcctccattactctaggtatgctgacgatattacattcagctccatgcataacgtgtaccaaccggatggcgatttcagaaaagagctcgaacggataattaccacgcagaggttcatgattaatgctaagaaaaccagactccaacactgcagtgttcgccaggaggtgacagggatcaccgttggccagaaattgaacgtgtctcgaaagtacgtgaaggatgttcgagctatccttcatatctgggagaagtacggaatcaacgccgcctatgccaccttttaccccagatataagagcgaaaaatgccagctgcaccgtggtgagccaaacatcgtcaatgtcatctcaggcaagctgtgctacctaaagatggtaaaaggagaaagcgacagtgtctacacgaagctcttcgcgcaattcactcgcctaacctctaccgaaaaaccagttactaagcctaatgacatcgactacctgtttaccatgcccttgatagcgtttgagaaaaaacttgggtgtaagttagaatatcgcacgcggtcacatgacaacaagccttacgcctgttttaatttccaggatcggttcttcattgtcgccgtatcaaaaaacatcgacattaataacctgcccggaaatgtggaaatctcattgacccgcatggctgcaccattgcccttttatgtggctgaaggggacccgattccagagattaaaccaactaagattcaggtaggttacctgttgcacaaacactataccggcaaaaagcggaagaatgagatagtgacaattacctccgatgagtccaacgacgtttcggatggcctgcgcgaatttgtgctcgggctcgctgagcaataccccgaattccagtttagagacgacatgggcatcatcgaatcccaacaggagaacgatattctgagcagactggtggactccaacttcgacctgtccatcctgccgtga

SEQ ID NO: 7290 - RNA, 1617 nt, synthetic construct
  source 1..1617: mol_type = other RNA
atggataaacagaccctgattgaaaaggcccaggcactcgaaactcggcgggatctcctgaaactcttaaacgaggtgaaagcagagctccttggctctagcgcctatcccttcaccatgaagaagcttctgatcctttgtaaccctaagaatgacggtgataagaaacaggaaaggtatcgctccttctcaatccctaaaaaatcgggtggcgagcggacaatctctgccccctgtggcaacctgaagtggatgcagctctgcctaaacgagatcttcaaggcactgtacaccgctagcccatatgccatggggtttgtcgaaggccgctccatagtagacaacgcacgcatgcacacaaatcaaaactacgtgttcaacattgacctcaaggacttctttcccagcatcgaccaagctagggtctggaagcgtttacagctcagtccgtttaattttaacgccaaggtcgctagcgtcattactgggttatgctgtatgagaacaatacggtaccgggtggatctgcccttcgaagaggcatttgttctccctcaaggagcgcccactagcccactgctgacaaatgcgatttgcgacactttggacagacgcttgcatggactggctaaacgctttggtttacactactctagatatgccgacgatatcaccttcagtagtatgcagaacgtgtatcagcccaatggcgatttccgtaaagaattggagaggatcatctctgatcagcactttaccatcaattctaagaaaaccaggctgcaacactgctcccagagacaagaggttactggaattactgtgggtcagaaactgaacgtggccagaaaatacgttaaggatgtacgagcccttctgcatatatgggagaagtatgggattaatgctgcgtatgctaccttttacccaaggtacaagagcgagaagtgtcagctgcatagaggggagcctaacatcgtgaatgtgatatctggcaagttgtgctacttgaaaatggtcaaaggggaaaccgatccagtgtatacgaagctcttcgcgcagtttacacggctcacaagcactgaaaatcccgtggcccaaactaaagatatcgactacctgttcacgattccgttaatcgccttcgaaaagaaactagggtgtaaactggagtaccgaaccaggattcacgataacaagccttatgcctgcttccagtttcaggacaggttctttattgttgctgtcagtaagaatctcgatattaacaatctgcccggcaacgtggagatatccctcgttcatacggcacactacaatacaaatttccatagtagcgaggacaccgatttgaactttaaaatctcccagcttaaagtgggatacctgcttcacaagcactatacaggaaagaagcgaattgacgaagcttcagcaccatccccaaatacaaccctggacgtccctgactcactgcgtgaattcgtgctgggactggccgaacagtttccagagcttcagctaagagacgacatgggcatcattgagtcccagcaagagacggacatactgtcacgcttggtagattcgaacttcgatctgtcaatcctaccttga

SEQ ID NO: 7291 - RNA, 1593 nt, synthetic construct
  source 1..1593: mol_type = other RNA
atggataaggagacacttgtgtcaaaggctagggctctggagacacccaaggattttctgtacctcatgaatgaaattaaggccgacctactgggggataactcatatcctttcagtgtccgccagttgcatatactctgcaaccccaaaaatgataagaaaaggtacttcagcttcgagatcccaaaaaagagcggcgaatccaggcaaatctgtacccctagcggcaacctgaaatggtttcagatttgcctgaacgagttgtttaaagccctgtatactccatccccatacgccatgggatttgctgtagggaagtcgatcgtggacaacgccaggatgcacactaatcagaattatgtctttaacatcgacctgaaagacttcttcccttcaattgatcaggccagagtttggaagcgactgcagatcgcacctttcaatttcaatgcaaagatcgcaggaatcatggcagggctgtgttctatcaagtccttgcgttactccggagaagagccatttcaagagtgcttcgttttgccccaaggtgctccgacctctcccttgctgaccaacgccatttgcgatacactggaccgcagactccacggtctagcaaagcgctatggtctacattacagcagatatgcggatgatataactttctcatcgatgcacaatgtgtaccagtccgactctgtgtttcggaaggaactgcagagaataattacagagcagcgcttcactatcaatccaaaaaaaacacggcttaaccactgttctctgcgtcaggaggtgacgggccttaccgtgggtcttaaaatcaatgtctcaagaaagtacgtgaaggatatcagagccatcctacatatctgggagaagtacggctataacgccgcctatgctactttctatccgcggtacaagtccgaaaagtgtcagctccacagaggggagcctaacctggagaacgtgattagtgggaaactctgctatttaaagatggtgaagggcgaatccgaccccgtctattctaaactgtactcccaattcattcgactgaccgaagcaaccattatcgcacaagataagcacaacatagactacctttttactatgtcaaagtgcgacttcgaaaataaattaggcgtgagcattgaattccgggagcgcgccgacgacaaaaaaaaatacggctgtttctacttccaggacaggttttttgtggtagcggtcagtaagaacatcgacatcaataacctcccagagaacttacagatttctctgacccgcatgcagaagcccgtagaattttatttaaggccgggagaacctagggctgctgcgcttcccacaattacccggatcggatatctccttcataagcctctccggggctacaaacccgagcccaaagctgggaacattagcaatgatatatctaacgagctgaagagctttgttataaatctggccaatacgtacccagagctccagttgaaagacgatatgggaattattgaaagcagtaacgaggataatctcctcgcccgattggttcagagcaattttgacctgagtatcctgccttga

SEQ ID NO: 7292 - RNA, 1542 nt, synthetic construct
  source 1..1542: mol_type = other RNA
atggagaaaagataccttaccgaaaaggcgcaggctctgaatactacagtggatctgttcaaccttctgaacgaaataaaatgtgacattcttggagacaactctttcccttttaagtggaatcggttcctggctctgtccactccgggtgactacctgcatcggtactattctttcaaaatccctaagaagagcggcggctttagatcaatatatgccccgctctacaatctgcggtggatccagatatgcctcaatgaaatctttaaagctatctacaccccatctccatatgctatggggtttgcagccgggagaagtattgtagataatgcacgaatgcataccaaccaaaattacgtgttcaatattgacttgcaggactttttccacagcatcgatcgacatcgtgtctacaagcgcttacagtttgccccctttaatttcaaccccgaaattgccaacgtgattgccggcttttgtacaatcaagtcttttgttcgctctggcgggagtagctcgatcgattgttatgtgctgcctcagggcgctccaaccagtcctctcctgacaaacgccatttgcgacactttggaccggcgtttgcagggactggctaaaagattcggactgcactactcacgctacgcagacgatattaccttttcctccatgcacaatgtttaccaggagcagagcgagtttaggcaggaattagagaggataattgcggatcagggttttactatcaatccaaagaagacgagactgagccattgttccaagcgccaagaagtcaccggactcgtggtgtcccaaaaagttaacgtgaaccccaaattcgtcaaagatatccgagcaatcctccacatctgggagaagtacgggtataatgcagcctacagctccttctatcctaagtatctcagcgaaaagtgccaacttaaccgcggctatatgaacctagccaacgtcatcagtgggaagctgtgctttctcaaaatggtaaagggagccaaagaccccatctacattaagttgaacgagcaatttgcatcgatcctgaagtcacagaaatcaacgaagggcgagagtgaacggatcaaatatcttatgacaatgaccaagagagacttcgagaaaaagatcggaaccaaaattcacttcaatcggtctaggtatgatgctaagatttacggctatttctactaccacggtaaatcatttctggtggccgtcagccagaatctcgatataacaaatctgccagacgagactcagatatctttgtgcgaattcgttaagtatctcgactgtgagtatgatagcgatcccaggaaactaaagtcctcccaaaggtattacggtgtggtataccttttacacaagccacattacggcttgaacatgaagaacaagaagattcccaaacaggtgaaagagatggtgatcaatttcgcgaataggttccctgaactggagctaaaagacgagttcgggattatcgatgagtataacaagacacagattgacaaaaactga

SEQ ID NO: 7293 - RNA, 1635 nt, synthetic construct
  source 1..1635: mol_type = other RNA
atggacaaggaattactgataagcaagattcggaataccactacccgatggaagttactcgacctccttaacgagatcaaggcagaccttgctggcactgccgcctaccctttcactatgtctaagatgatgagactctgtaacccccgaattggactggatcgctaccactcattcgaaatccccaagaaatctggtggcgtcagactgatctttgcccccgaaggcaatctcaaatggatgcaactctgtttgaacgagatcttcaaagcactgtacaccccgtctccctacgctatgggcttcacccaggggcgaagtatcgtgagcaatgccgtgaggcacttgcatcagaactacgtttttaatatagacctctgcgacttctttcccagtatctcccaagctagggtgtggaaacgcctgcagttgcctccattcaatttcaccaaggatgttgcttcagtagtggcgggcctgtgtagcatccgcatgctagacatagttgatgggaatgtccggttagtgtcatacaaacttccacagggggcccctacgtcgccattgctgacaaacgccatctgcgatactctggataggcgactggccggactggccagaaggtttggactacactacactcggtacgctgacgacattacattttctagcatgcacaacgtctatcaagacggctctcccttcagacacgaactggaacgcattgtaagcggccagcattttaaaataaacgctaagaagaccagactaaaccatcgcggggagaggcaggaggtaactggactcacagtcggagaaaaagtcaatgtcgcccgtcggtacgtgaaagatgtgcgggccattctgcacatttgggaaaggtatgggatgaatgcagcagtcgcgaagttctacccccggtataaaacagagaaaggtagtctgcacaacggcgacccagatatggaaaacgttatcgccggaaagttatgttatttgaagatggtgaagggacagcatgaccctgtgtatgtgaaattacaggagcagttcgatagactgacgtcagcgaagcctgaggctcatgacttggaaatttcctgggagtacttgcaaacgctgcccacatccgattttgaggcgcagctgggggtgaaaattgactacggaattagcaatctcggcaagcagtacgcctcctttgttttcaacgggaaaaagatctatgcatctgtgagtaggaatatctccatctccaacctcccaaagagtctttacatcagcctctgcagacagatcgattataaggtcaagtatactggggaagccagccagaggcacgccgtgatcgacccaggcacaccttatggccgtatgatgctgggttgcccccttcctgaggacctggctgtccgctatatttacgttgtacaccgggcccttccgaaggacaaacccctcaagtatgtgcatacccctcaggtggcaccggagctgaaagatatagtggggaagctcaatgagctgatgccaggcgcactgacagctgatggtgctctgctggcaggtgatcgtcctaaagataccctaacccaattggtggagtccggatttgacctgtcaattcttccatga

SEQ ID NO: 7294 - RNA, 1635 nt, synthetic construct
  source 1..1635: mol_type = other RNA
atggacaaggaactgctggtcagcaagatacggtcgactaccactagaatggagttgctggacttgctgaacgaaattaaagtcgacctcgccggcagtgccgcatacccattcacaatgcagaagatgatgagactgtgcaatcccaaactgggagaaaacagatatagaaggtttgaaatacccaagaaaagcggaggagtgcggacaatcttcgcccccaacggcaatctgaaatggatgcagctgtgcctcaatgaaatttttaagactctgtacaccccttcctcctatgcaatgggcttcactcagggcagatccattgtcgataacgctaaaaagcacctaaaccacaattacgtgttcaatattgacttatctgacttcttcccttctattgaccaagcgcgtgtgtggaagcggcttcagatgccaccattcagtttttccaaagagattgccaatgtgattgctgggctttgtgccatcgagatggtttatgatgaggacgacaaggatcccgtgaaaacctacaagttgccacagggcgcaccgaccagtcctttactcacaaatgcgatatgtgatacactagacaggagactggccgggctcgccaaacgattcggcctgcattatacaaggtatgctgatgatatcacgttctcatctctgcacaacgtataccaggagggttctgcatttcggaacgagctggaacgcattgttatcgggcaaaactttcgaatcaatccgaggaaaacaaggttgcaacataggagcaaacgtcaagaagtcaccggtctgtcagtgggagaaaagatcaatgtttgcagaatgtacgtgaaggatctgcgcgccctcttgcatatttgggaaaagtatggcatcaacgctgcaatcgctaagttttacccccgctacaaggctgagaagggatatatacataaaggggagcctaatattgagaacgtcctctccggtaagctttgttacctgaaaatggtaaaggggaagtttgatcctgtgtattgcaggctacaggagcagttcaataggttaacgttgaccagtacgaataaaaagaacgtcgaactgagttgggaataccttcagaccacacctgtaaatgattttgagacacagctgggggtcaagatcgagtacgcggtgagcaagcggggcaaaccctactcatattttatgctcaaaggtgagcgtattatgatctccgtgtctcagaacattagcatcgacaaactcccaaagaacctctacatatcgttatgccgccaggttgattacaagctccgctatactaaacaacagttctctgtgcccgaggtgatcgacaacactaccgcctacggccgaatgaaattgggatgtccacgcatggaggacctggcagttcggtatctttatgtgatacaccgacagctaccgaagaatcaccccagcaagtacatccggacccctgaggtgactcccgagctgaaagacgtcgttaacaaacttagcgaactgatcccaagcttattcgatgtagactgtgtgcaggccaccgacgtggagcctaaggatactctgaccagactggtcgaatccgggtttgatctctcaatcctttcatga

SEQ ID NO: 7295 - RNA, 1635 nt, synthetic construct
  source 1..1635: mol_type = other RNA
atggataaagaactgctgattagcaagatccagaacaccaccactcggtgggagctgctcaatctgctcaatgaaattaaggctgatctagtgtcaagtaccgcgtaccccttcaccattcaaaaaatgatgcgtctttgcaatcccaagctgggaaataatcggtaccgaaaattcgaaatcccaaagaagtccggaggcgtaagaactattttcgcccctaacggcaacctcaagtggatgcagctgtgtctcaatgaaatctttaaagccctatacaccccatctccatatgcaatgggttttgtggagggtcgatcgatagttaacaatgcagaaaagcatctgaagcagaattacgtattcaacatcgatctcagcgattttttcccatctatcgaccaggcaagagtatggagacggctccagctgcccccgtttaactttagtaaagaggtcgcaaatatcatagccggtctatgttccattgagatgaaaaaagagggggacgagacaccgcccgttaagagctataagctgcctcaaggggcccccacatctccacttttgacaaatgctatctgtgacacattggataggagacttgctggtctggctaaaaggtttggattgcgttacactcggtatgccgatgacattactttctcatccatgcacaatgtgtatcaaaacgggtcacagttcaggatagaattagagaggattatctccggacaacatttcaagattaaccccaaaaagacccggctgcaccacagaggtcagagacaggaggtcactggactgacagttggcgaaaaaatcaacgtgtgtaggtcctacgtgaaagacattcgggctatcttacacatatgggggaaatatggcattaacgccgctgtcgcaaagttctatccacgctacaaagctgaaaagggctatctgaacaaaggggagccaaacatcgcgaacgtgatctctgggaaactctgctacctcaagatggtgaagggcgaaatggaccctgtgtatagtaggcttaatgatcagttttcaaggttagtggacaccaactccggcgcgaaagatatcgaaatatcctgggaatatttgcagacactttctacagatgactttgagaagcaattgggcgttaaaatcaagttctcagttagcaaacagtccaaacagtacgcctacttcattctgaaagatgagaagatcatggtcagcgtcagtcgcaacatatcgattgatcacttacctaagaatctttacatcagcctctgccgccagatagactacaagctgaaatacaccggggaactgtataccagaccagacgtgatcgacaatagcactgcctatggacgaatgaaactgggctgccctatcccgggcgatcttgccgtccgttacatttacgtgattcatcgcgccatcgcaaaggacaagcccacgaagtatattcatacacctgaggtggcccctgagatcaagaatgttatcaacaagttgaacgagtttatgcccggggctttcaccgtgggacgcgtagagagcacgtctgtcaagcctaaggacacgctgactcgcctcgtggagagtggatttgacctgtctattctgccctga

SEQ ID NO: 7296 - RNA, 1818 nt, synthetic construct
  source 1..1818: mol_type = other RNA
atggaaaacaatgaaatcgtggcccgggtttcaaaaatatccgacgtcgagtctttatacaaattactcgatgacatccgtaagagtgatagagagacttacattcggaagatggactttaccctggcccacatcaaaaggtatgctaatcccaacctgacatacaaaaggttcagccttgtgaatattccaaagaaatctggaggaacaagacaaatttgcataccaaacgttcgcctcggcgttatactccattgcctaaatgaggtgttcaaagccttatatacgcctaacgaattcgccacagccttctgtgttggcagaagcatcgtcaacaacgcaaaggtccacatcggtcataactacgtctacagtatcgacctggaggatttctttgggagcatccagcaggcccgtgtgtggaagaggctgcaactgcctcccttcaacttccgacagcctctcgtcaatgcaatagcagggatgtgttgcgtgaagatgcagcctagtatcaaaaataaccgctcgaccgctgattatatcctgccacaaggtgctcccacctctccgctcctctctaatgctatatgcgacactctggatcggcggctgacagggctggccaagagattcggcctttgttattctaggtacgcggacgatattacattctcctccaatcacaacgtgtttcaggacaatagtgatttttgcaacgagcttaaccgaattatagccgaccagaagtttactatcaatgtcaaaaagacccggctccaaaagcgcggcagtaggcaggaggtgacagggcttattgtgtgtgagaaggttaatctgtgccgtaaatacgtgcgatctatcagacagatcctgtacatctggaaatggtatggagtccatgatgcgtactcctcatacagaaaaaacaacaacatctctgagtacaaaggcgaagaaggattcaaactgatcatactgggcaagctgaattacctcaaaatggtgaagggggaaaccgaccccgtatatatcaagttgcgcactgaatacgacaacattgtgaatggtacctaccaccatcagtcatctagcattcacttcaagttcgtgaatactcaaagcctagaggactttgagtcagagcacgggaggattggcattgccgtggggaaaagcggcaagaggtatgcatattggaagaaactgaatcggtacttgcgatttatctccatttccaacagcattaaggaatttaaccgcgaagatctgtgtatttctgagtgcgctaccgctggaggaggcaagttttatcttttacggaacaagagtaagcgcaaaaaatacactgacgtactggaggcagattttaaaaagtccttgatctgggaaacctgtagcaagctgagccagtcaaagccatatgaatttgacatcgttactatgtggaatagcggtatgtttgatgtaggtgaatactcccacgacgattcgtaccattatattaatatcgcggaaacgcagtataccggaacgtggacaaacctccagcaggaactcacaagagagctgaagaggatctgcttcgatatcaaattcattaatggacagacctcctttattgtgaaagggaagtcaattggccttagtctacaatggccatggaaccccccctatgaggaggagctgaataacaccgcagtattggtgcaggccaagatcccgaagaacaagtatcctgagatggaggcttttataaaatcctacttcgagttggtcgtgtcagaacagatgtattacgacagcttgaatattttctga

SEQ ID NO: 7297 - RNA, 1581 nt, synthetic construct
  source 1..1581: mol_type = other RNA
atggaaaagaacgttatcatcaagagagccagcaatctggagacaaaagaggacctcttgcttctcctgaacgacattgtgaaggatgagctgggtaaagacgatgcctttagcttttctatgaagcagcttatgtactactgtaaccctaataacgtcagaggcagatactctcacttttctatcccaaaaaaatctggcgggtgcaggaacattgcagtgccttcccgaggactcggtaatctgctgcactacgtgaatatcatgctaaaggccatttatcagcccagcgattacgctatgggcttcgtcgagggcaggtgtgtagtcgataacgctatgcgccacgtgggccaaaactatatattcaacactgacctcgagaatttcttccccagcattgaacaacctcgagtgtggaagcgctttcaattatccccctttaatttcaagcgtccgatagccaacattctggcaggactgtgctgcattaaagagaagaatgacgacggatcctttatctacgttgtgcctcaaggcgctcccacctctccactgattactaacagtatctgtgacgtgttggaccggcggctgaatggccttgctaggaggttcaacttacattattctagatatgccgatgacataacattctcgtctatgcacaatgtgtataaggttggaggagatttcagaaccgaactcaagcgtatcgttgaggaccagcattttcggatgaaggaatcaaagacgaggttacaaaagatcggggagcgacaggaggtgacaggtttgatagtgtcctcgaaagtcaataccagtgcagcgtacgtggccgagattcgcaacctcttacatatctgggaaaaatacgggtacaatgaagtgtacaagcggttctaccctaagtataaggcagacaagggctatatcaaaaaaggtgaaccactgttggagaatgtgctgtacgggaagctccagtacctgaaaatggtaaaggggtacaaagatagtgtctatgccgctctccaggcaagatatgaccggctgaccagtcccattaatgcctcctcagagcagaaatatgattacttgcgctcctttacactcgccgaattcgaggagattgtcggcaaccagattcggtattccctgtccaaaaacggaaatctttacgggagggtgaacctaaatgacaatgacatcatcgtgagcatcacaaacgctgcgaaagttcagctggtcaaaaacaagatcatcaccgatgaatcaatgattgctagcgtcaaaactagcaagtcaactatcccagccaacagtcgccccgggctttacgtagtccttacggcgaagaatggcaaaagcctattttggatgatgacctattacgatccgactgtgaccgacatcgatctgtcatctgtatcagtgagcgagttggttgatatatgggagcaggaaggaatcaacgctgccattgaggcatatgaaaacggaatactgttcaaacaggataataagtcctttgaaaagctgaaaggtgggaagcagaagttctatcgtccaagtagcttttga

SEQ ID NO: 7298 - RNA, 1785 nt, synthetic construct
  source 1..1785: mol_type = other RNA
atggaaaagtctgagatcagaaagcgggcaaccgagatcgaaagtaaagaggacctgcttctcctgttgaatgatattgtgaaggatgagttgggaaaggacgatgccttctcttttagtatgcagcagctgaactactactctaacccaaataacgtgaggggtagataccaccatttctccatacccaaaaagtccggcggaaagcggaatattgcggctccatcaaaagggctgggacacattctatattacgtcaacatcctgctcaaaagcatctatcagcccagtgatttcgccatgggctttgtggaaggccgctgcgttgtagacaatgctatgcgccatatcggccagaactacgtgtttaacactgacctcgagaacttttttccgagcattgaacaacctagggtatggaagcgatttcagctgaaaccgttcaacttcaaacaacccattgcaaatctgctggccggtttgtgttgcatcaaagaaaaacacgatgacggcacctttaaatacgtcgttccacaaggagcccctacgtccccactgatcactaatgcaatttgtgacaccctggaccggaggctcaatggtcttgcaagacgttttaaccttcattattcccgttatgccgatgatattacctttagctcgatgcgcaatgtctttaaggccggcggcgacttcaggatggagctgaaacggatcatcgagggccagaatttcaagatgaatgaggctaagacgagactgcaaaagaaaggcgaacggcaggaggtcacagggctgacagtctctaataaggttaacacttcatcagcctatgtggctgaaattagaaacattctgcacatctgggaaaagttcgggtataatgatgcctacaagcgattttacccaaaatacaaggaatccaaggggcacgttaagaagggagagccactgcttgagaatgtcctttatggcaagttacagtacttgaagatggtgaaaggggtgaaagaccctgtctatgtggctcttcaggcaaggtatgacaaactaacatcccctgtaaacgcggaagtcaagcagaaatatgattacttgcgaagtttcactctcgcagaatttgaggagatcgtggagtgccaaatctcatacgcgctcagtaaagaagacaacctgtacgggaaggtgatcttaaacggcaaggacatcattatctctatatcaaacgaggctaagacacagctcgtgaagaacaagattgtgactgacgaggccctcgtcgcatccgtcaagcctattaagaacgtaatttcggtgaatagcaaacctggactatacgttgtgctgaccgccaagaatggaaaggcccccttctggatgatgacctattatgatcccacagttactgatattgacctctctcaggtaagtgtggctgaactcgtgaatatctgggagaaaaacggtatcgacgccgcaataaaagcttacgaggacgggatactgttaacctcagaggacgccagcatggccaacaaaaacagcaaggacaaaaaaaacacccccatgcagaagcgcaaatctgctagcagcaaagacgagtccgtgtacatgggggacatcgatttcatagatgtggccgatattgcggcaatagaagaagaaatcaagagcggaaacctgggtgaggttaagctgtctttcagcaaaaatgacgaagctgataattcaggcaatgatgagttagatacaataatcgatgaggggtccttcgatgacttgtga

SEQ ID NO: 7299 - RNA, 1779 nt, synthetic construct
  source 1..1779: mol_type = other RNA
atggagaagtctgtgataagaaaacgcgccgcagaactccagagcaaggaggacctgcttctccttctgaatgaaatcgtgaaggacgaattaggcaaggatgacgccttttcctttagtatgcagcagcttacctattacagcaatcctaataatgtacgaggtcgataccggcacttttccatcccgaagaagtctggcgggaagcgcaatatcgctgccccttcaaaggggttgggccatattctctactacgtgaacatcttactgaaggctatttaccagccttccgactatgcaatggggttcgtggaggggagatcggtggttgataacgcgatccgccacatcggccaaaattatgtcttcaacaccgacatcgaaaattttttcccctctattgagcagccacgggtctggaagcgctttcagctcaagccctttaactttaaaaaaccaatcgccaacatcttggctggcctgtgctgcattaaagaaaagaatgatgatggcaccgtgaagtacattctgcctcaaggagcacccactagtccgctaataacaaacgccatttgtgacacactggacaggaggctctctggtctggccaggcgtttcaacctgcattatagccggtacgccgacgatattaccttttccagtatgcacaacgtctataaagaggacggggacttccggaccgaattgaaaaggataatagagggccaaaatttcacgatgaacgaggctaaaacaagattacagaagatcggagaacggcaggaggtgactggtctaacaatttcgaacaaggtcaacgcatcaaccgcatatgtcgccgagatacgaaatctcttgcatatttgggagaaatacggatacaatgaggcgtataagcgcttctatcccatttataaggagtcaaaaggtcacgtgaagaaaggagagccacttcttgaaaacgtattatacggcaagctgcagtatctgaaaatggtgaagggttacaaagatcccgtctatgccgcactgcaggcacgttacgacaaactgacatcccctgttaacgccgaggtggaacagaaattcgactatcttagatccttcaccctcgctgagtttgaagagattgtagatggtcaaatcaattacgccttgtctaaggagggaaacctgtatgggaaagtggtcctgaacggcaaggatatcatcatcagtatcagcaacgatgctaaatctcaactcgtgaaaaataagatcgttaccgacgagacgctggttgcttcagtaaagcccacaaagagcgcaatacctgttaacagcaaaccaggactgtacgttgtcttgactgccaaaaatggaagagtaccattttggatgatgacttactacgaccccacggtcaccgacattgacctatcagaagtgcccgtgaccgaacttgttaatatctgggaaaagaatgggatagatgccgcgatcgaggcttacgagaacggaattctgctcaagggggaaggcgccaacaaagcggccaaggatgctaagggcaagaaaaaaactaaaaaacctcagaagggggtgttcctgccaagtatgtccgaaagcgtctccctggatgtggactatatcgatgtggctgacattgccgcagtggaggaggagattaggtcaggaaaaccaactaagctgtctagtagcttcacagacgagtacaatgatctcgattctgatgaattggacactatcgtggatgaaggcagcttcgatgacctgtga

SEQ ID NO: 7300 - RNA, 1689 nt, synthetic construct
  source 1..1689: mol_type = other RNA
atggagaaacgagaaattgcccagcgggccagcatgttgcagaacaaagaggaccttctccagctattgaacgacattctgaaagatgaaatcagctccgatcactccttctcctttagtatgcgccaattgagttactactgtaatcccaataacgtgagaggtaggtatcgtcactttagcatacccaaaaaaagcgggggccagaggcacatatcagctccaagcagaggactctcacatattctgtactatgtgaacatcatgctcaaggcggtgtacctgccatccgactatgctatgggcttcgtggaagggcgttcagtagtcgataatgcttctcggcatattgggcagaattatgtgttcaacacagacctggaaaactttttcccatcaatcgcccaacccagagtctggaagaggttccaacttgcacctttcaactttaaccagcaaatagcttctattctggccgggctatgctgcatcagggaaaagcaggaggacggcaaatttaccttcatcttaccacagggcgctccgacttcgcctttaatcactaacgccatctgcgacaaacttgacagacggctgagtggactcgcacgcaggtttagactgcattacagtaggtatgccgatgatataaccttttcttcaatgtgtaacgtgtaccatgagaatggcgactttcgaactgaactgaagcgaattattgaagatcagggtttccatatgaatatcgcgaagacacgattgcagaaaagaggcgagcgccaggaggttaccggattaactgtctctaatcgcgtaaatacctctcgcgagtacgtcgccgaaatccggaacctgctccacatttgggagaagtatggttacaatgatgttttcaaacggttctatccgcagtataaagccaacaaaggccacgttaagaaaggggagccgatgcttgaaaacgtgctctacgggaaacttcagtatctgaaaatggttaagggttacaaggatcccgtctacgccgcactacaagcccggtatgacagactcacaagccctgtgaacgctgaagcaaagcaggggttggactacctccggagttttactattgccgaattcgaggagatcgtgggatcccctatctcgtactatctgtccaaagacaacaaaatttacggcaaatcaatgctgaatggcaaggagatagctatatccattacgagggctgcaaagcaccaactcgcgaagtcaaagatcatcaccgatgaaagcctgctggccagcataaagcctgttaaatataacgtgaccgctaattctaatcccggactcttcgtggtcttggccgcacgcaatggtcacacccccttctggctgatgacctactatgatccaactgtgacagatattgacatgtctaatgtgccccctacagagcttattaacatctgggaggagaagggaattgatgcagcgatcctggcatacacggagggaaaagaccagggaccaaataagaagcaggagaagtccaagaagaagggcaagcgtagtgagacaaagaagctggtaagcaatatcgacctgctggattttgacatcgatggggctctggacatcgatgatatctctagcttggtcgccgactttgatgaagcctccgcaatttcccttgacgacttatga

SEQ ID NO: 7301 - RNA, 1521 nt, synthetic construct
  source 1..1521: mol_type = other RNA
atggaaaagcgcgagattgtccaccgggcttcccagctgcaaaataaagaggatctgctgcagctgctaaatgatatcgtgaaggatgaactctctaacgaacgggcattcagtttctctctgaaacaattgagctactattgcaatcccaacaacgttcgcggcaggtaccggcactttagcatcccgaaaaagtctggaggccaaagaaatatcgccgctccttcgaggggattgagccacctgttgtactatgtgaatattatgctgaaggctatatacaggccaagcgactatgcaatgggctttgtggaagggagaaacgtggtggataatgcctcacgacatattggccagaactgtgtctttaacactgacctggaaaattttttcccatccattgctcagccccgagtttggaagaggtttcagctcccacctttcaatttcaataagcaggttgcgagtatactagccggactttgctgtattagggagaagcatgtcgatggaaagctcacctatattctgccacagggtgcacccacgagccctctcattacgaacgcgatctgcgacaatcttgatcgtcgtctatcaggattggcgcacagatttgggttacattattcacggtacgccgacgacctgaccttctcgtctatgcataatgtctatcaggaaaacggcgagtttcagacagagctgaagagaatcatcgaaggtcaggggttccgcatgaacatcgggaaaacaagattgcagaagcttggggaacgccaggtggtgacaggactgaccgtgagtaacagagtcaacacctcaagcgaatatgtcgccgagattcgaaatctgctgcacatatgggagaaatacggatataatgacgcctttaagaacttctactcacactacaaagacaagaaagggcatatcaagaaaggggaacctatgttagagaatgtactctacggtaagctccagtatttaaaaatggtgaaaggctcaaacgaccctgtttatgccgctctgcaagcccgctacgataagttaacttctcctgtcaacgctgaaatcaaacagtccttggattacctccggtcttttactatagccgagttcgaggagatagtgggcagccccattaactaccggcttagtaaggataacaacctttacggtcaggcaatgctcaatggcaaagagatcgccatctctattacaggtgccgctaaacaccaactggctaagtccaagatcataacagacgagacacttctcagttccatcaagccaattaagtatagcgtgacctccaagagcaaacccggactcttcgtagtactgaccgcaaggaatggccacgccccgttttggatgatgacttactacgacccaaccgtaactgatatcgacatgtccaacgtgcccgcctccgagctggtggacatctgggaaaaagagggcattgacgctgcaatcaacgcattcgaggaggggtttctggaagatttcgtttga

SEQ ID NO: 7302 - RNA, 1662 nt, synthetic construct
  source 1..1662: mol_type = other RNA
atggaaaaaagcgagcttctcaagaaaattctcgccctgcagacaaaggaggaccttctacagctgcttaacttaatcgtgaaggatgagttacgacaggagaacgcattcacgttttcaatggcccaactgatgtacttttgcaatccaaataacgtgcgcggcagatatacacacttctccataccgaaaaaactcgggggaaaacggcaaatcgcagcccccaccgctggactgcgcaacattctgtactacatcaacatcatgctgaaggctgtgtacactccaagcgactacgcaatgggattcgtggagggacgcaacgtcgtgagtaatgccaccctccacgtaggcaagaactatgtctttaataccgatcttgagaacttcttcagctctatcgaacagcctagagtttggaagcggctacaattgccaccctttaacttcagccggccaattgccaatataattgcaggcctgtgttgtattcgagaaaaacaggagaatggtcagttcatttatgttttgcctcaaggggcccctacttcgcccctgttgacaaatgccatatgcgactccctcgaccggaaactggcaggcttggcgcggaggtttggtttgcactacagcaggtatgccgatgatatcacattcagttccatgcataatgtatatcagaacaaccgtgaattcatcacagagctcaaacacatcatcattggccagaatttccatataaatgaggcgaaaacgcgtcttcaaaaacacagggagaggcaggaggtgactggcctgactgtaaactcgggcgtgaataccagtaagaagtataaagctgagattagaaacctactacacatttgggaaaagtacggatacaaagaagcctataaaagattctacccccattataaggagacgaaagggcatactaagaagggcgaacctatgttggagaacgtgctgtacgggaagctgcagtacctgaggatggtcaaaggagctaaacatcccgtgtatgttgcattacaggagagatacaataagctgactagccctataaacggccactctaaggaaagttttgactttctccgcgctttcagcctgtcagactttgaaataatgaccaataatcctgtgcaattcgctatctcttcaacccacaatctctatgcctacactatgcttgaggggaagaagatactgatctccctcactaatgcagtcaaggagattctgatcaagaagggagatatcacaaacaatacagctacctctcacgaagaaatcatcaagtcatacatcccctttaactccacaacacagctgtacgtggttctgactgccaagaaagggcatgctccgttctggctcatgaccgactatgatccaacaacgaccggtctgcacttctgctctatgccaatttcccagttaattgatatctgggaaacaaaggggattgacgaggccatcgcgacctatgaaaaaaactctacctttaccaaagtcaagaatatcgagagttccagcgagaaaaacgaatcagtctttgataaattccccattaaggaaaactccgacgaagacattcagtttttgcataagctctttgaggacggtacccagaagaacgataccctgtttaccctttga

SEQ ID NO: 7303 - RNA, 2373 nt, synthetic construct
  source 1..2373: mol_type = other RNA
atggataagggcgagatagcgaagaaagccagaatcctccagaccaaaactgacctgctggctctgttgaatgagattaaagctgacgatttgggcgagaaaggctacccattcgtgctccgccagatcaactattactgtaaccctaagaacacaaaggggaggttcgtgaccttcgcgatcttaaaaaaaagtggtggaatacgcaacatcgccgcacccagcaacgggctcaaaatgctgcagacctatctgaacgttatcctgggcagcctgtatactcccagctcgcacgtaatgggcttcgtgaaagggcggtccgtaataactaacgcctcacgacatctgaatcagaactacgtgtttaacatcgacctgaaggacttcttctcttctatcccacaggcaagagtttggaagaggctgcagctgccccctttctcctttccccaggagattgctaatgttatagctgggctgtgttgcatcgaaatgattgtgcaggatgagcaaggacaggtgagaacaaagtatgtcctgccacaaggcgccccgacgtctcctgttattacaaacatgatttgcgacacgttggaccggaggctgtccggcttagctgccaggtttggcttgaacttttctcgatacgccgatgatatcactttttcaagtctgcactatgtgtattcagagaacggggcttttagaaaggagctgaaacggattgtggaagggcagaacttcactataaatgaagccaaaacacggctgcagaagaagggggatcgacacgaggttacaggactgatagtgagcgatcgcgtaaatgtctcaagaacctacgtacgcaacctacgttccctactatatatttgggaaaaatacgggtatgatgctgcgaacgaaaagttcgtctattattacctggacgacaaacccgcgagctctacttgcatgcctaatatggtgaacgtcattgagggaaagctccagtatttgaaaatggtcaagggtggcgataatcccgtttatctgaacctctactctaagttcgaactcctccagtacatttaccataataaggacaatggtgaagagcaaagcatgagcgatgtggagtccatgctccaccagagctcaatgagcgtggaaggtgttgtcgcccagtggaagaaccgggacatctttagtatcacaggtacgctgttgaatgagtgtaaacgctctgtttcgccgctcattgtcaagaaggtggccgccagcttgatggcatatctctcggcctctctggtgaacaatatcaaaaaacgagcagagctccagtggtacatgctgagggatataaatgatgctatgaatggccagcctcgcacaaggaaaatagacggtgaggaggagaagatccataggccgaagcttgtcgtggcattccttaagcaattcacaagcaccgaaaaccttaagtataccacccacacctgggaacgaatgattgacggcaagtacaagtggaccgactttgatcagttttttcactcctacgagtctgagctaaaggataagacggggtccgggattcctatcttcgacatctacaactgcaacattcacctttacaacctggtgcggaatttcttactcccaccatccaaggaggaatacccatggcagaccgattacgggctcaaattgagttactgtacacctgagggagtcatccagaattggatgaaagagaatcctgataaacaacccatggaaattccactttcagtgtttcccgaatcctatcgccctaagcagagggtgcaaggtcaaaccttagtggactttagagacgtgattgacattttcaagaacgctattgagtaccgggatgacaatttgtattgggacgtcagtgacatcttcaaactaacagactttagtctggacgattcagttcttgatactcttagtggcataaccttttacactgacactattcttgtacgggaagcactcaaaatcattgccgataatatcatcgttcgcccccagcatagacatttgaaagtacaggcaatcaggggaaaggacggagatcagaaatacgtctcattagaaatcctgcacgtcgaatcctttagtaataagagcctggacgatgacaagctgcaacttaaaggcaataagggccagctctccgcagtcaagcaaaagctggtgagcctttgcgatttttccgtggagtctagattccgtaaaggagacgagatgggagactatagaatcgattacttatactctgaagaggtgaatgccgaaccccgtgtgaccaaactggacgccccagctgagggattcaagtatatcctcaaattctacctgtga

SEQ ID NO: 7304 - RNA, 1431 nt, synthetic construct
  source 1..1431: mol_type = other RNA
atggaccttccccagataaaaaagaaggccacagagcttgaaacaaaggaaaatttgctggatttgctgaatgagatcaagcaggaggacctccaggaacaggcttatccattcacaatcaagcagctgaactactactgtaatcctaacagaaccaagaataggtatatcacctttgaaatccccaaaaaggcgggggggactcgggtcatttcctcaccaagtaacggccttaaatccatcctccactaccttaattatatcttacagtcaatccacacaccgagcaagtttgcaatgggctttgtgaaaggcaagtcaattatagacaacgccagccaacacacaaatcagaactacgtgtttaatatcgacctgaaggacttctttccgtcaattcatcaggctcgagtttggaaaaggctgcaacttccccccttcaatttcaacaaggagatcgcctctatcgtagccggactgtgctgcatgaaggtagagccacaggaagaaaacgagaagcccctgtatgtgctgccccagggtgcaccaaccagcccaactatcaccaacataatttgtgataacctggataggcgattgggagggctggcaaagagattcggtttaagatacagtagatatgctgacgacatcactttcagctccatgcataatgtttatcaaaacgactctgacttccggaaggagctagagaggattattaccgatcagcacttcacaatcaatgagaaaaagacccgcttacaaaaactagggagtcgccaagaggtgacgggcctcattgtgtcccataaaattaacgtcactaagaagtacgtgcgcgagatacggagtctcctgtatatgtgggaaaagtatgggtacaatgtagcctattgcaaattcttccctaaatacacagaagagaaaggccgtatttacgaaggtattcctgatttgatctcggtcattgcgggtaaactcatgtacttgaaaatggtcaaaggagacggcgataccatgtacacacggctctttgccaagtttcagaaactggctaacaaagaaactattgccgagaaaaccaatctggcaggagtgacgtatcttggcacgataggcattctggagtttgaaaagtatatctccaccaccatcatttttgagataactgagaaatgcaacctgtacgcctacttcaagttcaacgagaaaaagataatggttagcgtgaacaagtctctcaagcactccctgactttggaagaagctatggataaaggggagcttgcaatctctctctgtcgtggaaaagaaggaaagcctttttggctgatccatcgcaaagataaggttttggtgcctcctctcccactagtggatgtcgacgagctgaatgtgaagttagattctctgctcctgtttagctga

SEQ ID NO: 7305 - RNA, 1521 nt, synthetic construct
  source 1..1521: mol_type = other RNA
atggaacggagcgaaatccactaccaagcctctggagtcaaaactacactggatctggcccagctgctaagcgagattaaagaagacgcactcggcataataaaagctcgagcattccaggagaaacagattacgtactattgcaatccgaagagaaccgacaggaagaggtacatcaattttaccatccccaagaaatccggaggcgaacgcaccatctcagctccagtgaggggcttaaagagcatactcttcagtttgaacacacttctccaagcgttgtatgaaccttctaagtatgctatgggatttactcagggccgatccgtggttgacaatgccaagatccatatcgggcagaggtatatttacaatattgacctcaaggacttctttccctcgatagataagagccgcgtctggaaacgccttacactgcccccatttaactttaactcagatatcgcccacaccatcgccggtctatgcactatgcgcatagtcgaagatggcaaagagcggttcgttcttcctcagggtgcgcccacttccccaatcctgactaacgccatttgtgacaccctggatagaagattaggcgcagttgccaaacggttcggcttgaggtacagccgatacgccgatgacataacatttagtagtatgcactatgtctacggcaaggattcagaatttatcaaggagctgcatcgtgttatcaagtctcaaaatttcaccatcaacgaatcaaaaacacgcctccaatccctggggtatcgccaggaagtgacaggcgtgattatctccgataagatcaatgtcgctaaaagatatacgcgtgagattaaaaccttgctacacatctgggacagatacgggtatatggctgcctgcgagtcttacaccaaaagtcatcatgtgaagaacgataactttaagagagtaggttacccaaagctggagagcgtgatcgctgggaagctccagtacatgaagatggtgaaaggagcagaagacgccgtataccaaaccttgcagaccaaatttagcactcttgtaaaagggattaagaagatcgagtttacaattgggggtcgggatatcgcctaccttcagaccatgacccgggaacagttcaggaaagagaagctggcggacattacaatagacgcaacgaataaagtggcttattatgagttcggagatcagaaacacaatattgtcattagccggtctatttctgaggacattctgagtcagctcgctacttcacctgcaaatgacgaatgttggaataaataccgaatctccctgtgtgagaacaacaatgtgcagttttatctgctccacaagtgcttcaaggagagaaagttccgggtgaggacggatatcaagctggaggacatagacaacatcttcacttacttagattcccctaacaatcgcaacgagaacaacaagatcacagacaaaaagtcctcgaatattttcgagagggtgattggatggctgcgtagatga

SEQ ID NO: 7306 - RNA, 1494 nt, synthetic construct
  source 1..1494: mol_type = other RNA
atgatttcgacggatgagatcaaacacgatttcgcagcgatcgaggcccctaaagacttgttaaacctgttaaacaaggtgaaaagaagtgtgctgggcggcaaataccacccattctcctttgatcagctgttctactattcaaatccaagacgcgaggacgtcgtgagataccatagctttaccatcccaaagagaagcggaggaaccaggaccatttcatcacccgttgctggcctaaaatcaatcctgacaacgttgaacgatatcttccaggctatttaccgtccctccaagcaggcaatgggctttgccgccaaacggagcgtcgtcaccaacgctcagatacatgttgggcaacgctatattttcaacaccgatctgaaggacttctttactagtattaacaggtctagggtgtggcgccggttaacactaaagcctttttctctgtccgatgacattgctgatattgtcgccggcctttgcaccatgcgcgacagagacgcgaacggtcgggtacgatatgtgttgccccagggggcacccacgtctcctatcattacaaatatgatctgcgaccgcctcgatgctaagctagccagattggccaaaaggtttggactgcgatatagcagatatgccgacgacatcaccttcagtagcatgcacttcgtttacggcaaaggtggacgattcatctccgaactgcacgacatcatcaccgccgagggcttcgaaatcaatgatactaagacacgtctgcagcatctgggcataagacaaaaggtcacaggactggtggtcagtgaacgggtgaatgtgtccaaggagtacgctagggaactcaagctcttgattcatatttggcttcggtatgggtatcttcacgctctggacagctacacacaaaagcaccaacacacaaagggggggattgccaatctggaggccatcattaaggggaaacttaattacatgcggatggtgaaaggtgcaaacgacgctatggtacagcgcctgcaggccgcctttaacgaactgaaacacgattcaatcaggctggaacaccgctttgacagctggcttccaactcttacatttaatgccacttatactcgatcggagatagaggccttagagggtatcagcctcaaactgagagttgataccactaaggtgtgtgcttacctcgcaattgatggaaatgagtacccggtaactatcagtcgtcatatatcatccgcgacgaggctggaactcatgcactctgagtctaactctgcagtgtggcgaaaccatcggatttccatatgtagcaatgaggcaggctcctttatcctgctccataagaggctgcggaggtataagccgaaagccgaagctgaaaccgagtcttacaaggtgatcgacatagacacctttatagcgatgctcaatgcaactgagcaggatttccatctcgaaacattgtgcctcaacgcacctttctga

SEQ ID NO: 7307 - RNA, 1512 nt, synthetic construct
  source 1..1512: mol_type = other RNA
atgaataggcaggagatccagcaggcggtggcggcaataaaatccacagaggacttcgtgctactcctcaataaagtcaagagagaagcccttgggggtaaagcctatgacttcaagctgaaacagattacctactactgtgacccgaagcgagaaaacatcgagaggtaccggcatttcaccatccctaaaaagggcggtggcgagcgccaaatatctgcacccgtacctccactgaagagcatactattctccctcaacaccatcctgcaggcaatatatgagccttcgagccacgtaatggggtttgtgcagggacgcagtgttgtcgacaacgcaaaaatgcacattgggcaaacctatgtgtacaatatcgacctcaaagactttttcccctctatagataagtctagggtgtggaagcggttgacattgcccccgatgaacctttccagtgatcttgctcatctcgtggccgggctttgcacaatgcggctggaagaaggtgagaacgttcgttacgtcctgccccagggagctccaacaagcccagttatcaccaacatgatttgcgataacctggacagacagttgctgaagttagccaaacgctttggcctgaggtacagcagatacgctgatgatattacattcagctcaatgcattacgtgtataacgaaaatggtgcttttgtgaaggctctgcgtcggatcattgagaaacagcggttcacgatcaatcccagaaaaacaaggttgcagcagcctaaccagcggcgagaagtgactggcctggtggtttcagataaggtaaacgttacccgccaatacacccgagaactgaaaactcttctccacatctggcaaacttacggatatatggacgctcgcgagtcatacaggcgagccagaatcaagtcgatgactgtatttgacaaaaaagagggctttgaccttgcagccgtcgtgtccggaaagctcttatacatgaaaatggtgaagggggaggatgatcccgtctatcgccgtctgtataagcagtatcgggatgtctacgtgaataagcagagcgaaatctacgaagctcaggcaacatacattgagtatattcagactatgaccaaggccgagttcgaagaaaaaatgcagacgcgcatcagtattaatctggacaagtccctcaattgggctgccacctacggggagggcgagtcaagaggaaggctcagattaagctccaagattaccaaagaagtcctggccgagctagcggccgatactacaggcgaaggcgcttggtctaagtattgcatcagtttgtgtaataacggcgcctctcagttctatatggtccacagaccattggtgccaaaacaatatacgactgccgttaggtttctgatggaagagctccaagccgagctggaggaaatcggaattgacaacctgctggaggagctggacgatttaaaggcaaatcctgagaagctgaatgtggtgaagaccctttga

SEQ ID NO: 7308 - RNA, 1512 nt, synthetic construct
  source 1..1512: mol_type = other RNA
atgaatacccaggagattcgccagaccgtgaaggctatgaaatccacagaggaccttctgcatctacttaaccaggtcaagcaggatgccctcggagataagtcacatcccttccacctgaaacagattacatattactgcaaccccaaacgggagaacgtggttaggtatcgacacttcacaatccccaaaaaagggggcggagagcggcagatttccgctccagtcaatgggctgaaaagcatcctgtttagcctgaacaccatcttacaggccatttacgaacccagttcctacgccatgggctttgttgcaggaagatctgttgtgaacaatgctaaaatgcacatcggtcagcgctacgtgtataacattgacctgaaggactttttccctagtatcgacaagtctagagtttggaagagactaactctcccaccgatgaacttgtcaagcgacctggcacacctggtggccggtttatgtaccatgcgtcttgaagagggtgaaaacgtcagatatgtgctccctcaaggcgcacccacgtctcctgtgattaccaatatgatttgtgatagcctcgaccgtcagttggcaaagttggccaaacgatttggactccggtactccaggtatgctgacgatataacgttcagcagcatgcattatgtctactcggagaacggcgccttcgtgcaggccctgaataaaatcatcgagaagcaacactttaccatcaatccaaggaagacaaggttgcagcaacccaaccaacgccgggaagtgaccgggctcgttgtatcgaacaaggtgaatgtcactcggcaatacactcgtgagctgaagactattttgcacatctgggagaagtacggctatatggcagcgagagagagttatcgaagggcacgcatcaaatccatgacgttcttcgataagaaggacgggtttgatctcgctccggtcgtgcttggcaagctactgtacatgaagatggtgaaaggggagaacgacagtgtgtacaagaggcttatgggacaatatcgggatctcacaaaggcggacaatggggtaacctatcaagcaaaacataccaagctgacttacctgcagacaatggctaaggcggagttcgagagacagctgctcacatctctgatgatagatgtcgaagccccaaagctgcgcaaggtgtacttcgcggaaggcgaatccaacaggtacttgcgcactagcggcaaaatcactgatgaagtgcttgctgagttagccgccgatgtagaaggcgtagggatatggtcaaaatacagaatctctttgtgcgacaatggacattcacagttttacatgctccacaaaaaactggtcgaggtgcagtatacagaagctgttctgcttcagctggaagagctgcaggccgaactcgaagagattggtatagacaatctgatggccgagtttgccaatttccaggctcaccctgaacagtatgaggtcctgttaaccctatga

SEQ ID NO: 7309 - RNA, 1611 nt, synthetic construct
  source 1..1611: mol_type = other RNA
atgggcagagaacagattcgaactgccgctttggaaatcaagaatattaaggacttgcggcgcgttctgaacttggtgaagcgtgacgctcttggagataaagctcaccccttccaccttaagcagatcacatattattcaaatccgcgtcgagccgaagtggttagatacaaagactttactattcccaagaaatgtgggggcgtccggaatattagtgcgcctgtagcaggactgaagtcaatactcacctccctcaataccatcctccaggcaatctacgagcctagcaaatacgctatgggatttgtgccaggacggtccgtggtggataacgccaagatacaccttggtcagaactacatatacaacatcgacctacaggacttttttcccagcatcgataagagccgcgtgtggaaacgcctgacacttccgccattcaattttaccagtgagctggccgatgtgatagccgggttatgtgcaatgagaatggagatcgagggcaatggctctaggtgcgttctgcctcaaggcgcccccacatctcccactctcactaatataatctgcgaaaagctcgataggcagttgggagggctggcaaagaggttcggcgctcgctactctagatatgcggatgacatcacgttcagttcgatgcagtacatctacgccgccgatggggagttcatggcagaacttcatcacattatcgccacgaaccgctttactatcaacgaaaaaaagaccagactacagaagaaaggcgagagacaagaagtgaccggcctggttctgagcgacaaggtaaacgtgatgaggcgatatgctagagagctccgaacactgctgcatatttgggagaaatacggacatctggctgcttgtgagagttacatgaaggtcaggaaagccaacccagtgtatcgccacaaaggtggtatgcctactttagacgccgtcctcatgggcaaactgcagtaccttaagatggtgaaaggggaagaagataccacctacaaggccctctacgcaagattctgtaaactgacaaataaggcaccccaaggagtaaaatatccaactccctactcatcccatattgtctatctgcatacaatgtcacggtccgaattcgaagaggcgctcaggacgaccattaaatatcgggaagacaaggagccaaagctgtattttgtaataggggacgtggagcggcccatcacatggtcccactctgtgccgattggccagctgctagagaacagcgaggacgggtataagctgtggggtaagtaccaaatttctctgtgcgacaatggtaccacccaattctatatgttacacaagcggcttgtcgctccaccatatacaaacgatgggcgtaaactcaccgaaaggttgcagaaggagctagcagcgttagtcgacagcgatatcttcactcaggtcttgggcgttgatgaggaacctatgtgccctaaaatcgatccctccgagggagagcagctggctttgaaaaatgagaagtggaacgacgccctggatattatggccaggctggaggacatggacattcctgagcctccagaagtgaccctctga

SEQ ID NO: 7310 - RNA, 1377 nt, synthetic construct
  source 1..1377: mol_type = other RNA
atgcgggacattagggatctgaggagtctgctcaatcgtgtcaaaagggatgccctgggcgacaacgctcacccattccatctgcggcagatcacatactactcagaccctcggagaactgacgtggtgcggtataagtcattcgccatacctaaaaagagtggaggggtgcgcgcaatctcagctcccgttgccggactaaagtctatactcacaagcctgaatactatcctgcaagccgcatacgagcccacccggtacgctatgggatttgtggaagggagatccgtagtggataatgccagagtccacctcggccagaactatgtatttaacatcgacctcgaggatttcttcccctctatcgacaagagtcgtgtttggaggaggctgactctgccgccatttaacttcagcgtcgaacttgcagacgttgtggcagggctctgcacaatgagagttgaggcagagtgtgaaggcgataagcctagatacgtcctccctcaaggggcgccaaccagtcccacgatctcaaatattatctgcgagtctctggaccgtcagttggccggcttggccaagcggtttggcgccaaatattcgcgctatgctgacgacatcacctttagcagcatgacatacatatattctgctgagggagaattcgtcgcggaacttcgaagaattatcgctgcaaaccgctttaccatcaatgaaaagaaaacccgactgcagaaggtgggtcagcaccaggaggtgacgggactggtgctttccgataaggtgaacgtggcccgcaattacacgagggagcttcgaaccctcttacatatttgggataagcatgggtttatgaatgctacagtatgtttgatgcgagctcgggacaagaaccccgtccaccgacacaaatggggaaaaccatcgctggaggcagttgtgggcggaaaacttaactatctgaaaatggtgaagggcgaaaaagattccacttataggaacttgtacgagatcttcgaaagatgctactctagagataaaaggtactttgcccgcgaggatactaaggtcggcggtctaaagttcctgataaccatggacgtgtttacatttatggcgaccatgaatattctgctggagtacaataaaggcgggtcccccgaggttttctttaggtggggcgactataagtgtccgatttccgtaagccgcatggtgcctgtcgccaaattatttgaaaatgccggggaaggtatttgtaagatgaacaacttcgaattgtccctgtgcgatgatggttctactcgcttcttcctcctacatagacggctcccaattagcagctggatgaaattcaagttagtggacgagttgtga

SEQ ID NO: 7311 - RNA, 1590 nt, synthetic construct
  source 1..1590: mol_type = other RNA
atggaaagaacagaaatacggacgacagcattggcaatgaaaaacattaaagaccttcggagacttctaaatcaggtaaaacaggatgctttaggcgacaagtttagaccttttcaccttaatcagatcacttaccactgtaacccaaaacgcgctacccatcagcgttataagaatttcaccattcccaagaaatctggcggagaacgagtgattagcgctcccgtggcagggctcaagagcatcctcttcagcctgaatacaatcttgcaagctatctacgagccttctaaatacgccatgggattcgtgcagggaaggtcggtagtggataatgccaagctgcacctggggcagaactacatctacaatctggacctcaaggatttttttccctccatcgataaatccaggctgtggaaacgtttaaccttaccaccctttaacttcccaagtgagctctctgacgtgatcgctgggctgtgcaccatgagactggaagaggacggtaaggagacgcgatatgtgttgcctcagggggcacctacatctccaacaatcactaacattatctgcgaaaagctagaccgacagcttggtggtctggccaagagattcggcgccaaatactctcgatacgccgatgacattaccttctcctccatgaactacatatattcaaacgagggggaatttatcaaggagctgcatcgcattatagccgacaatcacttcactatcaacgaaaagaagacccgcctgcagaaagtgggcgaaaggcaggaagtaactggactcattctctcggacaaggttaatgtcgtccggacttacaccagagaggttcgcaccctgttgcacatctgggagaagttcggccacatggccgcctgcgaatcatacatgcgggccagaaagctgaacccgacacataggcataaaggaggaatgcctagtttggatgcggttctcatgggcaaactgcaatatctcaagatggtgaagggagctgaggacgccacttataaagctcttaacagccgttttgccaaactgcaaggccaggagttggccccgattaagtacgcaaaaaaaccactcgcttatgtccacactatgaatcgggaggagttcgaagagactctgtcttcccaaatagaatataaccccgagacaacccccgccctgttcttcaaggtgggcgatgacatcaggcctataacggtcagtcaaaccgtgcccgtgaaagaactatttgcgaaaggggacgaggcggccgaactctggaggaagtatcagattagcctttgtgataacggtatctcattgttttacatgctgcacaagaagctggttgccccgcagcatacaaaagctggcaagcgcaaaaccgttgagcttcaggaggaactatccgcactggtcgaatcagatatatttagccaggtcctgaatgaggataaggtagacgggaagaactataaggtggtcagtatggaggacattgcaagcgatcgcgtggagatcgctaatcgggagaggctcattgcgctgatggaggcagacattcctgagccagataatttatga

SEQ ID NO: 7312 - RNA, 1557 nt, synthetic construct
  source 1..1557: mol_type = other RNA
atgcgagacgtcagggatcttcggttgctgctcaatcgcgctaaaagaggtgccctcggcgcaaaggcgtacccaattcacctgcgccagatcacttactatgccgatccgcgacgcgaagatgttctgaggtacagaaactttcccattccaaagaaatcagggggcgagagactcatttcactgcccgtcgacggactgaaatccatcctgcgcgcccttaatacactgctccaggcactttatcagccaactgcttatgcaatgggatttgtccaagggcgttcagtggtggacaacgcacgggtgcacctcgggcaaaactacgtctataacatcgacctcaaagactttttcacctctatcgataagtctcgcgtctggcgacgtcttactctgcccccctacaacttgcctagccagctagccgatatcgtggctgggctgtgcactatgcgactcgaggagggcgataaagtgagatatgtcctgccacaaggtgcacccacaagtcctaccctgacgaacatcatttgcgagaagttggaccggcagttagccggtttggctcggaggttcgggcttaggtacacaaggtacgcggacgatattacctttagttccatgcattacgtgtactctagtgacggcgaattcgtgacctccctaaggcagatcattgagcagaatcacttcgtgataaacgagacaaagagcagattacagtaccgcggcgagagacaagaggttacaggaatcgtattatccgacagactgaacgtcgctcggcagtatactcgcgaacttcgaaccctgctacacatatggcagaggtatggatacctcgctgctcgtgaatcctatctgaatcatcacgcagagggctctaaatgccgactatgtattcgggacacacgcttagaaagtagcatcatgggcaaactccagtatctgcggatggtaaaaggtgaaacggatgccctttatatgcggctgaagcagaggtttgacgaactgatgaaggagaagggatcagccgtaaaatacgccaagtatggagaattcagctacctctataccgtggatgtgcccttgttcgaatctacttttaacacccgtatttgttacaacgcggagtctgatgtgaagttgtactttgttgacgggggggtgatcaagccaatcgcgcttagcagtaggctggacgcaggaaagctgttcgcctcggacaatgatgagaataggtggcatggcttgcagattagcctgtgtgaaagccattctacgcaattttacatgctgcatagacggctggtgaatccgctcttcagtaagcctcgccacaaaaagaggtcgagccctatggatgagtatgttgagttgttcaactccaatgccaattccgctctgatcgacgagttcttctttagaaattacggtcggagaatgacaatcgatgatttaggcgacgttgtggcccagtcagacgagagcggcgcaatatccgaactggcccacatactggatgctgacattaccgtactcgcccctaaatga

SEQ ID NO: 7313 - RNA, 1422 nt, synthetic construct
  source 1..1422: mol_type = other RNA
atggagcgtgaagtgctcataatgcgcgtggagagaatgaaggataaagaagatctgttggcgctcttaaatgacgttaaagctgacgagctgggcgataaatcataccctttcaccatgaagcagatcaatttctattgtaatcctacctctgtacccaactctaaacgctacaacgatttctttattgcgaaaaaaagcggtggtatgcggcatatcagtgcccccgtcaacgggcttaagagcatccagacttacctcaatataattttccaggccatttacgaaccaagtcagtgggctatgggctttgcccaacatcgatctgttgtgaataacgctcaaatgcacattgggcaaaattatgtcttcaatctcgatatcaaggacttttttccctccattccgcaggcacgcatttggggtaggctccaggtaaagccatttaattttaacaagcagctggctaacgtgatcgccggactatgttgtatgaaggtggtgactgaagagtcagagaggtatattcttcctcagggggcacctacttcacccttactaacaaacgcaatctgcgataagctggacttcaaattgtccaggctggcacagcggtacggcctcaattatagcagatatgccgatgacataacattctcttcaatgcataacgtgtaccagaaagaaagcagattcctgaggaccctgttccaaatcattcaggaacaggggttttgcatcaatgaggctaagactagactccagaagcgtggaagcagacaggaagtgaccggattaattgtctctaataaggtcaacgtgacgcgcaaatatacagaggacatccggaatatactgtacatctggcaacgatacggactgaccgtcgcctaccaaaagttttccaagtactataagaaggagaaaggccacgttaagcagggagaaccaacaatggaaaacgtgctggccggcaaacttgactacctgaaaatggttaagggagagagcgattcaacctatctaaaattgaaaggcacttacgacactttgatgaatcacattcttgaaggcgccgatgggagtattaaatatattgacacccactccatctccgattttgagaagaaccttaaaacgaagatcgagatcaaaaagtctaagaagggcaagcagttcgcaagtttcatcctcgacggcgatgagaaaattgtaagcatatccaaaaacgccgaggacatcacacgcgacaagctgtttatcagcctgtgcgaggataacgagaagaagcgattctattttatacaccggcagatgtggaaaagggggctcgaaacaaagcggaccgaggagaatagtttggacttggacgaaatccttgctcagctgtgcaactccaacttcgacctgtcgctgctgtga

SEQ ID NO: 7314 - RNA, 1422 nt, synthetic construct
  source 1..1422: mol_type = other RNA
atggacagggagaagatcaaactgagagtcgagcatatgaaggacaagacagacctcctggccttacttaatgacattaaggccgacgagttgggcgatagggggttccccttcacaatgaagcagattaatttctattgcaaccccttttccataccgaactcaaaacgataccatgacttctttattgcgaagaagtctggtggggctcgccacatttcagctcccgttaacgggctgaaaagcattcagacttatctgaacatcatctttcaggctatttatgagccatcccggtgggccatggggttcgcacagaataggagcgtggtggataatgcacaaatgcatatcgcccaaaactacgtcttcaatatggatctgaaagatttcttccctagtatcccacaggcccgcgtgtggggaagattgaaagtcccaccttttaactttaaccccgaattagccagcgtaatagcaggattgtgttgtatgaagcttgtcaacgaggacagcgagaagtatatcctccctcaaggcgcaccaacatcccccctgctgacaaacgccatttgtgacaagctcgattacaaactcgctaagcttgccagtcactacggcctgatctactctcgctatgccgacgatatcaccttttccagcatgcataacgtctatcagaaggactctaggtttatgaagaccctcttcaaaataatccaagagcaaggcttccaagttaatgaggtaaaaacccggttgcagaaaaaaggttcaagacaggaggtcacaggactcatcgtgagtgacaaagttaatgtgacccgcaagtacgtagaagatatacgtaacatcctgtacatatggcagaagtatgggctgactactgcatatcagcggtttattgttcactaccagctggagaaaggccatattaagaaaggcgcaccgcacctggagaatgtgatcgcgggcaagctggattaccttaagatggtgaaaggtgaagacgactctacctacgtgaagctgagaaaactatacaatgtattgatgggcgtgcctctgtacggtaattcagaaacagctatcaagtatttggatacccagcgtattactgatttcgaaaagcgaattgggaccaaagtggagatgaagttatccaagaatggaaagaaatacgcgtccttcctaatcgatggagaaaaacaggtcgccaccatctcgaagaacagcgaaaagcttgaatttacgaacctcgtgataagtctgtgcgaaaatcagcagaaagagcggttttatttcgttcacagaccttttggaaaagacgtggatgtgaaaaagaagaagcactctagcatgacgctcgatgagattctcgctaaactatgcgaaactaacttcgacctttcgtatctgtga

SEQ ID NO: 7315 - RNA, 1149 nt, synthetic construct
  source 1..1149: mol_type = other RNA
atggacaaggaacgtataatcgaaaccctgaatacccatgactgcaagacagcattgcttaccctgctgaacgacgcaaagcaggaatatttgggcgataaggcgtacccatttgagttacggcagattaccttctatagcaaccctgcaagcgatgtgaagaggtacaaagatttcgagattcctaaaaaaagcggtggcactaggaagatctcggctccagtcgaaggcctgaagatcatacttaagtgcatgaacatgattctccaggagatctatgagccatcaaagtacgccatgggatttgccaaaaataggtctgtcgtggacaatgctaagcggcacattaaccagaactatgttttcaacatcgacctaaaagatttcttcccttccattacaagagcacggatatgtgcgcgcctcaaggtcaagccctttgagtttagcgatgatatcgccagaatgatctctggtctatgtactatgaaagtgaccgacggcgagaatatcaagtacgttctgccccaaggagctccaacatccccgactctgactaacatcatttgtgacaaacttgaccataaactcgccgggcttgctaaacggtttggacttaactattcccgctacgccgatgatattaccttctcaagttctcataatgtgtatcaggaggaaagtgacttccgtaaagagctgcagagaataatcacggaggacggcttcgtgataaatgacaaaaaaacgaggctgcaaaaacgcggaggcagacaggaggtgacaggggttattgtatgcgaaaaggccaatgtcacaaaaaagtacgtcaaagagatccgaaatttgctgtacatttgggagagatacgggtacgatgaagccgtgaagcgctttcaccccaggtataaggccgaaaagggctacactaaaaaggggaaccccaacctcgatgctgtgctcggaggtaagttgctctatttgaaaatggtaaaaggggaaaacgacagcgtttacaagcgactgcagggtaagtatgatcacctcatggaggtgaagaatcctatcattaaccagacagacaatcaaaccaataatgaggcattaatctccgagctggaaaacctgttagacgaactgctgaagtga

SEQ ID NO: 7316 - RNA, 2370 nt, synthetic construct
  source 1..2370: mol_type = other RNA
atgacacagagcgatattatatccttggtatcccagctggagacaaaagaagatttgcttgcccttttaaacaaacttaagttcgaggatctaggggagcgtagctttagtttcaacattaggcaactgaattactatgcaaacccaaaccataccaagggtagataccggtccttcgaggtgcccaaaaagaagaaaggagccatgcgcactatctccgctccctccaatggactgaagatgctactccgctatgtaaacgtcatcctgcaagctctgtaccggccgggggagaataccatgggcttcgtgcacggtaggtcggtgagggataacgcgtctcggcataatcaccaaaactacatcctgaacctggacctggctgacttcttcccttcaattagtcaggcaagagtctggaaacgattacaatgcccaccctacaatttggctaaaccaatcgcagacatcatcgctgggctgactgctgtgaaggaagtgaccacggatgagagtgggaatgagtgcgtgcggtatgtcctgcctcagggagcacccaccagtccagtgctgacaaatattatatgcgagaggctcgaccgcaggttacagggcgtgggcaaaagattcggcgccaattatacaaggtacgccgacgacatcactttttcttccatgcacaacatctatcagcaggacggagagttcatgcaggaagttatcagaatcattcaagatcaggggtttgctgtgaacaaggagaagaccaggttactcaaaaaaggaagtcgtcaggaagtgaccggtgtaatagtcggcgataaagtgaacgttggccgagattatatacgatctatcagatccctcctgcacatctgggaagcattcggctacacagccgcgtcagcaaaatttcgccagcagcacctcaaggataagaatggatacgttaaaggtgagcctgccatggaaagtgtgatcgcggggaaattgcagtatgtccgcatgctgaagggctatgatgaccctgtatatcagaggctgcggcagaaattagattggttgctcggaatgagcgaccctgaagcagcgattctgcagaacccggattacaaggttctggagactatgcctttgcccacctttgaagaacagaatgcctgtcaggtgcaattttctatgtcgcccaatgggaatagatatgcattttaccatcaacgggataaccggatgactgtctctgttagccatgatattacacagacagtgaaacccttcctagccatctcattatgtcagagaagggacggcagtaggtttcacttgatccataaaccaattccacaggtccccgtgcgacaagaacccgccgtaaaggaaattgagattaggcattggcaccaacccgctatggttacgggtttcctcagaagattcaccgagaaaggtgcactcaagtacaccacccatctttggactcctgccgaggatggcagctatcaatggcaggattttgaaacattctaccaaagctaccggaaggagctctatgagaagaaagacgatcagatcaacatcaacgatctgtatcactacgttcctaccctgaatgctctgatacgcaatttccttattgagtccaagtccccaagcctgtactggtctaaagaatacaagcttgcagtgtcctatggatctccaaaaggctttattgccgactggatgcgccagaccgggaagcagccgtttgagatgcccctcgccgaactccctaaggagtatgtgcctgccgcccccgttcaggggagaacacttgtctactttaacgacgtggtggggatctttaagaatgctattgagttccgcgatgaccagttctactacgccgtcaagggtattttcaagagcgtatatcatcacgtggaccagcagaaattgagcacactgcggggcctgtcattttacaccgacacgtttcaggtcaaaaaggctctgcgcctcattgccagcaatatggagagtagaacagagtatccggaagtggaaatctcagcccagtatatagatggagacgacaactcaccacgtcggctgcgagttactattctgcaacgtgactctttctcagataagtccatctacgatgacaagttgctgctccgacacggatctggccagatgggctctatcaagtcgctgctgcgcagcctatgcgacttttcagtcgagagcagatttagggctcacgacgatttccttcactaccggatagactacctgtacacgactgacgcggacgccccaccttgtcttgtgcagctcgacaagccaactgaagggttcaagtatatactcaccttcgcactatga

SEQ ID NO: 7317 - RNA, 1548 nt, synthetic construct
  source 1..1548: mol_type = other RNA
atgacaaaggaggccatagtcaccgccgccagcaaagtgcagacaaccagggactttctcaacctgcttaacaagataaagatggacgacctgggtgataaaggccatccttttatcatgccacacttgaactactttatccatccagcccggaacaagaagtcatacaaggaattcagaattcctaagaagaccggtgggttccgcgtgattagcgcccctaaagctctgctgaagagctttttgacgtatacaaataaactgctccaggccttttacgacgctccagattatgtgacaggcttcgtccctgaaaaaagtgtagttgacaatgcagagaaacacattgggatgaattatgtctttaacactgacctccaggacttctttccgagcatctccaaatctcgtgtctgggctaccttaaaatttccaccgttcaatttcaatgacactgtcgccgatgcgatttccggcctttgctgtaccgaaatttatgtgaacggggaaacgcgtagagcactgccacagggcagtccttgttcccccatactgactaacattgtttgcaggaatttggatcggcgactacatcggctcgcaaaagagtataaccttaggttttctcgctatgctgatgatattacgttctcaagcaacagaaacgtgttccagaaagggtcagagttccggaataaactcgagggaattataacagagcagcactttatcttcaacgaaaagaagaccagattacagactaaatgtcagcgacaagaggtgacaggactaatcgtgtccgatcgcgtaaatgtcaccagggagtttgtacgcgaactagacaacctgctgttcatatgggaaaaatacggtgaggcagacgcttatgctaaatttctcctgcactacactcccaagcaaaacttccactcttacaagcccaatatgcaggctgtgatccaaggaaagctgctgtacatcaagatggtgaagggagccgataatgaagtttggaggcgtttacagagacgcttcaacaaactgtccggagcaaaaccctctacagtggaggccacactcaagtataagtacactattgcggacttcgagaagaagatcggccaggccctggattttgaactcaataaagacggcgtgatctactgcactttcagtttgaatgggaaaaagacttccgttgcactttctcattacgtccgaactcggatctcaaatattctggcaaagtctgataccgccgcccttgagaaatttaagacgagttacatgctcgtattctatgaacaagacaataccaacttctggagaatcgagcgcaaaaggacctgggtgaagaccaaccttgccgatctgatcgatacatcgtccttagcggaggcactgctgtcagcttctgctatctcggaaaagggcgacgagctgaccagcacacccatgaagagcaccgatgaggttctcgcggccctggtggatagcgactttgacttgaagatcttggatgaatgggacaaaattcggagttcctga

SEQ ID NO: 7318 - RNA, 1566 nt, synthetic construct
  source 1..1566: mol_type = other RNA
atgaataaggaggccatcgtggaggaagcatctaagttggaatctactcatgatctcctaatactgctcaacaaaatcaagatggatgagctaggagataaggggtatccttttaccatgccacagctcaattattacataaaccccattaggaacaagaagagttatagaaacttccgaattccgaaaaaaagcgggggctatcgggaaatttctgcccctaaggccattcttaaaagcttgttgacctacactaacaagatcctgcaggcactgtacgaagctcccggtagtatcaccggatttgtgactggcaaatcagtcgtggataacgcggagaagcatataggccggaattacatttttaatatcgacctccaggacttctttccatccatttcaaagtcaagagtgtgggctactctgaaactgcccccctataaattcaacgatacaatcgctgatgccatcgccggcctgtgctgcaccgagatcgttatagatggggaaaccaggagggcactcccacagggaagcccatgcagcccgatactgactaatattgtgtgcaggaatttagaccggcagcttaacaaactggctaagaaatacaaccttacgtattcccgctacgccgatgatattactttcagttcaaaccacaacgtataccaaaaagacagcgagttccggcaggagttggatgatattatcaagaagcagaacttcagcatcaactccaaaaagactcgtctccagcaaaagaatcatagacaagaggtcactggccttgtggtttctgacagagtgaatgtgaccaaagactacgtccgcgacattgataatattctttatatctgggaccactacagtgaggacgatgcatatgcccgatttctgacacactatagtcccaaacacaatctcaagcaccggatcccaaatttgtcctcgataattcagggcaggttaaactatttgaaaatggtcaagggtgcagacaatgaagtctggagacgcctacaacgaaagttcaataaattaacgggtaccaacaagtcttccaatgacgaaaacgcgaacatcaagtacatctatagcattcctgacttcgaaaagaaagtggagacacagataatcgttacgctgggatcaaacgacaatgtctactgttacttcaccatcaacaattacaagacctccgtaaacctctctaagtacgtgaaaacacgcctgaaaaacatcgttagcgaaaacaatcaggacctgcttaagcgttttatggccaactgtatcctcatcttctatgagaaagaggggagctgttactggaaaatagagagaaggcgcaaacattccatgatttcagaccctaaagactttgatctgaatctgctgctcctgaagattgaggaggtgacactggaacctaagaagtcatccattgctcagacagacaatacctctacctccaagagcacaacagatgagatcctggatgaactggtagactctgggtttgacttaaatatcctggataagtgggacaaaatcaagagttcgtga

SEQ ID NO: 7319 - RNA, 1548 nt, synthetic construct
  source 1..1548: mol_type = other RNA
atgacgaaggaagccattgtggctgcggccgctaaggtgaagtctacgcacgaccttctgattctcctaaacaagatcaagatggacgatctcggcggtaagggatatccctttatcatgccgcacttaaattatttcatccacccggcccgaaataagaagtcctataaagagttccggatcccaaagaaatctggaggcttccgagtaatttctgcccccaaaaacatgctgaaatcattcctgacctacactaacaagctcttgcaggccttttacgaggggccagaatacgtgacagggttcgtgcccgaaaagtcagtcgtcgataacgcggagcgccatgtgggcatgaattatgtcttcaataccgatctcaaagacttttttccttccatcactaagtccagagtttgggctacactgaagaggccaccctttaactttaatgatacagtagccgatgctatcgccgggatttgttgcacagaaatggttatagatggagaaacacgctgggtgttgcctcagggtagtccagccagccctatactgaccaacatcgtgtgccggaatttggatcggatgttgcacaagctagccaagaaatataaccttaggtacagcagatatgcagacgacataacctttagttccaaccgtaacgttttccacaaaaatggggacttccagaaagaactgataaagattatctcatcgcaaaacttcagcatcaatgagaaaaagacccgggtccagaataagaatcagagacacgaagtgactggcctggtggtgtcagatagggtcaatgtcactcgagagtacgtgcgtggtttagacaacctgctgtacatctgggaaaagcatggcgaagctgacgcttacgcaaaatttctggcacattatactccaaaacagaatctgcatccccataagcctaatatgcgcgtggtaatccaggggaagcttctctacctcaaaatggttaagggcgccgacaatgaggtttggagacggttgcaaagacggttcaacaaattaagcggagcgaaaccctctaccgtcgaggccactctgaaatataagtacaccatcgctgattttgaaaaaaagattggacagacacttgcttttgaacctaacatcgacggggtcattttctgtagctttaatctgaacggcaagaagacctctgtgacactgagtcaatatgtccgcactaggctctcaaacatattggtgaaaaacgacgccgctgcacttgagaaattcaagacgagctacatgctcgtgttctacgagcacgacaattccggcttctggaggatcgagagaaaaaggacctgggtgaaaacaaaccttgctgatctgattgataccagtagtctggttgaggcgccactaagcgcagcagccattcctgaggagcgcgaggagagcacaaacaccgcaggaaaatccacggatgaagtattagccgcactggtggagtctgactttgatctcaagactctggacgagtgggacaaaattaagtccaactga

SEQ ID NO: 7320 - RNA, 1365 nt, synthetic construct
  source 1..1365: mol_type = other RNA
atgaccaaagaggctatcatcgcggctgcgaaagatatcaagactacacatgacctcttgaagctgttgaataacattaagatgtccgaactaggcgataaagggtaccctttcatcatgccgcatttaaattacttcattcacccagctcgtaataaaaactcgtacaagacctttagcattccaaagaaatctgggggcgaacgcacgatctctgcaccaacccgactcctgaagtcattcttaacattcaccaaccgactgctccaggccttttatgaagcacctgactatgtgaccggcttcgttcccgagaagtccgttgtggacaacgccgagcgccacattggtatgaactacgttttcaacactgatctaaaagacttctttcccagtataaccaaatctagagtgtgggccacgctgaagcatcaacctttcaactttaatgacacgatcgctgatgccattgctggactctgctgtacagaaatggaaataggaggtaagagccagtgggtgttgccccaagggagtccctgctcacccgtgctgaccaatatagtatgcaggactctggatcacaagctgcacaagttagccaaaaagtttaatctgcggtattcccggtacgccgacgacatcactttcagtggcaatcgcaacgtgttccataaagacggtgagttcattaaaaagctgaaccgggtcatcgcacagcagaactttactgtgaatgaaaagaaaacccgtatccagaataaaaatcagagacaggaggtgacaggcctagtggtgagcgatagagtgaatgtcaccagggagtatgtcagatccttggacaacctcctttatatatgggaaaagcatggagaatctgaggcatacactaaatttattgtccactacatccctaaacagaacccgtacaaagagcggccaaatatgagaagcgtcatcctcggcaaacttcaatacctgaaaatggtaaagggttccgataacgaggtctggaggcgccttcaatcacgctttaatcagctgtccggcgttacccctagcattgaatctgccgtgattaagtatctttacaaggtgtcagatttcgagaagaagattgggcagaagctgaaattcgaaatctttgacaagaaagtcgtacgttgtttttttcccttgaacaatcagcacacagatgtaatgctgagtcgatatgcccggacaaggtttagcaacctcatagtgcaggatgactttgttaagcttgagcaaatcaaaagtagctacatgctgatcttctatgagcagggagggtctggattctggaggattgagagaaagaggcggcagaagctgaagacatga

SEQ ID NO: 7321 - RNA, 1581 nt, synthetic construct
  source 1..1581: mol_type = other RNA
atgacagacaaggcaatcgtggccgcagcctctaagctggaatccaccttcgatctcttgaccctgctgaataagattaaagaagatgagctgggtgataaggcttatccctttaagatggaccacttaaattacttcatcaaccctaaacgaaaccgtgccagttatcgaactttcaccattcccaagaagagcggaggcgtacgcacgatctcagctccggtgaaattacttaagtccttcctgacctacacaaatattctgttgcgagcattttacgaagcaccagactgcgtgactggcttcgtcccagcgaagtcagtcgtggataacgcagagaagcacgtgggtatgaattacgtgttcaataccgatctgaaagattttttccccagcatctctaaaagtcgggtctgggccactctgaaaacaaggcctttttgttttaacgacaccgtggccgatgctatcgccggtctatgctgtacctatgtgaacgagaagggagaagaggataacatcgctctgccccagggatctccttgctcacctattctgacgaacatcgtgtgtcataacctcgactggaagttgtccgggctagcccgccggtttgggctcaattattccaggtatgcggacgacattaccttctcctcaatgcataacgtgtatcaggaaggaggtgaatttatggcagagcttagacggatcattgagggccagcactttcgtataaacgaaaaaaagacaaggctacagaagaaaggagagagacaggaggtgactggccttgttgtctcagaccgggtgaatgtggcaagggagtacgtgcgcgatctcgacaatcttctgtacatatggaaaaagcatggaagagccgccgcgtttgccaaattcagtggccgatatattccgaaacaagatctcaaggcccccgcattcgacatggatcgggtcgttgccggaagactggcctacttaaggatggtgaaaggtgaagagtctcaagtatggcgccgcttgcagaagcgctataacactctgagcggcaaaaaggagaaaaccgttggaaccgacataaaatacctgaacttctacacgatcgaaaatttcagcgctgctactgggttagagctccacttggtcatggacacaataagtattccccgtgaaacacctgaagaggcgggggtcatgcgggttccagtagcctatttcatgtccggcgacaggagaatagacgtagagctcagccactatatgcagaccagacttagaaacatcctggagtcaggggacggcaaagctctggctgagttcaaacataagtacattatcgcatactgccacagttcgactgggtacttttggatgattatcaggtctatgccaaagatggggaacaatgctgacgtttcggaaaagggcgctggcttcatcctcagcgacttgttttgttccgagggggaaagcgttctgagcgacgataagtctacagatcagatcctttcccaactggtcgcctctaattttgatctgaagattctcgatcagtgggataaaatcaagaatagctga

SEQ ID NO: 7322 - RNA, 1464 nt, synthetic construct
  source 1..1464: mol_type = other RNA
atgactgataccgcaatacggcaggccgcttccctgatggaatgccagagtgacttactgtcgcttctgaatcacatcaaagtggatgaactcggcggaaaagctttcccttttacacacgatcaactctaccacttctgctctccacgaagaaatcgaaagcattaccatacattcaccatccctaagaagtctgggggagttcgcacaatctccgcacccaccaaaatgctcaaaagtttgttgcgttgcaccaacacattactgaaggcattctatgatgctcccgaggatgtgacgggttttgtgcgcgaacgttcaattgtggataacgcaagggcgcacgccgggatgaactatgtctttaatacggacctgaaggacttctttccgagcatttccaaatcgcgcgtgtgggcaaccttgaagacctctccctttaactttaatgaccgcattgccgatgcagtcgccgggctgtgttgcacgtgtctcaacggggaagacgagcctgaacggattgcgcttcctcaaggctctcccgcttcccccgtgttaactaacatcgtctgccgcaacctcgatagaagattgcgcgggcttgcacgacggttcggccttcactatacccgctacgctgacgacataacattctcaagtatgcacaatgtctatcaggagggtggggagtttatggccgaactcagaaggattgtgctaggacagcactttgaactaaatgagaagaaaactcgcctccaggtaaggtccgcccgacaggaggtcacagggcttgtggtaaacgacaaggtgaatatcagccgggcttatatccgggatctggacaacctcctgtacatatggcagagacatgggcgatccgccgcctttctgaagtttgtgggccgctacgtaccaaagggagtttggttcggacaggcccacaatatggagcgggttgttgccggccgtctggcctacatcagaatggtcaaaggtgagtgtcgggcgtggagaagattgcaggaccggttcgacaggctgatagccaggggcaaccatccagtgggcagcggaggtaaggatttcatttacaccagtttctacactcttgacaatttcatgaagttttctggattagagctgcaattcatcctggaggacggccgtccaaaagtcttctttgttaaggatggcgtgaggactgacatcactctgagccattatgtaaggaccaggttgagaaatatccttcaatcaggtagcaaggaagaactgaggaaattcacagccaggtacataattgctcattgtgcttttacctatatgagcgatgctgagggactcttctggctgatcattagaagcgtgccgcggaagaaaatcgcgtcactgggcaacaaagacctggcagagctgattactgacctatctctggaaaaagtggaggatgaggccctctga

SEQ ID NO: 7323 - RNA, 1671 nt, synthetic construct
  source 1..1671: mol_type = other RNA
atgaaccgggacgccatcatcaaagccgcttctcaaatggagacacttgaggacctgcgccgtctgctcaatgagatcaaagaggacgagttcggcgataaagcataccctttcagtgagcggcagttaaagtattacattaaccctaagcgcaataagcagtcctaccgccaatttaccatacctaagaaatctggaggagtcagggccatctctgcccctattcgtattctgaagtcactgcagctctgtacaaacaggattcttcaggctttttatgaagcacctgactatgtcaccgggtttgttcctgctcgatccgtcgtcgacaacgctgaaagacacctcggcatgaactatgtcttcaataccgatttgaaagactttttcccatccatctcaaaaagtcgagtttgggccacactgaagacgcggcccttctctttcaatgataccattgcagatgctatcgctggcctatgctgcaccgagttagaactagacggcgaaactcgcgtggcattgccccaaggttccccgtgctcaccagtccttaccaacatcgtttgccacaatctcgattggaaactgaacggactcgctaggcggttccacctccgatattccagatacgcggatgacatcacgttttcaagcaatcataatgtctaccagcccgagggggagttcatgattgaattgcgccgaatcgtaaacgaccagaggctcaccatcaatgaaaagaagatgcgggtacagaagaaggggcagagacaggaggtgacgggcctcgtggtgagcgatcgagtgaacgtcacacgggagtacgtgaggagtctggactctctgctctttatatgggaaaaacatggagaagatgtggccttttcgaatttcctgaagcactatgtgccaaagcataatcggagattccgctcccccgacatgagcaaggtaattctgggtaaattgatgtacctgaagatggtgaaaggagaggatagcccggtatggcaacggttgcaggtgtgttacgagaaccttgcccatagggagccagctgccagctcagacatacagtatctgcactcctttgcgatcgatgtcttcgagaaagggtccggagtgcagttaactttcagtatgaccgatggtaagctgaaatgtctaatggagtataagggcagagaaattagagtgtgcctgtctcagtatgtgcagaagaggttagcgccaatagtggaatcaaacaatctagaggccctcgaaaagctgaagaaacagctgcacattgggtactgtatggccagtcttcttgagacttctgtcgtaaaccatttttggctgctttacaggaaaagacccgttgtgaaggatctccccattactttgaccgaagaaaaagagattcaatcacacatcgaacgttacctgaaggagtctgcaggtgtgcgcaaagcatccgacagaaacattaatgcaggcgagagcatgaaagaatccgtgtcggttacaagcgagatcgggacagaagaaaaaaaagttaaagccgaaagcgaggccgacagcaagactggcaagactatcgacgaggtgttggacgttctggtgagcaagaactttcgcgatctgagtatactggataagtgggacaagatcaagacaaattga

SEQ ID NO: 7324 - RNA, 1554 nt, synthetic construct
  source 1..1554: mol_type = other RNA
atgacgcgcgaagcgatagtgcacgctgcgtctaagttagaaactacccatgacctcttggtgttactgaatagaatcaagatggatgagctcggcgacaaagggcaccccttcaccatgccacagttgaattactttatcaatcctaagaggaacagcagtcactacaagaccttctatattccgaaaaagtccggcggacagcgagagatctctgcacctacccacatcctgaaaagcctgcagacctatatgaacaggatcctgcaagcattctacgaggctccagagtacgtgactgggtttgtaccaagtaagtctatcgtagacaatgctgagcgccacattggaatgcgttacattttcaattccgatctgaaggattttttcccttcaataccacaggctagggtgtggggaacgctacagacacgcccgttcagtttttcgaaggaaatagcttccgcgattgccggcctttgctgtgttgaggcgcgggatgaaaatggcaagctaatccatgtcttgcctcagggctctccctgtagcccaactctgaccaacatcgtctgccataacctggactggaaacttaacggcttggccaagaggtttcatctgaaatacagccgatacgcagatgacattacattttcctccgatcattatgtgtaccaggatgatggcgagttctttcgggaattccgcagaattgtggccgagcaacactttaagctcaatgaaaaaaagacccggacacagaaacgaggagagcgacaggaggttaccggtctggtcgtcagcgatcgcgctaatgtcgcaagagagtatgtgagagatcttgataacctgctgtacatctgggagaagcatggtcacaatgcagccttcgccaaattcatagccagatatactcccaagcaggacctcaagcaatcctcacccgacatgaagtcagttatcatgggacggctgatgtatttacggatggtgaaaggagaggactctttggtttggcgtcggcttcaaaaaaggtttaatcgtctggctgataagaaggaaagctgtggtgggactaacatccagtatctccatgcctacccaatagaggccttcgaaaaagctgtaggcactgacgtgtcctttacactcgaagacgacttcgtgagatgcagctttacgctcaacgggtcagcccacagcgcaagactgggcaagtatgccaagaccaggatccggagcattctggagagtgggaacgaagacgccatgctgaaattcaaggagaaatttcacattgggttctgccatatggatggtacacctgaggaagaccacttttggcttatcttcaggcgccctcccagggccaaagggcttgagatcaccgacgtggatgaaattctaagtctcactgactacgtcggattacccgagaacggcgaaacagattcagctgactccttgacaacagatgcaactctcgaagccctggtttcttctgacttcgacctgaacaccctggacaagtgggataaaattaaatcgaactga

SEQ ID NO: 7325 - RNA, 1083 nt, synthetic construct
  source 1..1083: mol_type = other RNA
atgactaatctggagattgcacatgccgctagcagggttgccaaccttcccggcctgctggctttactcaatcggatcaaagaagacgagttcggcaatcgggtataccccttcaccttgcaggagctgaactactacatcaatcctaaacggagccggtcggggtaccggatattttctatcccgaaaaagaatggtggggatagaaccatcgcgagtccagtgaaaattctgaagagctttcagatctgtgtcaatagattactgcaggctctgtacgaggtgccagaatgcgtctgcggattcgtgcctggacgcagtgttgctgataacgcagccaggcatacaggaatgaggttcgtgtttaacgctgatctgcaggatttctttaccagcattccacaagcaagggtgtggggcgcccttaagacccgacccttttcattccctcccgtaattgcctccgcgttagccgggctctgctgtatggaagtcgatggagctgacggaccccgatatgtgctgccacaaggcggcccagcctctcctgtgatcacaaacatcgtgtgtcacaacctagattggaagttgtccggtttggcacggcgatttcatcttcactactcacgctacgctgacgacataacattttcaggggaccacttcgtgtatgaagaaggcggtgtttttctgaccgagtttcgtcgcattgtagccgagcagaattttaggctcaacgataaaaagactcgcctgaataggcgtggcgagcgacaggaagtcacaggcctggttgtcagtgatagagtcaacgtccctagggaatatgtgagagacttggacaacctcctcttcatttgggagcgctatgggagagacgccgcctatgcgaaattcctatctagatatactccgaaaaaggggcgcatggttaagaagcccgatatggaggccgtggtgcgtggtagaattagctatcttaagatggtgaagggcgcagactcccctgtatggaaaagactgaggaagcggttcgacatcctcataggacgcgcatacttctctacgactacatgctcctga

SEQ ID NO: 7326 - RNA, 1512 nt, synthetic construct
  source 1..1512: mol_type = other RNA
atgaatcgacaggagatcattgctgctacggccaagttagagacacgctacgacctcctgatcctccttaacagaatcaaagtggacgagctgggcgagaaagcccacccatttacaattagacagctgaatcacttctgtcaccctcaccgcaacacttgctcttacaaagtgttcaccatcccaaaaaaatctggaggattcaggaccatttccgctcccggcagactcctgctgagtcttctgacatacactaatcgcattttccaagcagtgtatgaagctccatcctgtactgtagggttcgttcccggacgaagcgtggtcgacaacgcgaaaatgcatgtaggcagagattatgtctttaatacagacttacaggacttctttccatccatcacgcaggcccgcgtgtgggctacattgcagttaccccccttcagcttcaacaagaccatcgcaaacgccctggcgggtctgtgctgttccgagattttgatcaatggagaaatacgaaacgccctcccgcagggtgctcctactagtcccgtcttgaccaatattatatgccagaagctggatcgaagactgacaggattggccaagcgttttcatgtgcattactcgaggtacgcagatgatattaccttctcttctgatcacgatgtttatcaggagggcggcccgtttcttacggagcttaagaggatcatcggggagcagcattttaccataaatgagagcaaaacacgggtacagaagaaaggagcacggcaagaggttaccgggctagtggtgagcgacaaggtgaacgtcactcgcgagtacgttcgggggctcgattccttactctacatctgggaacggtatggccgtaaggaggcggtgtccagctttctccggcactataccgcaaagcataatcttaagaagcaggttcctagcatggaaagggtcctccgcggaagattgatgtatatgaggatggtgaaaggcgaagatgatccagtatggaggcggctgcaaagaaaattcaacggcctgtctgaaagggaaacctttcccggtaacgatgtgaagtatgaagccagttatcgcatcgaggaatttgagcaggcaattggtaccaaggtcgaatttctgagtagtggcacagagtcaagtacctctcggccttcaaatgcccaaccacaagctgttttttcactgcatgggatcatccgatctatatacctgagcaaatactgcaaaactcgtctagaaaaggtgctcgactccgggtcagaagaggaaatggacaagttccggaaacagtgcattatatcactgtgtcatagggccgacgatcctgactaccacttttggctaatccacagacctggcagagtcaggtccagcgtgactgtgctggagattctcggggcagacgaggtgttccactcggccgagagcgctgccaaggacattcttaacaagctgatcgattcaaacttcgacctgtccgtcttgtga

SEQ ID NO: 7327 - RNA, 1671 nt, synthetic construct
  source 1..1671: mol_type = other RNA
atggtgcgcaacgatctcataatccaagaatgcagcaggctcgcctcactcaaggatctgctgtttctgttgaatagggtgaagcgtgaggagtacggctttggcgcgcaccccttcacaatggagcagatgcttcatttctccgaccctcgaaggaacagacgacattatgacactttcgcaatcccgaaacggtcaggaggacagagaaccattaccgccccccggggaatgctgaagagtttccagaaagttgcaaatcgcgtctttcaggccttttacaacgccccaccttgtgttcaagggtttgtaacagggcgttcggtcgtcggcaacgctggcatccacgtggggatgaattatgtgtttaatagcgacctgaaggatttcttcccaagcatcacccaagctagaatctggactgtacttcaagcccccccttttaattttcctaagcgtatcgcttcagtgctcgcaggtctttgctgtacggatctagagtacgtgatggccaggtgcgctgacggaggcacttctgtaaaaggtacctctaaagccaagagtgtgctgccacagggtagcccagcatcccctatcctttccaatgttgtgtgcaagaacttagaccgacgcctgtccgggctggctaagagattcggactgagatattccaggtatgccgacgacattacgtttagctctcagcacaatgtgtaccagaaggatggtccctttatgaaagaatttcagcggatcgtgcggaccgaagggttcacaataaacgaaaacaagactcgcttgtcgcgcaggggacagaggcaggctgtgacaggcctcaccgtaaatgatatggtcaacgttccacgaaagtatgtacgggacctggactgcctgattcacatttggaagcggtatggggcctcagatgcttatgcaaagttcctgtcaaggaacatggccaaagtctccggagctgggctcacatactttcccaagatggaggatgttctcaaaggtaggcttgcatacatcggcatggttaaaggccgtcactctccagtctaccaaagactactgggcaaaatggacaccgtgcgccatcggacatctctgggggcgtttcggtatgtccatagctggcgaatttctgagttcgaaagtcttactggtttttccctagatatggaaaaagatccgagcggaaagtggtactgcagattcggccctgagggccatcgcgtctttgtttgtatgtcccgatggtgcaggagccggttgaccgggattttagagacaaatgaccaggcagcgttgaacgaattcaagcgtatgaatagaatcgggttatgttttgacgccagaagcatgaatatggaggcccggtgtgagagccagatagtggacgaattgagcccatacctggatggcccatactctggacaccgcttcttctggatgattttcagaagggtcagtcctaactccggaccccacaagagttttttcgagctggtggataagcgggtgtctaaagaaggtagagagctcatgaaaactttgggcctgaaacccgtgtccatttcaaaaggccccctgctcactaacacggaccctgtgagtcccaccgactgtttcgatgacacctatgatttctacatacgcccgttctga

SEQ ID NO: 7328 - RNA, 1476 nt, synthetic construct
  source 1..1476: mol_type = other RNA
atggaaaggcaggagatcagagaggccgcatcactgatgacaaacaggcactctttgctgacactacttaactccctcaagaaggatgatctgggtgataaagctcatccgtttaccatggcacagctgaactacttctgccatcccacacgcaacgcgaaacattacaaggtctttaccattcccaaaaaatccgggggcgtcagagaaatttctgcccctgtaaagatgctgaagtctttccagacatatacgaacatgctcttgcaagcactttatgaaccaaccagtgcggccatgggattcgtgcctggcagatccgtcgtggacaacgctatgaatcacgttggcatgaattacgtgctgaatcttgacctgaaagactttttcccaagcattccacaagctcgggtgtggggtgctctgaaatcgaaggcaattggattcaaccaagaagtggcttctgcggtcgccggcttgtgctgcaccgagattgatttctatgatggtaagcccgtactaaccacagttgacctgccaaagggggccaagacggagaagcgcaacgtgttgcctcagggcgcacccactagcccaattctgactaatatcgtgtccaggaacttagaccgccgtttaaaacatttagccgcccgattcggcctcaattatacccggtacgccgacgacattacatttagctctatgcacaatgtctaccaggaggagggtgagtttatgacagagctgagaaagatcgtggccgagcagaattttaccatcaatgaaaagaagactcgattccagaagaagggaagccgacaagaagtgactgggctaatagtttcagatcgggtcaacgtcacccgtgagtatgtgcggagcataggctcactgctctacatctgggaaaggtatggctatgacagtgcctttgcccggttctttcagcactacaccttgaaggtgaatagagtgagccccccctcaatggagagggtgctgcagggcaaactgatgtacctcaaaatggttaaaggagaagaaagtcttgtgtggcagagactgcaggatcggttcgataaagtttgttccaagaaacctgttaaggtgtctgatattaactacgtggctgcgtatactatgcccgcattcgagaaacagtttagcacggagatatcgttttttgctaaggagatcccgggtaagaaagagaagggaccagtcatcagttacggggcctcctttaagtcagggaacgaagggatcatcatctccgtatccgacagctgtaaagagctcattgcatctgctatcggggacgaaaaggccgttactgatcttaaaaagatgctctatgtggcttactgtaagcgcggagaattcccttattggctcgtcatgaaaagtcgccctcgtaatatatacgcaagcactgtaaggcgcaaagagggcgacctgttcttccacggatga

SEQ ID NO: 7329 - RNA, 1824 nt, synthetic construct
  source 1..1824: mol_type = other RNA
atgaacatcatcctccataacatcatttactacttcaggctgaacggtaataaattgccggtgcacaaagaaaaaacaattcaggtctgcctagaaagatttatcaatgtatcaatgacccagaaacagatcattggaaaagtgcatggactcaaaactaagatggacctgctcaatttactgaatgctctgaaaaaagaagacctggggaaggattatcacagattcacccttgctcaactcaactactactgtaacccgaatagaactccacacaagcgttaccgaaattttacaatccccaaaaaaagcggcggcgtcagaaacatctccgcacctgtgagggggctgaagtccatgctcacttatctcaacattgtacttcaggccatgtaccagcccactgatgcagcaatgggttttgttcccggtcggagcatagcagacaatgctgccatgcatacctgtcggaattatgtcttcaatacggacctgaaggacttcttccctagcatccagcagccacgtatttggaagatcttacagcttaagcccttctcacttaacaaagagcttgcctcggttattgccggcctatgttgcatgcaggatgccaacggtaatggcgtgttgccacagggctctccctgcagtccaattctgaccaacattgtttgtcggaacctggatcgaaggctgacaggcctggccaaaaggtttaatctgaagtactctaggtatgcggacgacataaccttcagttcggactacaacgtgttccaggacgattcagagttcatgaatgaatttatgaggatcgtcgccgatcagaattttaccatcaacgaaaagaagacgcggttacaaaaatccggccaacggcaagaagttacagggttgatcgtgaacaaaaaggtcaatattgctaaggagtactatcgggacatacgcagtctgctgtatatctggagtcgatacggcaaagagcaggcatatgccaagttttgtgtgagatataaggcctctaaagcttataatgctaagaagaagggaatgcctagcatgcccgcagtgatttctggcaaactgctgtatctcaagatggtgatgggagaggacagtactgcttacgccaagctgagagataattttttgaagctgtgccctgagcaaaaaaacgtcctgaagaatacgaacctcacctatctcgccagctaccgcctggacgagttcgagagcgcttttgggactaacgtgaagtttgaatataaaccattcagcaacgtctccgggaaatccaagactatggggagcttcttactcgaagaagagatcgtatcagtatccgttaatgtgagatgcgattctatagtggataagtatctagccaacccggatgaaaaagagttggagaagatcaagcgcaggctgtacatttccctaagtgaaaggggaaacgatcgtttctggttaataacaatcgcgcgcatgaacaacgagcacaagaaatcctataaaggctcatacgtggctaaagtcaaggtgcgaccagaggaaataaagaaggaaggaatcgagctgaagcgcgaggtttacgccgaaattatacgccccaccgagattttggagaacaatgacctcgacccaacccatcctggacctcactactacaattctacataccggaaatgggtgcctgtcgacgatgagcagtttgaggatatccccgatagcgaagagatcgacgcgatgctggcatcattggtgagctctgggtttgatcttaacacacttaaggagtgggacaaaattaagaagaattga

SEQ ID NO: 7330 - RNA, 1653 nt, synthetic construct
  source 1..1653: mol_type = other RNA
atgagccggaccttcatcagcgtgggtatgaacaagcaacagatcatcgagaaggtgaggggcttaaaaactaaggtggatctgctaaacctgctcaacgcgctcaaaagggatgacctaggaaaagattgctaccgctttacacttaatcagatcaacttttactgcaatcctaatcacaatccctcacgacggtacaaggatttcacaatccccaaaaagtcaggcggggtgagaacaatttcggcccctaagggaagtctgaagtctatccttacctatctgaacgtcatcttccaagccatgtacgaaccgagcgaagctgctatggggtttgtcccaggccgcagcatcgctgataacgccgcaatgcatgttgggagaaactatgtattcaataccgacttgaaggatttcttccctagcatccaccaggcacggatctggaagatgttgcagttgaagccattttcccttagcactgagttagcgagtgtaatagcagggctctgctgtatgcaggatccaaatggcacagtcgacaaaagtggtaagatcattggtgtgcttccccagggctccccctgttcaccaatactcacaaacatcatttgtcggaatttagatcggaagctgttaggtctggccaagaggtttaatatcagatacactaggtacgctgacgatattacgttttcgagcgattacaatgttttccaagaagggtccgagtttatgaaagagttcacgcgcatcgtaacagagcaaaggttcaaaatcaatggctccaaaaccagactgcagaagagtggacagcggcaagaggtcaccggcttggtggtgaataaaaaggtgaacgtcacccgcgattattacagggacctgcgttccctgctgtacatttggcagagatatgggaaggagcaggcctacgctaagttttgcataagatataaggagagcaaaacctataagcgaaaacagaacgaaatgcccgacatcgtggcagtagtttctggaaaactactctacatgaaaatggttatgggcgaggagtctacggcctacctgtcactgaaaaacaaattcatttccctgtgtccagaacagaagcagatcctggatactaacctgcactatcttgcgtcatatagactggacgaatttgaaagggcttttaacacccaggtcgtgttcgcctataagccccagaatcgcgtcgtggggaaatctaagactatgggaacatttgttctgggagaggagaagcatgttgtggcaattaacatacgatgcgactccattatagataagtatctcagtgcccctgacgacaagttgatgaaaggtctgcgtaaaagattgtacatcactctctctgagcgtggatctgaaaggttctggctcgtgactattgcccgcatgaataatgaacattctcgcagctttaacgagtcctataaggccaaagtgcgaaacgaaattgaaaccaattcaggcgaacctgtggatgtcattgactccatgtacgaaatggacgtgtacgactgtttcccggagaacatagacattgacggccttctcagcgagttcgtcaagtctgagtttgacttcaataccctgaacagttgggacaaaattcggaaaaactga

SEQ ID NO: 7331 - RNA, 1995 nt, synthetic construct
  source 1..1995: mol_type = other RNA
atgaaggacataagtacactcaggtgcgaaattaaaaagatgagaactcatctggacctcttttatgtgctgaacgaggtcaagaagcattatgccgagactgaagggatctctttttaccccatcaaccgatcaaattttgaatactacatcagcagcaagaccaatcgcaatcagtactataaagagttcgacattcggaagaagtataatgacggcaagagacacattatcgctcctttcatgggtctgaaagatatccaaaaggcaatcagcctgatgctgcagctgatctacaccccgtacaacaatgtgaacggatttgttcagggtcgttgtattatgcagaatgcctaccctcacgtattccagaattacatcttcaacatcgacatcaaagatttctttccaagcatacaccaggccagagtctggaaaaaactccaactgcctccactgaattttcctgttgcgattgcaaacgctatagcaaacgtctgttgttatgaactgatcaatgacgacgatactaagattggagtcttaccgcagggggccccgtcttccccaattttgtctaatattgtgtgcgagagactagactggaagctgcgaaagcttgccagggagaacaatcttatttataccaggtacgcagatgatatgaccttcagcggtatgtataacgccttctcacccaagagcgaattcatcattaagctctatgcgacgatacacgaggaaaacttcgtcgtgaatgaaagcaaaacaagtcttatgaaacggggcgcccatcaggaggttactggtctagtcatctccgacaaggtaaatgtgccacgctcttatatccgggaaatccgatccctcctctatatctgggagcggttcggagaaaagacagcttcctaccgctttgcgttgcacaacagtaaccgaaaagacaaaaccctgtcagagattggaactttagagaatgttctgcttgggaagatcgaatatgtaaagatggtgaaaggcgccaatgattccacctatctggcactgaaaggcagactcgataagctgcttggagccgaactctcaaagaaagaaaaaaggcgggagagccgggagaagaagctacgtaaagtcgttccccacaatctggaagagacacaaaaatttttccacctgtttgattaccctgagggctttaagtatttgacccatgactttcccgaaggggaagagtggagtgtcgataagctgaaagagcagtgcataggtattctgaagaactactcaaattactcacagattcccacttcgctgtgggctctggtgaacgtgtttgtcatagggaagtactataagaagacagactggattgactacgaagggcatgaccagaggattacatactccgatttcgtgggaggagagggccaccctatcctcggagatcataaggaggtgatagagcgcttcaagaacactattagggtgaggatgaggtgtctgtacaatttgtgcgtaagttggaatgaccccaaatacggcctgaacatcacaatggataaaaacgagttgaacaaggcagatttctacaccaacgtgttcatccttaaaaaatccgtgcagcgtattttccaaatgttcgcttctcgcaatgacaaaaaggacgttaacattcactatcacaaggaggacattaagaatcggcgctgccatatcctcacgataacccaacaggacagctactccgagaagggggttgatgagttaagacccaaactacacggcgggggcggcgattttgctacgttgaaacacgacttgagtggctactgtaactggtctgtgttatctgtgtggaacgaaaaaccagccaagtggaacatacttagagaatcggatgtggatgagatcgaggaagtgaccgacaaaccagtaggctttacccatatcctcacattttatgggaacaaattagaggaggatatccatcactga

SEQ ID NO: 7332 - RNA, 1887 nt, synthetic construct
  source 1..1887: mol_type = other RNA
atggccaaagaattcggggtggagtattatcccatcagctgggaggattactgctacttctcatccccaaaacgatctgttcgcaactatatctccttcgagatccctaaaaagagcgggggttaccgacatattagcgcccccgtgaggggactgaaagagatccagaagtgtctgaactaccttcttgagctcatgtactatccaaaggacaacgtaaccggatttgttagaggaaaatctatcgtggacaacgcatcaccccatatcggcaagaactatatcttcaatgtggacttgcaggacttcttcccctccattgaccaggcaagggtgtggaaaaagctgcagctgcggcccctctgcctcactaaagaggttgcctctgccattgccggactctgtagcatggagatagaggatgaaaaagggaataaacggtacgttttgccgcaaggagctcctacctcgccaatgctgagcaatatcgtgtgcgaacgattagactggaagttgagcggtgtcgcgcgcaggtttggactgacttatacgcgctatgctgacgacattactttttcttctatgcacaacgtgtaccagcatgatggcgacttttgcaaggaactgagacatatcatagaggatgaacacttcaccttaaacacctcgaaagtgaagctccagaagcgtgggggccaccaggaagtgactggcttagtcatcagtgataaagtgaacgtgcctaaggcttacgtcagggagatccgctcactactcttcatgtgggagtgctacagctatgctgtcgcctcccagaaatatgccctgtatcacaatgcctatgtcaaacaccggacctatggcgagttcgtatcactcgagaacgttctggacggaaagattgaatacctgaagatgattaaggggtgtaagaacccactgtacctgacccttcgtagtaggctcgataagctgataggcaagtccacgaagaaaaataaagattgcgaggtcatagaggtagtgaataacaaaaaagaggtgaaaaagcacgacatcgaagcgacatatgaggtgttgcatttatttgaagagcccaatggattgaaattccttactcatgacttcccagatgcttcttggagtatagataagctactaaaacagtgtcggacagtgtttaatgaagaagcaaagggacacccgaacataccccagtccctgtacagtctcgttcacacattcatgtccggcgtcagcaataatatcaagggctggctaggttatgatgaaaagctgcacacggaaacttggaacgactgggagaaaaagaaagagcaccctatcaagagatatggcgacatcatcgacattttccgcaatacaattaggattagatcaccaaagctgtttgaccttattaaagcccttgaagggcagaatacacaatttgtgtttgactacgatagcaaggaattgaaaaaggcagatttttacaccaacgtctacatgcttagatggtgtctggtccatgttctgctgatgttcggtcaataccctgagcacaaggaactgaatatttcctgtacccgtagtagcatgaacggctggattgtctacactatccagtttacacaagtagggagtttcccttccgcagatattaatgatgcgatcaagagagtgaacgagggggctggggacttgggcgtgattaaagagaaaatgcggtcttactgcaattggtctatcatatcaaagtggaacgataagaatctgcggtggaacatcctccgcagcgagggtgtaaaggaaattgaggaaatcgccgagcaaacaataggctttacccatgaattcgtgttttacaagattaagtccaactga

SEQ ID NO: 7333 - RNA, 1143 nt, synthetic construct
  source 1..1143: mol_type = other RNA
atgaaccgcgagacaattgcagaaaaagcggaaaagatgaccgagaagcaggacctcctccacctgcttaatgaggtgaaggttgacatgctaggcgataaggcccacccatttagtttgaggcagctgtgttattactgcaaccctagagtgaaccgaaaaagatacactgatttcgagatccctaaaaagagcggcggaaagagacgaataagcgcccctgtcaatggtctgaagtcaatactcagctgtcttaacatcattttccaagcaatgtacgaacccagcgagaatgctatgggcttcgccgtcggaaaatctgtagtggataacgctaagatccatgtcggaaagaattacgtgtttaacacagacttgaaagacttttttccttctattcaccaggctcgagtgtggaaacgcctccagctgccaccctttaactttaatcagaacatcgcaaatgtgatggcagggctgtgttgcatgaaagtatccagcccagagggcgacaaatatgtccttccccaaggagccccgacttcccccattattactaatatgatctgcgacaaactcgatcgtaggctgaatgggctggctaacaggtttgggctcacatatacccgctatgctgacgacatcacgttctcctctatgcacaatgtctaccaggaagacggcgagttcataaaggagctgcggcgcatcatcgaagaccagaatttcaccattaacgattcaaaaacgaggctgcaaagaaagggtagtcggcaggaggttactggcctgacagtttgtgccgccccgaacgtgaccaagcagtacgtgcacaacatccggtccctgttggccatttgggaacatcacgggtacgatattgcctatagacggttcttaccaaggtatataggtgagaaggggcatgtgaaaaaaggttcacctaacctggatagtgttcttgctggaaagctgttatacctcaagatggtgaagggcgccgataaccccttgtacgcaaagctgcaatgccggttcgacaatcttatcggaaccatgaatggggaaatgacctctgatactgaactacgtttcttgtataccatgggcgcgaaggagtttgatttcacacattcgaaatga

SEQ ID NO: 7334 - RNA, 1572 nt, synthetic construct
  source 1..1572: mol_type = other RNA
atggacaaatttgaaactagaaaaagagtctccagcctgcagactaaagcggatctgttgaaactgctgaacgatttgaaggtaaatgatcttcaggaaaacgcctatcctattcccatgaaggccatcaatttttactgcaaccccgctcatgagaagcgatacaagtcattctcaatccccaagaagtccggcggacaacgggtgataagcgccccatgccggggtctgatgtcaatcttaacctacctcaacgtgatgttcgaagccatgtatgagcctgccccctgtgtttgcggcttcgctatagggaagagtgtggttgataatgcgaataatcatgtgggaaaaaactatgtcttcaacttggacatgaaagacttctttccgtctatccagcaggctagggtgtgggccaggttacaagcagcaccatataacatgaaaaaggacgtcgctaatattattgccggactgtgttgcatgaaaactagcgacgggaaatttgttttgcctcagggagcacctacctcaccaattctgactaatatgatctgtgaacgccttgaccggagactaacagggttggcgcggcgcttcgggcttagctacagtcgttacgcagatgacatcacgttttcaagtatgcacttcgtgtattctggtgatggagatttcatgaaagagttaaacaggattgtctcggaagagcattttagcctcaacgataagaagaccaggctgcagaaaaataatgtaagacaggaagtgacgggcattaccgtgaacgagaaagccaatgtcacccgaaaatacgtgcgggagattaggcagctcctctacatttggaaaaagtacggatataatgacgcctactctaaattttatccaaagtataaggccgagaaaggccacgtgaagaagggcgaacctgtgcttgagaacgtattgagcggcaagctgctctacctgaagatggtcaagggtgaggaagattccacctacctgcgcctgcgaaagcagtttgataaactttctggcgataccattctgcacaagagcacttccgatgagttcaaatacatcctgacatatgaccttagtaacttcatagctgtgaactcgatcataccatttaagctgcatatcaaggacgaggacctccagaccacagcctccggcaactacaaaggaaagatggaactcaatggggagtacatgtccgtgtttatcagcaaaggagttctaaagcagatcagaactgccgagcagggtgattatacggacatgtggaagtgctacatctctctgtgtgagagtgcaaaggggcgtttctggctcatccatcgcggcaagcacgacgaagctacacacaatcccgctccccaaaagacaatatcccagattatcgacatatgggcaaaaaagggcctggagaaggcaaaggaggtcttcgaaaacgtgcactatccgacaggggactctattgacatcaaagccattctagatgtatgggaagagaaaggtgctgacgctgcggaacagctctatgagcaatacgttaaacaatga

SEQ ID NO: 7335 - RNA, 1668 nt, synthetic construct
  source 1..1668: mol_type = other RNA
atgatcgccgagagggctgcccagatgaagaccagggcggatctgctcctgcttttgaatgacatccgccatgacgaactggccgaagctgggcgggaggaggattaccacccattcacgcaacctaagttcaacttctatataaaccccaatcatactcagggccgctatcgggagttctacatacccaaaagatcaggtggtcggagacggatcagtgctcccaggaccgggacctacaaatacatgctgcacgctctgaacctgttgctcggatctctgtacacacccagcttgagcgcaatgggattcgcacccggacgctccattgttaccggcgctgaaaagcacgtggggcagcattacgtttttaatacagatctgcgcgatttttttccatcagtacggagagcacgggtgaaagcccgactactcctcccgccctttgggtttacagaggaagtagccatcgccgtagcaggtctgtgtaccgtccgagtggaggcccctggtgatgacggccaacctgctcgtcctatctacgttctgccacaaggagctcctacttccccactgttaacaaatgccgtgtgcgaccgcctagacagacgccttaccggcctagcgaggaggtgtggcgcaaattacactagatatgccgatgatatcacgtttagctccccccacaacctatgcgttgaaggctccgccttccgcgctgagcttgccagaatattggctgtagagggattcgagatgaacgaagccaagaccagggtgcagagatccggacagaggcaagaggtgactggcctggtcgtgaatcgaagagtcaatgtgtgccgtcattatgtgcggagcctgagagccgtgctctatgtctggcgacgctacggctatgatgctgcccttgccgccctgttgcggcatgaccgagtggtgccagagaggcgtggaaggaggcgccttccagacctcaccagggtcattgaaggacgcctgttattcgtgagacaggtccgtggtacggcagacccactgtacgcccggttacaggccgcatttgacgcattggtggcttctatgagtgctcagaagtgtgaaaacggactcaccttcatttggacagttccactggaacagttcgagaagcagtatggtgcgactgtcaagattcactttttcccagcagaaccgaccagtcagcccacaagctcggactcagcagccgagacaaacgctccttctgccgatgcgcagtctgccccgactgcgatggcctcttgcaggtttactcttcctcggaaccgagctaaagggggggacacctatgatgctcaggtggagttgcctctcacggtgagtagacggctcacccctcagacacctcgtgaggggatggcagtttcattctgtagagcgacaaaaggcatcccgtttctgctcttacaccgacagggggctgtgaccgtggccattattactggctctgggatggcaggcggttcccaacccgctggaaacgccccaggcatctttgcaacactgcccgtctatgggaaacggcgcctcgccagcgccgttcaagcagatcagggcgaaccccccgtcgacgttgatgcgctgctggcagagctggaaaactaccttactgaccacaatggctga

SEQ ID NO: 7336 - RNA, 1407 nt, synthetic construct
  source 1..1407: mol_type = other RNA
atgctgtaccttctcaatgacattatcacagacgcttatggttcgcaagccgccactattaacatgtggcaatttaactacttctcaaacccaaatcggtgtaagggccggtaccgtagctttcagattcctaagaaatctgggggtgctagaaccatctctgccccttgtaaaagcctgaagtatattcttcggatcgtgaacattctcctgcaggcaatacataaacctagcacagcggcaaaagggtttgtcccacggttatctatcgttgacaatgcggcaccccatgtgggcaagaattatgtgttgaatctggacctgaaagactttttcccctccataagtgaagccagggttcgcgcccgtttgatggctaagccttttaactttactgacgaagtcgcaaccacactggctggactgtgcagctacagaccctatagtaaagagacagcccatcaacgcatagccccctgtgtgttaccacagggcgctccaacttccccaacccttaccaatgccatttgcgaccgattggatatgctgctgtctggcgtcgctcgacgcttcaacctcacctataccaggtacgccgacgacattacattctcttccaaccattacgtattcagcagggatggtgaatttatgactgaggtgagaagaatcatagccgatcagggttttgaaatcaatgagaagaagacgcgcctacagcggcgtcacgaacaccaagaggtcactgggttgactgtgaatgaaaaggtgaatactgccaggcggtacgctagagatatcagaaacttgctatacatctggaactatcacgggatcgcagacgccgagaggtcattcctgtggaactacgataaaagacagagaagggtgcccgacatgatcaatgcgatatcaggcaagctagagtacctgaagatggtaaaaggcgctaatgatcccgtctatgttaggctcagtaaaaagtttgagtccctgcagaatgggaatacagtgctgggctacaagattcataagacctggacgatcaatcggtttcgattcacgcacggatatattagtgtaggatatgagcgcaacgagcttcttgataggctgaagtacgacgatatcccggatctgttcaaaaacgcagtttgcatcgatggacctcacccgtatttctacattgagaagcgaatcaagtaccagggccagctctatttgcaccgacagtttctccgcgtgctcagaaacattgaaacagagttcctcgaattcctgaacgggggcgagtgtcgcaggacctttttcgtgtcagaatgcacccgcaaaaacaaagatgggcggttatggaagggattcctggtccatcacgcaatcagccgggacggatcccacttcctctga

SEQ ID NO: 7337 - RNA, 1728 nt, synthetic construct
  source 1..1728: mol_type = other RNA
atgaatgatctgaggactctaatctcaaagataaacaacttgtctgacctgaccaaggtgctcaattacttcaagcatcgggaaactaatagcgaggagaacctgttcactgaggatgtcctggaaagttacgccaatccttccaagaaagtagcacggaggtataagacattctacataccgaagaaaaacggcaaactccgtgagattagtgcaccaaaccggaacctcaaggaaatccttcactacttgaacatgatgctggccgaagtttaccaggccggtcccagcgctatgggctttgtgaaaggccggtctatcgtcgataatgccaatctacatgttggacagaactatgttctcaatctggatctttctgactttttcacctccatctcccagtctaggatttgtaagcgcctgcaattagccccctttaattttaatgaaaacgtcgcgaaagcaattagcggcctgtgttgcaagaaggtggtaaagggtgggaagaagggatatgcactgcctcaaggcagtcccacctcacccatcctcactaatgcagtctgcgattttcttgacaaaaaattgaggcacctgtcaacacgtaatggagtaaagtatagtcgctatgctgacgacatgacattctcatcaatgcacaatatataccaggagaatgataccttcatgaagaacctgttttccatcattaaagaagagagattcactgttaacccagataaaacacgattgcaaaaaaggggcgagcgacaggaagttacaggattaaccgtcaatgacaaggtgaatactgcccacaagtataccagagagttgagaaatgtgctgtatatgtgggagaaatatggctacaaggacacgtatacttccttctataagcactataaggcaaccaaagggcatattaagaaaggggaaccagtgctggagaacgtgatcatcggcaagttagacttccttaaaatggttaaaggggagaacgatgtggtgtacaccaagttacgatcacgctttgaggccctgaaccccaacatttacgattctaaaaacacgaatagccggtctaaagtcaattacatcgagctctatagcgtggtggaattcgagaaagcctttaagacaaagatcaagtttatcatgtccggcgaaggtaagttgagcgccgtgtacaaaaacgggaagaaagaaaactccatatacgtcagcaacgctgtgaaggacattgtcttcaccgaaaaggctaagcctcgcaaaaactgtagatttaccattagtagcatggagtctttttttgtggcactgtgccggtcgaactgcgtgaattactggatgatgctggctaatgagccagctagagagagacacatccatccaaaatacaacaatctaccgattaaccagctactgaaagagtgggaagaaaaaggactcgaggcggccgctgaccttctcagttccattctggtagatgagacgttcagctccaatggagacaggaaagagcctgctctccctaaactcggtaagaaaaagcgcaagaagaaaagctctatgggggtgcttgaagagctgatgatcgaagattacatggatgatatggagttgcaggcgtcgctgaccgacttcgaagacgaagagacaatagaatacaacacaaaggccatcatgaagctgcttaaaggagacaaggacgggaaggaggagtga

SEQ ID NO: 7338 - RNA, 1743 nt, synthetic construct
  source 1..1743: mol_type = other RNA
atgatggaacgggacaagatttttgaactctcccaaaaaatgaagacagtgcgccatctggctttcattctcaacaagatgaagtgtgaggaatttggcacaatggaatttcctatcactgcaaagcagctgagacatttcagctccccaaaaattgctgacaagagatacaagacctttcagatcaagaaaaagtccggcgggatccgggagatcaatgccccatgctatcagctgaagattatcctgtattttctcaacaagatcctcaaagccgtattcacacccaatgattgtgtgaatggattcgctgaaggtcgctccgtagtgagcaacgcccaatgtcatgtgggccatcactatgtatttaatattgacctcaaggacttcttcccatctatccctcagccacgagtctgggccaggctccaactgcctcccttcaatttttctcaggaaatcgccaatgttgtggctggtctttgttgccaccccaatgctgatggcaccaacgtgctgccccagggtgcagcaacatcacccctgttaaccaacgccatctgcgataccttggatcgtaggatgaagggggttgccaaacgatttggactccactactctagatacgcagatgacatgacattttcatcaatgcacaacgtctatcatgaaggcagcgacttcaggctcgagataaaacggattatcgaggaacaggggtttaagatgaacgagaagaagactcggctactgagggatggtcagagacaggaggttactgggctgaccgtcaactctactgttaacgtgtcaagacactacgtcaagtatctgcgatggattctgcacatttgggaaacggagggctattcgaaagcttactccaaattctatccgaagtataagaaggagaagggatatatcaaaaagggtgagccagtgatggagaacgttatagggggaaaactgaattacctgcgcatggtccgggggagtaataatgccgcatacctaaaattgcaggcgcgctacgacaaattgcagcagctggtcttcattgacaatgagacggataaaggcgaatcctacatatacgtgcagccttataagatggcggaattctgccaagatttctctacgagtatagtgttggagatcagcgccaggaacaagcttgtcggaaggtgcgtactgtgtggtatggataaaaccatcgctatttctaagtccacccaaaagaaactctgtcctgatcttgagaaaaaaaagcccggcgacgtcattactagtgacctgctccccgagtgccatgtgaccttgtgcagaagcaaaggaaagaacttctggttaatcactgagtttaagccgctgcgttcgatttacctttcaatacagaacgcacaggtgaatatagacgagttactggacatctgggacaccctaggccttgatagtgccgtgagcgcgttcatgaacagcattaacgtcagcaactttaagaacaacaattctaaagagggctcaaatatcaacgagaacggggtgctgtccaaagaaaataatccaggcgttcttgagagttctcaggaaaaacacgaacagtatatcgtggggttgggagagaaattacctcagaatacaaaaaaggtgatcgatcaacaccgccaatacgatactggaacagactccagtataattgatgttgacgacgtggactgggatgtactggaatacagcatctga

SEQ ID NO: 7339 - RNA, 1722 nt, synthetic construct
  source 1..1722: mol_type = other RNA
atgaaaactgtgaaacacctggcggtcctgctgaacaaaatgaagtgcgacgaattcggctcgcggaagcatcccattacagctaaacagctgctacattttagtacccctaagatcgcgctgaagcgatacaagaccttccagatcaggaagaagtctggcggggtacgagaaattaacgccccatgctatcagctgagcattatactgtatttcctgaaccagttgctcaaagccatcttcacgcccaacgaatgtgtgaacggcttcacagagggtagaagcgtggttactaacgcccagcgccacattggacaccactacgtgttcaatatagacctcaaggattttttcccaagtattcctcagccccgggtttgggctcgcttacaattgccaccgtttaatttctcgcaggagatcgccaacgttgtcgccggcctgtgctgtcatccaaacgccgacggcaccatgaatgttctgccccaaggagcagcaacatcaccccttctgaccaacgccatatgcgacaccctggatcgcagaatgcgcggtgtcgctaaacggtttgggttgcactattcccgttacgccgatgacatgacttttagcagcatgcataatgtgtaccaggacggttccgatttcaggttagagttgaaaaggatcatcgaggagcaaggattcaaaatgaacgaaaagaagacccggttgctgagagatgggcagcgccaagaggtgactggcctgactgttaactcttccgtgaatgtgtctaggaagtatattaaggaccttcggtggatactccacatctgggaaacagaagggtacgcaatggcttactcccgtttttaccctaagtacaaaaaggagaagggatatatcaagaaaggggagcccgtgatggagaatgtcatcggtgggaaactcaattatctgcggatggtgcgaggcgataacaacgcggcatacctaaaactgcaggcaagatacgacaagcttcaacagctcgtattcgtggataatgaaacagataagggcgaaagctatatctatgtgcagccttactcaattgctgacttttgcaatgatttcgccacaagtatttctctggaggtaagtaccaggaagaacttaatagggaaatgtgacctttttggaatcgaaaagattatcgccattagcaaatctacacagcgtaaactttgtcctaacctggacagcaaagagcccggggatatcatttcatccgagctccttaccaagtgccacgtcaccctgtgtagatcaaagggacgcaatttttggctcattactgagtttctcccccataggtctaagtgccttagcattcagaacgctcaggtggacatcgatgaactcctggaaatttgggacgagctcggcgtggaggctgccatcaaggcgtttaccgactccttcgtagctgattgtgttaatctaaaaacgactgtggagccaaaagacggtcctgcctcaaaaaatacgaatgcagtcgtccaggtcagtggaataaatccaaccgatatagagagactgttagcaatggctggacaagccgaacaggacccgatctcttttgccgagcctatctccgctgacgattgggatgaattgaatatgggcacagacgtggatgatgtcgacttcgacgatttgaacgacattgacaaggataatccaatcgcatccatctga

SEQ ID NO: 7340 - RNA, 1707 nt, synthetic construct
  source 1..1707: mol_type = other RNA
atggaaaaggccgagattagagataaagccatggttatgaaaacgactaagaacctcgccagattgcttaacacaattaaacaggaagagtttggttccaagcggtataaaatcacccctagacaactttatcactttgcttacaccaatattgctccaaatcgttataagaccttccatatacacaaaaagagcggaggtttgagggagatcaatgccccttgttatcagctaggcatcatattgtacttcctcaacaaggtgtttaagagtctgtatacaccatcttcctctgtaaccgggttcaccgagggacgctcggtttatgacaatgctaaaatgcacgtgggccaccattacgtgttcaatatcgaccttaaggacttcttcccctccatcagccaagggcgggtttggacacgattgcagctgccgccgtttaactttacacaagaaatcgcaaatgtggtcgctgggctgtgttgccacaaaaatgcaggcagcactttaaatgtgcttccccagggagcagccacctcaccaatcctgactaatgcggtctgcgacaaactagaccgccgcatgagaggggtggcaaaacgatttggtttgcattatagtaggtatgccgatgacatgactttctcctctatgcacaacgtgtaccaggaaggctcggagttccggtgtgaagttaagaggattattgaggaacaaggctttcagatgaacgacgcaaaaacgcggctgcttcgcgatggagtgagacaggaggtaaccgggctgacagtgaacagcgtggtgaacgtgtccaggaaatatatcagcgatctccggtggattatacgtgtgtgggagaaggagggatatgctaaggcgtactccaagttttatcccaagtacaaaaaggagaaagggtacattaaaaagggcgaacccatcatggagaacgttatcggcgggaagctaaactacttgaaaatgattcgaggcgaaaacaatcctgcctacaagaagctgcaggagaggtacaatagactccagcaagtggtctacgtggacaacgaaactgataagggtacatcttacgtctacgtccagtcctataccatgaaggaattccagaagtatttcgcaactacagtaacgctggaagtgagtgccaaagggaagctggtcggcaaatgcttactggctggtatggagaagataatccctatctcactcagcacacagaaaaaactctgtcccgatcttgagtccaaaaagagcggcgagcaggtcataagtaagatgctcactaagtgccatgtcactctgtgtagggccaagggcaagaatttttggctgatcaccaaatacgagccaaaacgctctaaatgctttagcattcagaacacgaagattgatatcgacacactgctgaacatttgggagcaatacgggaccgagggagccgttgatgtattccagcagtcaatttacaatggccagcggatctcaaaggaaggaattgacggactgatcctgaatttcatcttagaaagcaagtacccaaaactcgacacaaacaaaactcagaagcctcagaagtctgaaagtgaaaccctctcagaagaggagatggctcaactgtcagagtttgcggatctgattgatagttctgacatagatgagttacccttcaccatccagctgaacccttga

SEQ ID NO: 7341 - RNA, 1710 nt, synthetic construct
  source 1..1710: mol_type = other RNA
atggaaaaaaatgagatcaaataccggctgaagaacgtcaagaatcttgaggacttcgccaaactcctgaatgatgtgaaaatagacgagttcaagacagcaaaatacaaaattaccgagaaacaactgctgcacttctgtaaccctaagacagtcccgaaccgttacaaggccttctacatcaaaaaaaaatcaggaggactacgggaaatcaacgcaccttgctaccagctgggcaccatcctctacattctgaacatcgtgtttaaagctgtatacactccctctgaatccgccatgggattcactgaagagaggagtgttgtgaccaacgctacctttcacatcggacatcattatgtctttaacattgaccttgagaactttttcccctccattccacaggctcgcgtgtggaagcgaattcagcaccccccttttaacttcccgaaagaagtggcaaacgtcgtagccgggctgtgttgccatacaaacgcggataagacaaaaaatgttctgccacagggggcagccacttccccactattaactaacgcaatttgtgatacccttgaccgccgtatgaggggcgtcgccaagtattatggcttacattactctcgctacgccgacgacatgaccttctcttctatgcacaatgtgtttgaagagggcggggacttccgcctcgagattaaaagaatcatcgaagaccagggatttaagatcaatgacaagaagacacggctgcaaagagacaatgagaggcaggaagtgactggtctgaccgtcaaccagcgggtaaatgtgtcacgtaagtacgttcacgatattcggtggatcttgcactgctgggaaaaggacgggtatgggaaggcctacgctctcttctatgattattataagcggacgaaggggtatattaaaaaaggcgagcccgtcatggaaaacgttataggcggtaagctgaattacatgagaatggtgaagggtgagaataacgccacttacaggaagctgctggaacgattccttaaactgcaaggcctggtttatgtggatacagaaaccgataagggcatgtcctatatttacgtgtacagctaccccgtgtccgaattcaacgctctctttaagacagatctttctctagaagtgagcgcaaaaaataagttgatcggtaagttccagatcgagcagagagataaagtgcttgccatatccaagcgcactcaagattatctctgtaaagacatcgcccagaagcagccaggcgaggaagttaaaaccgagagactgacatcgtgctttgtcactttgtgtagggcgaaggggaagaatttttggctcctgaccaaaagcgagatgaaacgatcaaagtgcttgagcctcctgaacgctcacatagacatagacaagctacttgacatttgggagaaaagggatattaacgaggcaagtgaggctctcaattatgcgatcacggaaggaaagcctattttgaccttcgaggaaagaatgtttgagaacctgaatctcagcggcttcggtatcttggaaacggtgaagggaaaatctcatagcaagagtgtaagttttgagtcaatcgctgaccagctcagcaagtttgagtcattagagaatatcgaggagttgttaatggagaatgatctggatgactccctggatataggggaattcaaggattga

SEQ ID NO: 7342 - RNA, 1593 nt, synthetic construct
  source 1..1593: mol_type = other RNA
atgaagctgctgaacgagatcaagttgcacgagtttggcaccaataagcaccctatcacagttaaacagcttatgcatttctctaatgccaaattgggcgataaacgctacactgttttctcgattaagaagaaaagcgggggcctgagagaaatctccaaaccatgttaccagcttaagtgcatcctgtatgtgctcaatatctttctgcggagcctgtacactcccagggaatgcgtgatgggctttaccaccgggcgaagtgttgtcggtaatgctgctgtgcatgcagctcaccattatgtatttaacatcgacttgaaggactttttccccagcatcccacaggccagagtttgggcccgtctgcagctgaagccgttctatttttcaaaagaggtcgcatcaatcattgccgggttatgctgcaataggaacagtgaaggcaaaaatgttctgcctcagggagctgcaacgagccccctactgacaaacgcaatctgtgacaagctcgaccgtcgcatgtgtggtgttgcaaaaaggtttgggctccactactcacgctacgcggatgacatgacattctctagtatgcacaatgtgtacaaggacgatagcgactttcgcaaggagattaaaaggattattgaggatcaagggttcacgatgaatgataaaaaaactcggctgcttcgggatggtaggagacaagaggtcaccggactcactgtcaacagcaaggtgaacgtatctagaaagtacatgcaggacctccggtggtacatctccatgtgggaaaaagaggggtacgcgaaagcttatagccgattctacataagctacaagaaagaaaaagggtatatcaagaagggcgagccagtgatggaaaacgtgattggcggaaagctcaattacctgcggatggtgcgcggcgctagtgatgctgcctaccagaaactccaacagaggttcgacaaactccaagagctggtgtttgtggataatcagactgataagggagcccagttcgtatatgtccagccgtatacatataaggagttcacttcgttgtttaataccgatatacagctggaggtgtcagccggaaataagctagtgggtaagtgcaccatcgacgggatagataagtttatttctattgtgaaggccgcccagcggcaactgtgtcccacactggacggcagaaaagccggagatatagtggaatcttctggactgagcaagtgctatattgctttatgtcgttcaaagggcaaaaacttctggttgatgagtctaaagcctcttagacgatccaaaaccctgtccatccagaacgcgaaggtcaacgtcgacgacttgttcgctctctggaacaatgagggtttcgaaaaagccgcagcggcatttgatgacttcgtcaacaagtctaaggccataccagaatgcaaagagaaacctaagaaggagtatttagacggaaataacacacttgacattcagtccgagaacaacatcgtagaacgctccacctccggttgtaacttctccgaagacgatcttttagccgccggcgcagatgtggacttttga

SEQ ID NO: 7343 - RNA, 2868 nt, synthetic construct
  source 1..2868: mol_type = other RNA
atgaaaaaaggaaacgatatcctaatcccgcccgcttactttttgaatgattacaaggaggggttttatatcgaaagacctgagagagactggtcacaatgtgagctttggaaaaacttaccatttgtgttggaggtcggggataataccatcgccacaatcgtcaaaggcgccgacaagcgtagactaaaatacgtctatgtccacatctaccagtcaactaacgacggccgctggttcctgagccccacttggtccgataaaattctcacagagtacccttttcaggaggtaaagacacaagaggaaatcgagtcccggatagcaatcttgaaggagaaggttaagaaactgaatgaggagcaagaacaggagattaagcttccaatagacgagtttatcaagaaacacatctctgaaatcgatacaacccgtaaactcgcactctttatcacgaagcttatgaagacactgttcagtgagaagcatttcgtgaccgagaagcagctgctgtatttcagcacccccaaagccggcaagcggtacaagacctttaaaatacgcaagaaaaacggcgggctgagggagattaacgcccctgtgcatcatctggataaaatcctgttcgtgctcaacatcatctttaagagtctttacacccctaataacgcagtgatgggcttcacagaggggaagtctattgtggacaacgctgctcggcacaccggccaacactatgtgttcaatatcgatctcaaggactttttcaccagtatcccccaagccagggtctgggggaggatccagtgtgccccgttcaacttttcgagggctgtggctaacgtagtcgccggactttgctgtgccacaaattcggagacaggcaaaaacgttctcccacaaggcgcacccacgtctcccctgctgaccaacgcaatctgtgatcggttagaccgacagctcaccgctttgagcaaaaagtacggtctgcattactccagatatgccgatgacatcacttttagctccatgcataacgtgtaccaggaggactctgacttcaggaagaagttaaagacaattatcgaagaccagaacttctgcataaacgataaaaagacacgcctactccggactggtcagaggcaggaagtgaccggacttactgtaaattcaaaggtgaacgttacccgaaaatacgtcagggacattcggtacattctgcacctttgggaatcaaaggggtacgcctttgcctatagcaagttctataagttctataagaccgagaaagggtatattaagaagggtgaaccagtgatggagaatgttattgggggcaagttgaattacctgaggatgatcaagggggctggcaatgaatgctatcagaaactgctccagtgttacaacaagctgcagcagattatctatgtggataataacactgacaagggacataattacgtttacgtccagcagtatactctcacggactttgagaatgacttcaagactaaaatcacactgcagatttcagatgacgaaaagctcgttggcaaatgcaacctctttggcatggataagacgattagtataagtcacaaaacccaggaggaactgtgcccaattatatcacatctgaaagtgggagatactttcacctccgagttactgaaaaactgttttgtgaccctatgcaggcagaaggggaaaaacttctggcttattacccataaagaactggatcgttccagatgcctgtccattcaaaatgcacaaatcgaatcggagaaactcttaaaggaatgggagcaaaaaggattcgaattcgtagttaaacagtttcagacagaaatcctgaaaaaaagcgacgtcccggattacgtctccgagagggatattaaggaatttatatacttcgtcacccacagtaaaaactttgaccgtaaacagaaactgcaacgcgattctcttctcgctcgcgatatggctaagcgcaaagcccagcctcaggaattcaaacctatgagtgttagctatacagccaattttttggcgaatttcaatagacccgacggtttcaagtatttgactcacgactttgataccgaatccaatatgactcttcctgacctgcgggaacagagctacaagcttctcgagtcagaaaagggaaaaatcccagattctctatatgtgttgatatacgcctatctgtctggcaaaacatggcgagacgcgttcggagacaacaacaatatctccatcaatgacaagaagtggattcagtggtctaaagagaacgataatgcccacccaattactaacagtgacttcgaaagcgagatactgaagttcaagaaagcaatcagaattgtacctcccctgctgcagacgattgtggataagatctgtgaaaagtacgagttgcacgtcacgacgaaaaagctagacaaggctgacttttatacaaacacctacattctgtctaacgttttggatagaatcctgcagatgatgaaacggcggaatgaaaacgtggattatcaacgcgacgtggaagtgtcttacaagcgagagattaccaacgacgtggtgtacaagaagataattatactccagaaggacagcttccccgagaatacatttgaggacgtgagcactagaatgaataataacaccgaagccggagatctgggtgcgattcgcaagatcctgaatggatattgctattggagcattgagactaaatgggacgataagtccctccggtggaatatcttgtcagacgatgacgcacctgaaacagagccaattgaggatactttagcggtaggttttcgacacatactgaccttcatgtga

SEQ ID NO: 7344 - RNA, 3114 nt, synthetic construct
  source 1..3114: mol_type = other RNA
atggataagaacaaatacataacgatcaagaacgctgtgttcgataattacaacgaggactgctttttctttgagatcccctccatggacctctcaaacgctaattcctggcatcaccccttccttctgtatgacgggactaacatttactccattcttcgaggcgccgataagtcaaaacttcgatttgcatactgttatatccaccagtcaaaaaaaagtggccagtttttcttcaacattagtctgactgacaagatcattcagaagtacaactgtaagaaaatctctacaaaggacgaatttgagactctgaaagaacagttgaagcagaaggtaaagctgttgaacaaggaatactctcaggatgtgctgccactcgatgagttcatcaagaaaaacatcaactcccttaacaataccagggacctcgccttttttctgactaagataatgaaggtgatcttttcggagaatcatttcgttactgaaaatcagttgaagtacttctgcagcccgaatatcccgaatagatataagacgttcaagatacagaagaaaagcggcggtctgcgggagattaacgcgcctacaaaccgccttaacaagatactgtgcgctctcaacatcgttttcaaaacaatctacacccctcacaatgcagtgtccgggtttacacagggaaagagtatcgcggataatgccattaaacatatcgggcaaaattacgtgtttaatatcgacctgaaggatttcttcacatcgataccccaaaaacggatctggggtcggctgcacgtgcatccatttaacctcagaggccaggttgcaaacgtggtggccgggctttgttgctgtaaaaattcagagacaggcgaaaatgttctgccccagggagctcctacttctccactgttaactaatgcagtatgtgacaaactggacaagcagctgttcaaactaagcaaaaaatacgggctgcattacagtcgctatgcagacgatatcacatttagctctatgcataatgtctatcaggaagattccgatttcaggagggaattgaagattattattgaggggcagaatttctgcattaacgacaaaaagacacggctgctcaggagcggacaacggcaggaggtgactggtctgattgtcaacagcaaaactaacgtcacccgtaagtatgtgagagacttgcggtacatcctgcatgtctgggaaaccaaggggtatgctgtcgcctactccatcttttaccgtttctataaaaaggagaagggctacatcaaaaaaggggagcctgtcatggaaaatgtcatcggagggaagctcaattacctcagaatgattaagggcacctctaacgaatgttatcagaagctcgctcagcaatttgatcgcctgcagcagatcatttatgtcgatgaggacacagacaactcaaaacaatacgtgtttgtccagtcatataccatcaatgagtttgagcacctgttcaacaccaagatcaccctacaaatttctgcacgcaagaagctggtgggaaagtgtgagttatatggaagcgagaagattataccaatttctcacctcactcaggacgagttatgtcccgaaataacaaaattccacgtgggtgacatcgtgaagaatgagaagttagactccttttacataaccttatgccggcaaaagggaaagaacttttggctaatcataaacaaggagctgattcgaagtcgttgcctctcaatcaacgatattattatcgacacggagaatttctttcacctgtgggaaaccgagggctttattatagtcgtgaagctcttccagttcgtgctgaacaagtatggcaactttgataccgagaaggtggtgaattttatcaatgacttatccaaacgcaacgaaatctctaagaaaaaaagactgaccaagaaaaggaagctgcagattgaggaggctctcaaggacgactcttttaagaaaatcaaagaaacggagatccaggaatttgtgtacttcatcactcactacaagcagttcacctacaaacagaaaatgtatgttaacaggttgctgacacgggatcttgccacaaaatacattgagaagacggagatagttattgacgacggaaaacatagatgtggggtgcgatgcgagtatatcagccccaagaagctccagaagtttctgtttgacttcaatcaggacgaagttcttaaatacacctgccatccaatcgattctgaagaggtaatcgaggaaatcaacaagcagtgtaaaaccgacatctatagcgttgaagcccacagtaaattgattctggaacgcttcgaaagcaagtttaagaatgtgaaatcgagtaggaatatgcaaggcctcattttcgcctatttgaaaggtcctaaagaatggagcagcaacagagtggtgattaattggagctccaatgaattgataagttggagcaatgagaataaaggaaaaattgccagtcccggtaaaaatatagcggccaaacagaaaaactacggatttaaattgccaaacccgttcgtatcttccataaatggccaacgcgttgccactttcacgaatcttgtaattttcttcaagacgctgttccacatcaggagagataacagtcttaagaacatcatcacttacaacaacaagtcaatcgagaatgtcaatataaccttcagctcaaactttaatgagaacatcgaactgttcacagatgtggataaactactgcaagcctacaagaacattatcaagatctgcaccgactgctcactcgaaggcgagcagcctgtattcgagatatccttctataaagaggaaaataacgtctacttctgtatccaccacatcaataccaagtatggcaaaacccttgatgattccctgaagcgaattggagagtctcagtccaacctgataaagaaccaaattaatgggctatgcgacttgtttattgaagctgattttggtaacaaggagtatgcaagaattaacctatgggatgaaagcgatgaactgaaagctcaaaatattgccgagatgcagggcgtcaaatatattctcaggttctga

SEQ ID NO: 7345 - RNA, 2679 nt, synthetic construct
  source 1..2679: mol_type = other RNA
atgaatttctgctttcctgataaaatgatcaccaactgtgaaaacaacatcctcgagaatgagcggaacctgaagatttctctgaaagaacacttcgaaccgattgagaatattgaggaacaaggggtgtctaacaaagataacacaaagtctctgtcaatcgacaagcttataaaggaacatatcttcaagacagactcgcccaataagctggcatggctcatctctaagatcatgaaggaggtcattagtgaaaactacttcgtgacagagaagcagctaaaatacctgtccacacctaaagtgtccaacaggtacaagacatttaagatcaagaagaaaagcggcggtactcgagaaattaatgctcctacaaaccggctgaataacattctctactctctcaacttgatattcaaatccttatacagtccccatgaagccgtgtgcggttttactgaaggtaggtccatccgcgacaacgctctccgtcacgtggggcaccactatgtgttcaatatcgacctcaaagactttttcactagcatacctcaggcaagaatttgggctaggattcagtgtgcgccatttaatttctctcctagtgtggctaacgtggtcgccggactgtgttgtgtatacaacgaggaactgggcaaaaacgtgttgccccaaggggcccctacatcacccctgctcaccaacgccatctgtgacaaaatggaccgcaagctggcggcgttagccaagaagtacggactccactactccagatatgccgatgacatcacctttagctctatgcacaacgtttatcaagaggaatcagaattcagaaaggagatgaaaaacatcatagagggacaaggcttctgtctgaacgataagaaaactcgcctactgaagtccgggcagcgccaagaagttaccggcctcaccgtcaatagtaaggtcaatgtaacaagaaagtacgttaaggatcttagatgccttcttcatatttgggagacgaaaggttacaatacagcttactcgtacttttatcctctatacaagaaggagaagggccatatcaagaagggggaacccgtgatggagaacgtgattggcggaaaacttaattatctacggatgatcaaaggggagagcaatgcatgctatcaaaaactgcagcagagatacgacaaacttcagaaaatcatctacatcgacaacaatatcgacaaggacataaccttcgtgtatcagcaatttgtgctacaggactttgagaaaaatttcagtaccaagatcagcttacaaatatctccaaaggaaaagctcataggtaaatgcaatatctttgggatggagaagatgctgagtattaccctcaatacgcagaaagagctgtgcccaaatctcaacacgctgaatgtgggcgacacggtcaatagcccaatcctgaaagactgttatgtaagcctctgctgccagcggggccgaaatttctggcttattagccacaagcagctggaagggtccaagtacttgacaattccctacattaagattaaccccgatatcctgctgaaaaaatgggaggaaactaatctcgaatatgtggcctggaaattttactttgccattagcaacaagatcgacattagtaccttggagaattcgatccaggagtttgtctacttcgtgacacataataagcattttaacaacacccagaaactgcaggttgcaaaattactggctagagattatcaaaagtcctgcgaggaacagaacgacaagctgatctatagtcaggagaacaagaataacgaagggaagatcatagaacagcagaaaatttttgacccaattgatacggcccgttttctgtccttgttcaatgagcccactggtctgaaatatcttacccacgatttcgatccagataattgtccggaaaccatcaacgaactgatcgagcagactgagaatgtcttaaaaaccaaaaaacggataccggagtctctctatgcccttatagagaacttttcattcggcaaaaaagagtggttggacacctttggcaaatcccacagctcatctatcgacaaaactgattggatagagtggagcgaaaatttccattctcatcccatcaataatcctaatttccgcaacgaaatcgagatcttcaggggaactgtgcggattgacaagggcttattgtcaaagattattgatgttgccgcacagaacacggcactcaaaatcgagaaggagaagatcgataccgcggatttctacaccaacacatacctgttgtatctgtccattaagcgaatattcgagatgatgaaccacaggaccgagtttccaaacgtattcgtctcctataaaaggggccacgacgagaacggagcaatgctgcgcaagattatcataagccagaagggaagctttccccagaagactctgcaggaaagcattgatcgattgaacaatcataaagaagctggagattttggcgctatcaagaagtatctgaatggatactgcttttggtccgtcgagactcgttgggaagggaagtcatcaaggtggaatattctgcggaacgccaacacaccagagactgaagagctagatcttgagtcagatggattcacccacattcttacattctatttggtttga

SEQ ID NO: 7346 - RNA, 1950 nt, synthetic construct
  source 1..1950: mol_type = other RNA
atgaacctcaaggatcagaatctgatcaattcggactctaaaaacaagacaaagaaacgtgtcctggcccaccagtttcaggggatttttttcaatatgggcaactctgacctgacagagaagcgaaagaagattagtactgcggaagagctggcagctgtcctggacgaaatcaagcagatcgagtttgcaagcgtaagatatagcatcagcgtgaagatgctacggcatttttccagcgataagatcacccctaaaagattcagaacgttccacataagaaaaaaaagcggcgggcttagggagatcaaagcgccctgcaaacagctcgatgtcatccttacctgtgtaaacatactgctcaagtccatctatgagccgagtgatgttgctatgggatttgctcccggaaggtctgtgctcaataacgcacaggtgcacgttggacacaactatgtgttcaacatcgatctcaaagatttcttcccaagtattccgcaggctagagtgtggaagcgtcttcagctcgcgccttttaacttttcccaagagatagccaatatactggcaggcctttgttgctcatacgatgccaacgtgaacgccaacgttctgccacaaggctcccctgctagcccactcttaaccaatacaatttgcgacaagctggaccggcggatgaaaggcgtggccaaacggttcggtttgcactatagtcggtacgcagacgatatgaccttctcgtcaatgcataacgtgtaccaggctgggtctgagtttagattggaaattcagaggattatctccgaacaaggttttaggatgaatgacagcaaaacacgacttcagaagcgcgggtttcggcaggaggtgactggcttaactgtgaatgatatagcaaatgtgtccaggaagtacatctctgaccttcgctggatgctgcatgtgtgggaaaaggagggatacgccaaagcatacgccctgttttatcctaagtacaagcacgagaaggagtacatcaaaaaaggagaacccgtgatggaaaacgtgatcggagggaaattgaactatctaagaattgttaggggcgagaacaatccagcctatcgaaaactgcaggctaggtataacgctctgcaggagctggtatttgttgacaatgaaactgacaagtccaagtcatacgtatacgtccagccttacgctctggcagacttccaggagctgtttaataccacaatctccttgacggttactagagaaaagaaattggtcgggaagtgtatcatcgacaatcgcgagaagaccttgtcaatttcaaagagcacccaaaaaacactgtgcccgaacctcgggaatttgaacacaggcgaactggtgaattctgaagagctggccgagtgctacgtcaccttgtgtcgccataagggcaaaaacttctggctgataacgaaattcgagccaaaacggtcccgttgtctctctatccagaatttaaagatcacccccgacgaaattctagattattgggaccgctatggtctggaaaagaccattgaggacctgactcaatttattcaatacgccgacccagaagattcttttaaagactggcgcctgctcgccgatttcgagcacaccattgacaggggaaagttcaaaatcagtaagaaggatctcattgtcttcttccttaagaacaagaatgtcactagtctgcatcgaaaaaaagccatgcaattaatgatagactccatccccataaatacagatagcgaaaacattgacatcgaaaagttactcgacatttgggaagagaaaggtctggatgaggcggtccttgcctggaaggagatgtcacgcaagaaaaagagcaagaagaaaaaccccgaccctgatcctattgtgaatgatgacgccccccagttcgatctagtgttcgattggtga

SEQ ID NO: 7347 - RNA, 1953 nt, synthetic construct
  source 1..1953: mol_type = other RNA
atggagaaactggatctgactgagaagctcaaaaatatcaacacagcagagcagctcgctaccgtccttgacgaaatcaagcagatagagttcggctcggtgagatatagcataagcgttaagatgttaaggcatttcagctccgataccattgcgccaaaacggtttcgaaccttccatatccgcaagaaaagtcgagggctcagagagataaaagccccttgcaaacagcttgacgtaattctgacttgcgtgaatattctgttgaagtctatctatgagccatccgacgtcgtcatgggcttcacctcagggcggtctgtgttaaacaacgcccaggtgcacatcggtcacaactatgtgttcaacattgatttgaaggatttctttccttccatccctcaggcccgggtttggaaacgacttcagctagctccctttaactttagccaggagatcgccaacatcctggccggactatgttgctcatatgatgccaatgtgaaggccaatgtgctgccacaagggagccccgcaagtccacttttgactaatgcaatttgcgacaaactggataggcgtatgaagggtgtcgctaaacgcttcgggctccattatagccgctacgccgatgacatgacttttagctccatgcataacgtttatcaagagggctccgaatttagactggagatacagcggattgtgagtgatcagggatttcggatgaatgattcgaaaacacggctgcaaaaaacgggttcaaggcaggaagtcaccggcctgactgtcaacgctatcgcaaatgtctcccgaaaatacctttccgacctgaggtggatcctccatgtctgggagaaagaaggctatgcaaaggcgtatgctatattctatcccaaatacaaggacgagaaggggtacattaagaagggagagccagtgatggagaatgtgatctctggtaagttgaactatctccgcatggtgcgtggcgaaaataatccggcctacagaaagttgcaggccagatacgatagtttacaagagcttgttttcgttgacaatgagactgataagtctaagtcctatgtttacgtacagccttacaccgtggtggacttcgaggaactttttaagacaaagctgactctcacggtgacaagagataaaaagctagtgggcaaatgcgagattgacaatagggaaaagacactcgctattagcaagaccacccagaaactgttgtgtgacaacttggataacctgaacgctggcgacatcgtacactctgaagaattatcagaatgctacgtaaccctatgtcggcacaaaggaaagaatttctggcttatcacaaagttcgaacccaaaaggtctaggtgtctgtcaatccaaaacctccgtattgctcctgaagaaattctcgactactgggaaaaatacggaatcgaaaagacaacggagaagctggtactgtttgtccagttcgcgaatcctggggattcactgaaagattggaatccctcagaaaacagcgagcacacaatagaccgcggatcgtttaagatttctaaggatgacctgatcgtgtttttcctcaagaacaaaaacgtgaccagtctgcagagaaaaaaagcaatgcagttgatgatagactctattcccgttaaccgctacagcgaaaatatagacatcgaaaagctcttagacatctgggaggaagaggggctggatgctgcagtccttgcctggaaagagatgtccaaaattaacaagagcaagcccattagccacaagaagaaggccaacactaaaaatcaaagttcccaggacacctttctggaggagatcggcatctctgaggaagagctggcgtccatccaacaggagatggcaaagtgtggtgggaaaccgatcggaaagccaattgccggcagttactctctggtgtga

SEQ ID NO: 7348 - RNA, 1986 nt, synthetic construct
  source 1..1986: mol_type = other RNA
atggagaactcaaacttgactgagaagctgaaatacatcagcacggcccaggagctggctgtggtattggacgaaattaagcagattgaattcgggtcagtaagatacagtatctcagtgaacatgctcaagcactttagctccgacacaatagcacccaaaagattccgaaccttccatatccgcaaaaagtcaggcggcttacgggagattaaggctccatgtaagcagctcgaagtgatcctgacctgtgtgaacattctgctgaagactatctataaaccttccgacgtcgccatgggctttaccagtggccgaagcgtgctgaacaatgcacaggtacatgtagggcacaactatgtgttcaatatcgacctgaaggacttcttcccaagcattcctcaagcaagggtgtggaaaaggttacagctcgcacccttcaacttttctcaagaaattgccaacattctggccggtctttgctgctcttacgaccccaatgtgaatgccaacgttctgccacaggggtccccagcaagcccccttttgactaacgcaatctgtgataaactggacaggcgaatgaaaggagtggccaaacgtttcggactgcactatagtcggtacgccgatgatatgacattttccagcatgcataatgtatatcaggagggctcaaaattccggattgaaatccaaaggatcatctctgagcaagggttctacatgaatgagagaaaaacaagactgcaaaagacaggatcccggcaggaagtgacagggctaacggtcaacgccatcgctaatgtctcccacaagtacatttctgatttaaggtggatcttacatgtgtgggaaaaggagggctacgcgaaagcttacgctatgttttatccgaagtacaaacacgagaagggttacatcaagaaaggggagccagtgatggaaaatgtgatcgggggtaagctaaactatctgcgtatggttaggggcgagaacaatcccgcttatagaaagctacagacccgctacgacgcgcttcaggagctcgtgttcgtcgacaacgagacagataagagtaaatcttacgtctatgtccagccctataccctggtcgacttccaggaactgttttcgactaccatcagtcttgccgtgacccgcgaaaagaaactcgttgggaaatgtgtcatagataatcgggaaaagacccttgccataagcaagtccactcagaagtcactctgccctaacctcgacaatctgaatgccggagatcttgttatcagtgaagagctcgcgaaatgctacgtgactctctgcagacataaaggcaaaaacttctggctaataaccaagtttgaacctaaacgctcttgttgcctctctattcagaatttgagaatcgcgcctgaggatatactcgattattgggagaagtatggtatcgagaaaacagtggaagagctgactctgtttgttcagtttgcaaattcgggcgactccttacagaattggaaccactctgaaaatttcgaacaaaccatagatcgggggggttttaatatctccaagaacgacattatcgactttttcctgaagaacaagaatgttaccagcttgcacaggaagaaggcaatgcagctgatgattgatagtatccctgtcaacacagacagcgaaaacattgatatagtcaagctgctggatatttgggaggaaaagggactggatgccgctgtgttggcctggaaggagatgagcaaaacaaaaaaacttaagcccaactctaccaaaaagaaggccacggagcgcgatcgcagctcgcagaatacgtttcttaaagagatcggcatttcagttgaggacttggctgccttgcaacaggagataggcgagggaggaggcactccgattgacctcgacatagattgggatgatattccatttgctgacgacgactccgagattatcggagaactgtga

SEQ ID NO: 7349 - RNA, 1974 nt, synthetic construct
  source 1..1974: mol_type = other RNA
atgaataaaaccgacatcctggaacagctgaagactatgaaaaccgtggaggaccttgctgtgttgctagacgccattaaacaggacgagtttggctccgttcgctacagcatctcagcaccgatgctcaaacatttctccagcgataaaatcgcccccaagcgcttcagagtattccacatcaggaaaaagtccgggggggagcgggaaattaaggctccatgtcagcaactctacgtgattctgacgtgcttaaatgtgatgcttaaggcctgctacgaaccctcagatgccgcaatgggatttactagtggcaaatcggtccttaataacgctcaggttcatgtcggccacaattacgtgtttaacatagacctgaaggactttttcccgtctatacctcaggctcgtgtgtggaagcggctccaattatctcctttcaacctgtcgcaggatgttgcaaacgtgctcgctgggctttgctgcgccttcgatgccgaggctgggcataacgttctgccgcaaggttctccagcctctcccctcctgacaaacagcatctgtgacaagctcgatagaaggatgaagggcgttgccaaacggttcggcttgcattactctagatatgccgatgacatgacattcagttccatgcacaacgtctatcaggatggctccgagtttcgacaagagatcctacgtattattgaagagcagggattttgcatgaacgataaaaagacacgtctgcagaaaaagggagcgcgccaggaagtaacgggcctaacggtcaatgccgtggcaaacgtaagccataagtacatcagcgatcttcgctggatcttacacgtctgggagaaggacggatacgcaaaggcctatgctttgttctatccaaagtacaagcacgaaaagggttacataaagaagggggaacccgtgatggagaacgtgatcgggggcaaactcgactacctcagaatggtccggggtgaaaataatccagcttatcagaggctgcaggcccgatactatgctttgcaacagctcgtctttgtggacaatgaaacagacaagtccaacagctatgtgtatgttcaaccatattctatgcccgagttccacgagctgtttcacaccgaagtgaaactcgtcatcacaagagaaggcaagcttgttggtaagtgcgagattgacgggcgggagaaaaccctggccatctcaaaaagtacccagaaatccctgtgtcccgatatcgagagcatgcacactggagaaattatcacaagtgatgagctagcgaagtgttttgtcaccctgtgtcggaataaaggcaaaaatttctggctgatcacaaaattcgagcctaagaggtcaaggtgtttatcaattcagaatctgaacgtgtcacctgaagatatcttgactttgtgggaaaaagagggacttgccagtactgtggaagagttaacactgtacatacagtatgcaaatccaaccgactcaattctcagctggaaccctctggcggacagcaaaaacaccatagatcgcggtagctttaatttcaccaaggaggacattatcgcgtttttcctgaagaacaaaaacgtaaccgcctcccatcgcaaacgagctatgcagctgatgatggccaatatacacgagcagtctgatggggatgggattaacgtggtggagctgctgaatatttgggagaaggatggcttggatgcggcagtgaaagcatggaaggaatctaccaacaagcaagtccaacagaagacaaaggcaaagaaatccaagagcaatagtgctagtaagttcactagggaaactggattttccaaagaggcctttggcacgtttagacaggagatagcactggacggtggaactcccgtagaaatcgatatcgattgggacgacatccctttcgacattgacgactctggggtgattggaggcctgtga

SEQ ID NO: 7350 - RNA, 1467 nt, synthetic construct
  source 1..1467: mol_type = other RNA
atggacaaattggtcgtaatcgaacagctgaagaagatgaagactgtgaaggatgtcgcagtgatactcgacacaattaaaagatacgagttcgggtctattagttacaatatatccgagaagatgctcaaacatttcagctcagacacaatcgcgcgaaaaaggttccgtaccttctacattcgcaaaaagtccggcggctttagggagatcaaagcgccttgtcagcagttgcaggtaattctgacctgcttgaacatcctctttaagagcatttatgaaccctcggatgtggcaatgggttttactagtggacggtcagtcctgaataacgctcagatccatgttggcttcaattatgtgttcaatatcgacctcaaagacttctttcctagcatttcgcaggcccgggtttggaaacgtttacagctgccaccctttaactttagcttggaaatcgccaacgtgctggccggcctgtgctgtacctacgacgagagcctaaagttgaacgtattaccgcaaggctcaccaacctctcctctgttgacgaatgccatctgcgataagctcgaccggagaatgaaaggagttgccaagaggttcggaatccactactcccgatacgccgatgacatgactttttcttctatgcataacgtctatcaagaagatggtgacttccgcgtggagatctccaggattattgatgaacaggggtttcacataaacgagagcaaaacccggctccaaaagaaggatacgcggcaagaggtgactgggctgacagttaatgccgttgctaacgtgtccaggaagtatataagcgaccttcggtggatccttgcaatatgggagaaggatggctacgataaggctcaggcactatttaatccaaagtatcagcaggagaaggggtacattaaaaagtgtgagcccgccttagtcaatgtgatcagtgggaaactcaattatctgcgaatgattcgcggtgagagtaacttcgcataccagaagctcgcaaaacgctttgaggtgctgcaggagatcatcttcattcaccacaagaacgacgtgaagaacttcaggatcaatacaaagttcgagctgaagtattctcgctgcctgagaaatcagaaccttaaagtctctctggacggactcttagatatatgggagaaaggagggatcgaatccgctgtcgaggagctggctgaatctggatatatgagcattacctcaagagactccatcgtgtccggcaatgaacacctgctcaactactttctaaacaatccaaagttgaccatgacacatagaaaacgtcttatcagactgcttctggcctacattccttcaaaaccccttaagactgacattgaacaactgcttagtatatgggaaaaagaaggcctggatgccgctgtgcgcgaatggaagaaactgaaggataataaagctaactga

SEQ ID NO: 7351 - RNA, 1572 nt, synthetic construct
  source 1..1572: mol_type = other RNA
atgaaaaaattagagatccgaaatcggctcatagcaatcaagaccgtggaagacctggcggagctgctcaacgagatcaaaaaggacgagtttggcacgaaccggtatgaaattacggataagcagctcaagttttatagctccgataagtatacctccaaaagataccgcacctttcatatcaggaagaaatctggtggtctaagagaaattaaagctccatgctatcagctaaacatcatactcaggatcttgaacattgcactcggggctgtgttcgagcctgactcagtggctatgggctttgcgcccgggagatctgttgtgaacaacgctcagaagcatgtaggccacaattacgttttcaacattgacctgaaggatttctttccaagcatccctcaggcgagggtatggaagcggctgcagcttgccccgtttaacttttcacaagaaattgcgaatgtggtcgccggattgtgctgtagttataatgaggagagagggcagaacgtgctgccacagggagcacccaccagtccgctcctgacaaatgccatttgttgcaatctggaccggaagatgaaaggactcgcaaagagattcggactgcactactcacggtacgccgatgacatgactttttcttcgatgcataatgtctatcaagagggaggcgaatttcgcaaagagctgttaaagatcatcagtgagcaggggttcacaattaacgataagaagacccgccttctgaagaccggctgtcgccaggaagtaactggacttacagtaaatgctattgctaacgtttccaggaaatacattcaggaattgagatggatcctgaacgcctgggagaagtacggatatgccaaggcctacgccttgttctacccccgctataaaagcgagaaagggtacattaaaaagggtgagcccgtgatggagaatgttataggcggcaaacttgactatatgcgcatggttaggggggccaataacgtcgcatacaagcgactgcagacacgtttcgacaaactgcaacaagtcgtctttatcggttccgaagaagagcagacccaagccaagaagttcatgtacgtgcagccttatacaatggctgaattcaaggaatacttccatactgaggtgagcttgactgtgacaaagaatggcaagctagtgggcaagtgcactattgctgagatggagaaaaccctggccatcagccacgccacacaggactacctctgccctgatcttaaacagcacaaggagggcgattgcgtcgagtccaaaaagctcgaaaagtgtaatgtgatactgtgtagggctaagggaaaaaactactggatgataacgaacaaagaccacaagcgggacaagatcctgtctatccaaaacgtcaaaataaatccagatgacctcttggatctttgggaaaaagagggttataaagcagcagccgaagaaatcactattgataatcgtaaagggatgcctgtgctgttaaccttgcccgggctggagctggagcgttcattcgatatcaaacgaaaggacaatgaatga

SEQ ID NO: 7352 - RNA, 1401 nt, synthetic construct
  source 1..1401: mol_type = other RNA
atggagaagctggagatccggaactcattaatcgcgatcaaatcagtggaggatctcgccgaattgctgaacaacatcaagaacgacaaattcaaaacctcccgtcacaagattactgataaacagctcaagtactacagcaataataaatacgcaccaaagaggtatcgcacattccatatacgcaagaaaaatggcggtctgagggaaattaaggccccatgctaccagctcaatatcattcttcgtatgctgaacattgcctttgagtcggtatttgaacccgacagcgtggctatgggctttgcccccggcagatctgttgtgaacaatgcccaaatgcacatacgacataattacgtgttcaacttagacctcaaggattttttcctgtccattcctcaggcaagggtgtggaagcgcctgcaattggcgcccttcaacttctcactggaaattgcaaacgtggtcgcgggtctttgttgtagctataacgaagaacgggaccaaaacgtgcttccgcaaggggctcctacaagtcccctgcttacaaacgcaatttgcgggaatctggatagaaagatgaaaggtctggccaagcgatttgggctacattactctcggtacgccgacgacatgaccttctcttccatgcataacgtctataaagagggaggggagttcagaacagagctcctgaaaattataagtgaacagggatttaccgtcaacgacaaaaaaacccgcctgcacaaagcagagcacaggcaggaggtcacgggcctgactgttaatactaaggccaatgtctctagaaagtacatacaggagcttcggtggattttgaatgtatgggacaaatatggctacgcaaaggcttacgctctcttctatccaaggtataaaagcgaaatgggacacatcaaaaagggcgagcccgtgatggaaaatgttatcggcgggaaactcgactatctgcgaatggtacgcggcgctaccaatccagcttataagaagttgcaggagaggtttgataagcttcagcaggtggtcttcctggaaactgaggaagagcaacctaaaacacagaaatttatgtacgtgcagccttacaccatgacagaattcaaggagtattttctaacggaggtcagcttaatcgtgactaagaagggcaagctagttggaaaatgtaccatcgccggtatggaaaagaatttgtccatctcccacgccgctcaggattttctctgcccgaaactgaatttatgcaaggagggggatagtgtggttaatgagaagctgaacaactgctacgtgatcttgtgtagagccaaagggaagaactattggatgatcggactgatcggacagaagcggaatattctcaagatgaaatga

SEQ ID NO: 7353 - RNA, 1590 nt, synthetic construct
  source 1..1590: mol_type = other RNA
atggacaataataccattatcgaccgatacaaaaagatccacgatgccggcgcctttttgggactgctcaacgccatgaagatcgaagaatatggggaaaagactgaaaagtttagcaccagagacttaaaggtatttatttggccgaacaaccctgaaagatatagcacattcacgatccccaaaaagagtggaggagtgcgccacattagtaaaccatgcccaaaactgaagtacatgctgcgctacgtgaagcagttcctgcaagccttttataaccctatgccctgtgttcaggggttcacgaccgggcgatcagttgttggaaatgccggcatgcatctccaccagaattacgtctataatgttgacctttctgacttttttccgtccatctcccagggtagggtgtggaaaagactccagctccctccgtataatttccctgtcggtctgtgtaatatcatagccggcttggcatgcgcgccatacgagactcccgaaggcgtgaagtacaacgccttaccacaaggagctcccaccagccccattttgtccaacattgtgtgtgagcaacttgatcgacgcctgactgggcttgctaagcgattcggtttgcactacagccgttatgcggacgatatgacctttagctcaatgcataatgtgtatcaagataacagcgaattcatccgcgaactgcagcgcctgattacacaacagggcttcaggttcaatgagaagaaaacaagactgcagatccgtggatcgcggcaggaggtaacggggctaaccgtgggcacaaaggttaacgtgagcaggcgttacatcaaagagttacggtctgttctccatgtgtgggaaaaattcggctacagtgaggcatttgcgtggttctatagtagatataagcgggataagggctcactgaaaaagggcgaacccgtgctggagcaggtcattgaaggtaagcttaactatttgaagatggtgaaggggaattctgactccacttacaaaactctagccggtaggatcgaggcatgcatgacagctctcgacgaggagcggcctaaacacgggaagaggaatgtactggtgagctacgagttgaaggacttctcaaccagattttccaacgtctccatggattttagtacctcaccagatggcattgtctcagggtccctcaccgtggactctgtagccacccctatatactttgacaagattttccggaaactgtcgtccgcaaacaaggctaaggtgctgaaagccataagccaagatacatctgactggtttatctccgaaattgaggatctggacaagaggtaccgcaacaaatttaatcatttctggctgatctctcggtataggcctcatcagtctaccacagtcgataaaagcgagataactagattactgctggagctctgggagaaggatggacttgatgcagctgtggatgaatggaaaaaactaatcaagtacgacccaagtcagaaaagtgagtccatgcaggctacttctctgcagaacccccagaacgtcctcgactcattcttctacgagcaccttaataaatga

SEQ ID NO: 7354 - RNA, 1461 nt, synthetic construct
  source 1..1461: mol_type = other RNA
atggaacgcactgagatcgcaaaccgcgttaaagccatgatttcacaggaggatttgctgcaacttataaacgaactgaaagctgaagacctcggtgataatgcctacccattctctatgcgacaattaagatacttctgtaaccctaacaacgaatccaggagatacatccactttgacattaagaagaagtctgggaaggagccacgacatatcactgctccccagaaaaccctaaagatgatactcacatacctgaaccagattctgcaggcagtgtatgaaccactcccttgcgtcatgggcttcgtgtcaaacaggtccgtggccgacaacgcctctaagcatatcggcaaactgtacgtctacaacattgacctaaaggattttttcccgagcatagaccaagcacggatctggaagaaaatgcaatgtcccccctttaatttctgtaatcaggaggatccgaatgcaccacagcggcgtgtgctcgctgatatgatcgccgggttttgttgcatgaagaaacctatggaggacggcgagatcaaacagaggtatgtgctcccacagggaagtccttgttcccccgtgctgaccaatataatttgcgagcgcatggacaggaggttgacgggccttgccatccgtttcggagcaacttacacacgctacgctgacgacatgaccttttcgagcatgcacaacatctatcaggacgattctgagtttatcaaagaactgcaccgaatcatctccgaccagaattttagaattaatcccgcgaaaactagactgtgcacaaccaagatgaggcaagaggttactggccttacagtaaatgagaaagcaaacgtcagccgcaagtatctcaaagaactgcggagaaacctgcataattgggagtattacggttataatgaagcgtataaacggttttacgctcggtataagatggaagtggggcacaaaaagcatggagagcccgtcatggaaaacgttttggggggaaagctgttataccttaaaatggtgaagggcgagagtgatcctacatatcagaaactgcagaagaggttcgatatccttgtagaggccaaggaaggacgaatgagccagtacgccgatagcaaattccggtatattgtcacgtacagaattgctgaatttgaggacatcatttccactaagattcagataggggttagtgacaatggttacaagtatgctttctatgagaatggctcaaagagaacctacataagtttgtcaaagaacatcgggaaggaaggaattcacaccctcttcatctctctgtgcgagaaccagaaaggcaagcgtttttacctaattcatcgcgccattgaggagaaagccaaagtggagacaaagcaaaccctccacttagatgcgatgctggataagctgttggaaaccaatttcgacatcgatagcatctga

SEQ ID NO: 7355 - RNA, 1590 nt, synthetic construct
  source 1..1590: mol_type = other RNA
atgacccccaacgaaatcgcaaatgaagccaaaagcctccagacacctaccgacctgctggagttgatcaacaaaattaggctgtcagaagatgcccaaactcaccgggctttgtctcttaaggagctggccctgtactgtaatccggactccagtaaagtcaaaaggttccggaccttctttatccctaagaagtccggggggaaacgagagatctctgcaccagtcagcaagttggatgccttcctgtggcccctagatctaatcttaaagagcgtgtatgaacccaaatcttgcgtgatgggctttacatacggtcgctcaatagtggacaacgccaaagcgcacctgggccagaattacgtcctgaacctggacctggaaaatttcttcccttccattacccagggtagagtgtggaagaggctgcaggtcgccccttacaacttcgcaccaaaggtggcctccgtcatcgctggtctgtgcagcatcaagaaggtaaatgatgacggagagacacggtatgtgttgccacaaggagcccccacctcacccgtcttgaccaatataatatgtgaacgccttgatcgccggctcctcggagtggcaaagagattcaacttgcgttacacgcgttatgctgatgacattactttttcgtcgatgcacaatgctctgaaaatagggggcgaagcgtttcaagagatcaaacatgttattgaagagcagggcttcgctattaattcaaaaaaaactcgcctgcagaaagtaggggaaaggcaggaggttacggggttgattttatccgaaaaagtgaacactccaagatcctacgtgcgggatctggaccagattctatacgtgtgggataagtggggatatgagaaagcctacgccagaatgatgttagtgaaaggtgagaaggcttacaggaagaatggacttactacattagagcgagttatcggaggcaaactggactacctaaagatggtgaagggggaaaacgacaaggtgtatcttaagtatctcagtctctttaaccgacttaagaaacaaggcgcacatagtgacgactctctcaactatgtcgctacctacaccgttgcaagcttccaggagctctttaagacagacctgatatttaaggaagagggcgagcatattagagccagctttagactgaacgacgttttccaccctgtacgcattacgagcttcgcgtccaaagcaatcagtgacaaaggcaaagaaaaggagtctctctatatttcactgtgcgaggatgaaaatctcttttggcttatccatatccgtgaacccaaagctgccccatctaccgatctgatcctgcccatcaaaaagataattaagatctgggaggagaagggactcgcggccgccattaaggcagaggaggaagcccggaagaagcagagtagggccgaggagacaaagaaaccaactcttcgcgctatgatgatggctaagtattttccggagctggcagagatcgagggcgagttcaaggatctccctagcctgatggacatgattaaccacttagaagaagatggggagacaaattga

SEQ ID NO: 7356 - RNA, 1755 nt, synthetic construct
  source 1..1755: mol_type = other RNA
atggacgagaatgagatcaaggaccgtgtgggaaagttgaggacaaaagaagacctgttagatctgctgaactcccttaaagtcgctgagtatggcgagggtgtgcatctgtttaccatgaaacagctgaacttctattgcaaccctaagtacggtaagcggtatcagtcttttcgcattccaaaaaagaaaaagggggagttccggacaatttccgccccagtggctgccctgaaatcaattcaacacttcattaacgtgatcctgtccgtgttatataagcccacggatgtcgtcacagggtttgtgaagaataagtcagtggtggacaacgctctgagacatgtcggaatgaactacgtgctgaatatcgacctcgagaatttctttccctctattccacaggtgcgaatctggtggcttctgcagcagaaaccttacggattctccaaggagatcgccaatgttatcgcaggcctctgtgccattaagcaaccaaaaaaagaagttgagtcccccaagaatgcaatcgaagattacgactacgtgttgccccaaggtagcccaacgagtcctatactgagtaacatttcgtgcgagcacctggaccacaagctgcagaaactggccaggtcttttggcatgaattattcaagatacgcagatgacatcaccttttcatccgaagaatacgtgtacagcaggaaggggaaattttggactcagctacgaaggatcatttcagagcacaaattctcaattaacgagaacaagacaagactgctccgcaaaggcgtccgccaggaggtaaccggccttaccgtgaataaaaccgcaaacgtgagcaaaaagtatattaaggagatccggagacacctcaacacttgggaaaagtacgggtacgctatagccttcaagaatttctaccctatctacaagctggaaaagggacatgttaagaaaggagaacccgacttaatgaatgtgctctccggtaaacttttatatttgaagatggtacgtggggagagtgatcctgtctattccaaacttaacacgcgcttcaagaatcttactactggggaggatagttctatagtgttcggctccatgagttaccacaatacccagaaagtcaccgaatttgagaagactatggatacagagataaaaatcaacagaacccaaggcaccctaaagagttatttcttcgagactaaaagcattgcgactaagaaaagacgcaagaaggaaaatagcccttctgagccgcaggtaacaaaagttgatgtgaggatcagtgaaaatgccaattttgagcacaagaaggatttgttcatatctctctgtcgcaacgaaaaaggagaaacattctatctcatgcacaaagagctgttttcgaccgatgagaaaaatgagcggaagctcgagctggacaagatgttgtctgccttggtgaggggcggaaaggtacatctcgaagtgctagaaaaggatattgttaacgaagaaaagcccatttatgaagacactatgagcgtcgtcgaatttgagaagaaacatcggtgcaaggtagagctgagcgaggataagaaatatgcggttgctaaatacaaagtcaagagggagaacataaaaatcagccccaaggttaacccagaggaataccgagaacacagcatcagcaagtataccaaaggctccgactcttcatactacctcatccatagaaagccgcggacagacaagaaatga

SEQ ID NO: 7357 - RNA, 1338 nt, synthetic construct
  source 1..1338: mol_type = other RNA
atggaaatcgatattgtgtcatcggtgaaaaagcttaggaccaagtcagatctcctccgtctgataaatcggataaaggagattaagttcgtagaggtaggactgcagaaaaaattctccccagtaactattaagcagctggaatactatagtgaccctaacaatacgtacaggagatacaggaagttttccatcccaaaaaagagcggcgagttaagggagattcacgcaccccgcaacgcaaactacaaagtgattctgcgaactcttaatgaaatcttaaacaccgtgtacgagcctagcgagtacacaatgggatttgtcagaggcaagagcgtggtcacaaatgcgctgagccatgttggaaagaattacgtctacaatatcgacctaaaagacttttttccctcaattgactatctccggattgctaaaagattacagctgtctcccttttgcttcccaagacagatagcgatcataatcgctggactggcatctatacgtacagacgaaggggatgccgtcttgcctcaagggagcccgctgtctccgattctgaccaacataatctgcgataaattggaccgcaaactctcccggctcgccgagaagtttggtctttcctactccaggtacgctgatgacatcacttttagttcctaccataacgtgtatcaccaggatggcgaattttgtaagaagttgaaatccatcatcgaaaagcagggctttaagattaatgagaacaagactcggctacagaagcgcgggcaacgccagttggtgacaggtatcaaggtgaacaccgagactaacgtcgaccgatcgtatatcaatcaaatccggaatctgctgtacatttggaagagatacgggtacagtgtggccgaacagcgctattatgagtggagactcaaaaataagccactgagctataaacgcactagtctagcctcatatttgaacgggaagattcaatatctcagagccgttaaggctagcggctatagcacagcctacatccatttcctgttcgaatatgagtacctgtacaaggagacattcaaaaagaaaaagcgatacggaatcaactatatagaaaccacccccctcgagcaattcgagaaaaaacttggcgtgcagatcgacatcaataaaaaagtggatgcagatggtcagagccaccggttctctgtttttgaatataagttcatccccaccttcattagtgtttctaaggacatcacgcctgaggacgaaaccaacaaatccaagctgtctatttcaaggtgtattgatcagaggaaaaaagagttctggcttattcactattga

SEQ ID NO: 7358 - RNA, 966 nt, synthetic construct
  source 1..966: mol_type = other RNA
atggatataaaagacaccaacaccctggtatctactattgaaactatcgctccttataacgttggctgggcgctgaccgatagggtcggggatatcaacaacctcgcaagcgcccgtcttcgtacattaagctacaaagagttcgacatccccaaaaaatcaggtggcacccggagaataaccgcccccgtgggtaaactgaaagacgtcctgaagtgtctgagcgtgattctaactccatactacgagcccggagggtgcgtccacggatttacaacccaacgcagcgttgctagtaatgctagtgtgcacatgggcaaaaattatgtccttaacattgacctcaaggacttctttccttcaatcaccgccacaagagtccaaaaggccttacagaagcatggtttgaattcagaagtggctcaccttattagtaggctgacgactctgccaatggcaattgaagatagccagacactgcgcaatgtgctccctcagggatcaccatgctctccgctcctctctaatatggtgtgttccgacctggatcgaaagcttatgggattggccaggcgctttcgggtggattacacgcgctatgcggacgacatgacattctcctctaatcaccatgtatacgcagcaggaggcgagtttttcgcagaattgcgatccataatagaggattgcgggtttaccatcaatgaacggaagacaagactacagaagcgggggtccaggcaggaggttactggggtgatcgtgaacgagaagacaaacgctcatagatcgtttcgaaaaaacttgagagccgccgtgttcgccgctgaaactttcggctgtaccaggaaagagtacaacagcatcatgggcaagattagttacctgtctatgctgctcaatgaggagcggggctgcatttataagtataaggccatcatgtccaaggttatgatcaagaaatga

SEQ ID NO: 7359 - RNA, 966 nt, synthetic construct
  source 1..966: mol_type = other RNA
atggaactcaaagatactgacgccctcacacgggcgattgaggaaatagcgccctattgtgccggatgggctctgaccgagaaggtgggggacatcaatcgcctggcttcggccaggcaccgtattctagcatacaaggaattcaagattccaaagaaatctggaggcaccagaaaaatcacggcacccaccggcaaattgaagggcgtgctgaaatgtttgtcccaaattctgactacatactatgaaccccacgagagtgcacatgggttcatgccgggcagaagcgtcgccactaatgctgacgtccatgtggggaaaaactatgtattgaacatcgaccttaaggacttttttcaaagcatctcaagccagcgcataacacgcgccctgactaggcacggcttgtcacaggatgtagccgagctgatctcccgcctcgctaccataccaaccgtgaaagaaggctctgatatctccatacacgctttacctcaggggagcccttgctcaccaatcctcagtaatatggtgtgcgtggatcttgataaaaggctctccggtctggccaagcagtttagggttgattacaccaggtacgctgacgacatgaccttctcctctaatcataacgtttacagtgcggacggaagattctttgaagcactgagatcaattgtcgttgaatgcggattcgtccttaatgagaagaagacacgcctgcagaagagaggtagccgacaggaggtgaccggaatcttagtgaacacgaagcggaacagtcatcgaagcttcaggaaaaatctgcgtgccgctgtgttttctgcagagactaacgggtgcacacaccgggagtacatgcggattatgggcagaatttcttatctatccatgctgcgaggtaaggaggatccttgtgtgaagcggatgcaggccatcatgagcaaggttgccgtcacaaaatga

SEQ ID NO: 7360 - RNA, 1017 nt, synthetic construct
  source 1..1017: mol_type = other RNA
atgagcttcacggtgccaatcacagtcccgttaccagagacattgccccagctgcacgaggaaatggctagaattgcagttagtacctcagggtgggctgtgcataatccaggcggaagggagttcctctccaaggcggagtctaggtcttttagacagcgattttatcgagagttctcaatccccaaaaaaagtggcggccgccggagaataaccgctcctacaggctatctgaaaggggctcaaaaggcaatcgccgtgctcttagaaagactgtatgaggcccctgacatggtgaatggtttcaccggcgacaggagtgtactgacaaatgcagaggcccatgtgggacgtaattatgtctttaatactgatctgagggactttttcccctcgatcactgccggtatggtccggaagactttggagaaagaaggcgtttcccctgaagttgccaggtacattagcgtggtttgtaccattacaacaggggatggggacctttccgaagatgttctgccccagggctctcctgcgtcaccaattctgagcaacatggtgtgcctccaaatggatagacaccttgattggctcgcccggcggtacgggctgacttatacccgttacgccgacgacattacttttagttcaatgcactctgtgtatggcaaaaacagcccattcctaaagggtttgaaagagattatagaagagtacggatttagcatcaacgaagaaaagacccggcttcagaagaagggttccaggcaggaggtcaccggactgatcgtgtccgacagagtgaacgtctgccgccgctacctcaagaacctgagggctgaagtgttcaggatggaaatgcagggctttacgatcgaggaataccgccgggtcatggggaaaatagcattcgtaggaatggtacgcgggcgagaggatcccctatacagaaagctgcacaaccgaattcgtagcatcaagcgccatcctgagggattccttgcccagccgcggtga

SEQ ID NO: 7361 - RNA, 1017 nt, synthetic construct
  source 1..1017: mol_type = other RNA
atgaaagctatgaaaccctttaagaatatcccggacacactggagcagatgtgtgaacgcatcatgatacggctgcctctggtgtgtcgcaaaccccagctgttgggtatggacgacatactgccataccggcgccgcaaagtgcgtatgaatagctatcacgaattcggcattcctaagagatcgggggggatgcgtgtgatccaagcaccttgtgaagagctgaactacattcagaaggccgttaattctttactccgggagcaatggaccccagccgatgaggtctgcggattcgtgcagggcaggtcagttgggatgggtgctgctcagcacgttggaatgcactacgtctttaacacagacctccatgacttcttcccctcaatcaccgcccctaaggtgtttgaaatgcttatgcgagaactggggatgaagccagccgtggcgagactcatttgcgacctctgcacaatcccagtgaaagagggatatgatgtactccctcagggaagtccagcatcccccatattaagtaacattgcctgcgcgagaatggatcgtcgcctaaagggtctggcagaatgttttgggcttacttacacgaggtacgccgatgacatcacattcagcgccccctataacgcgtttaaagagggcggcactttcaggatttgcctggagagaattattcgagaagagggtttctccctaaacgaagctaagaccagactgcagaaaaggggggggagacaagaggtcaccggccttactgtcaatgaaaaggtgaatgtgcctcgcaagtggctgaaaggcttgagggcatgtatccatcggatggaggtagatggcttttctccggaggagatggatgctgcacggggaaaggtcgcctggttgaggcatgctcgaggcggcttagatcccctcagccagaaaatggtgatgcggctgaacgccttggaagttgccctttatttcgacgagctgccagatgaggacggatccaagatctga

SEQ ID NO: 7362 - RNA, 987 nt, synthetic construct
  source 1..987: mol_type = other RNA
atgaacgcctttctttataacctgggaccagaatctcttccagttggtacacccgacgagctgtgcatgagcatcatgctcgcactcccggccgtttgtcggaggactctgctgcctgggacaggatctattcgtaaatttagacaccctgcccgacgcaccgcagcttatagacggttcgagattcctaagaaaagcgggggagtgcgaaccattatggctcccaccggcgacctgaaggacatcttaacaactgtgaatagtctcctttcgctctattgggagcccaagcacagctacgtccacgggttcacgagcggacgttccgttgtcagtggggccgagccacatgtgggcaaaaactacgtgttcaacctggatctcaaggatttcttccccagtataacaaaacagatggtggcacgggggttggaaagagccggttttgaccggaggactgcaaggtttctgtccgaaatttgtaccgtccccggggacgacggacgagagattttgcctcagggagcccctacttcacccttactgtcaaacatatcatgcatgatgctcgacttacgcctggctggcctcgcagctgaatttagcctggattacactcggtacgccgacgatatgaccttctctgctcaatataatgcgtttggtccacgcggcgatttcaggtcccttatggagacagtaatcagggaggagggcttccggatcaatgagaagaagacgagattgcagaagagaggttcccgtcaggaagtgacaggcctgaccgtgtgtaggaaagtcaatgtcgccagaaagtggatcaaggatctgcgagctcagatccatagaatggaaaccgtgggctttacccctgcagaataccggtctgtttgcgggaaagtgggctggatcaggcaagtgcgcggcgctgtaccaatgtaccgcaaactgcgcgcgaggttgagagccctaccgctaccagcctga

SEQ ID NO: 7363 - RNA, 1014 nt, synthetic construct
  source 1..1014: mol_type = other RNA
atgaccgaagacctcagggattacctacggggctgtatttctaccgcatctattgctgatatgtgtgtctcaatcaacgaaatcggaccttttgtgagcggactgtcaatctccaatcccgtttccgtatctctgctcctttactacacagatgttagagtaagaagagcagcataccacgaatttcagatacccaagaagagcggcggttttcgcaatatcctgagcccatgcggcgaactgaaggagatcatgcatacattggctttcattctgaaagagctgtatgttgcaaccccaccagccatggcctatatcgccggcaaatcgatcgttgacaacgcttgctgtcaccttggacgaaattacgtgttcaacgtcgatctgtccgacttcttccctagcattacggccatgatggtggaacatcaccttgtgaaaataggagtgagtcccttggtggccactgtgattgctacattatgtacctatcctaccatcatcgaccaccatgtagtcaatatcgttccccaaggtgctccgactagtcctgtgatctccaacatttgtgcgacaaccctggaccaccggctttctgggctggcaaaacgattccatctaagctatactaggtacgccgacgatatcactttttcctcaaatcacaacgtgtatcaccccgatggggatttcatgattgagctgtgccgtattatcgacgagtgccactttaccataaacagaaataagacacacctgcagaagcgcggcgaccgccagatggtgacaggtttattggtctgcgaaaagccgaacgtgggaaggaagtttataaaggatctccgggcgcatattcataaaattaagttcgaggaggagccaactctgcatgacatcaacgtggtcaggggcaaactcaatttcctccggatggtcaaaggggccgaggacaccacgtacctcagtcacataaagaagttgaatatggccattaaagggaaacattttgtctga

SEQ ID NO: 7364 - RNA, 1029 nt, synthetic construct
  source 1..1029: mol_type = other RNA
atgaacgctgagttaagggaggaactccggagtcatattaacgttgatactattgagggcttgtgcaaatctataaacgaaatagggccctacgtatcctttctgggcatggattcatccatttcagtcagtaccctcaagtattttacccaagtgagtgctcgcagagacgcttataggcagtttcatatccctaaaaaaacaggaggcgtaaggactattaccgcccccgatggacagctgaaagacatcatgttcaccctcgcctttattctgagcgaactttacatccctagcccagaggccatggcctttgtcccacagcggagcatcgtggacaatgcacagcagcacctgtgtaagaattatgtgctgaacctagacctgtgcgacttcttcactagtattacctcatacatggtggaacgcggcctttgtgaactgggtatctctcctgtcgtggcacagtgtttgagcactatctgtacgtaccctgagttcaaagagaatcgggtccagaatgtggttccccaaggagccccgaccagcccagtaatcagcaacatctgcgcacgacgtctggatcgaagattgtcaggtttagcgagatccttccacctgtcttatacaaggtacgctgatgatatcaccttttcttccaaccacaacgtctaccatcaggacggcgccttcatggcagagttgtatcgtataataactgactgccatttcgccgtgaatgaaaagaaaacaaggctgcagaagagaggggcccggcaagaggtgacaggcctgtctgtttccgagaagccaaacgtgtcgcgcaaacacgtcaagaatctaagagcccttattcacaaaatctcccttgaaggagcgcccgagatgcacgacatcaatgtggcccgcggtaagctcaactttctccgaatggtgaagggggaaacagatagcacgtacattcggctgattatcaagctcaataaagcggttgctgggaagcatttcgctgactctataaaggcatga

SEQ ID NO: 7365 - RNA, 1026 nt, synthetic construct
  source 1..1026: mol_type = other RNA
atgagtctgcaggagtatcttatcgaccacatctgtcttgacacccgagagagcctatgtgagagcataaatgagattggcccatatgtgagcggactgtccattgacaacactattactgttaaacacctccggcgccatgcaaatgctagaataaggttaggttgttaccacgaatttaggattcctaagaagagtggcgggtttaggacaataaccgcgccggacggccagttaaagcacattatgactgcacttgcattcatactgacatatatctatcatcccaccccaacagccatggcttttgtcccttgcaggtctatcgtggataacgccagaatgcacgtaaaccacaattacgttttcaatatcgacttgtgcgactttttctcttcaatcaccgccgacatgatcgaatacagcctcatcaggcaaggaattaattctatggtggcaagagatatatccacgatctgctgctaccccgtctccgatggcacccatacacggaacatcctgccacaaggggcccctacatcgcctgtgctgagtaacatctgcgcccaaactctggatcagcgactgacaggtctggcacagcggttccatctcacgtataccagatacgctgacgatattaccttttcatccgatcacaacgtctatcatgataatggagcctttattcaggagttgcgtgccattattgctgagtgtcacttcgtgatcaacacgaaaaaaacccgcttgcagaagcgcggctcacgtcaggaggtgactgggctcacagtgaatgaaaggcccaacgtctctcgcagatacatcaaaaacctaagagccatgattcaccacatagaactcgacgagcatccatcatgtcatgcgatcaacgtggctcggggtaagctgaacttcttgcgaatggtaaagggggaaaatgatagcacctacattcggcttgtgatcaagctgaatctggctgtccgcggaaaacatttcgcctccgacactcccactgtttga

SEQ ID NO: 7366 - RNA, 1017 nt, synthetic construct
  source 1..1017: mol_type = other RNA
atggatatcgacgtttcctctagagatgccctgtataactcgatctataaagtgatgccttatgtatccaacaccctgctggctagtccgtctgtgctgtacaagaaaattcgcttttataacaacgtcaagaacaggttgagcgcataccatgagttcctcattccccagaaaaccggtggaacccgtaagatattagcgcccaattccgacctcaaatctctgatgtcagcaattgcctttatcctgaacaccatgtatatgccttccgatagtgttatgggattcgtgaaacagaggagcgtgcttacaaacgctaaaaaacatgtcgggaacaactatgtgtttaacatcgatcttagcgactttttcccttcaataacagactctatgatcgaagcccagttactgaaaatgaatataccccctttggcaactcgcattatctctagcgtgtgtacatacccacagaaaatggagggcggcacatacaggcaagttctgccacaagggtcctccgcgtcacccattttatctaatatttgctgcatcagcttggataaggccctagagggcctcgccaagcggttccacctgacctatagtagatacgctgacgatattactttctcctcaaatcacagcgtctaccaagaagacggtgaatttatgactgagctccagaagatcatcgctacacaccactttttcattaatccaaagaagacaagactgcagaaacggggaaccaggcaggaagtgacgggggtaagcgtgaatgagaagaccaatgtcagtcgaaagtacgtcaaaaacctgagagccctcattcaccagatcgcccttgccaagaaactctcaacgaagaaggtgaatgtggcacgcggaaagttgaactacctacgaatgatcaaaggcgttaatgacaatacttacaagaccctgtgtataaagcttaatctggctctcaagggcaagcatttcactccaaaaaagaagcggagttacgtaaaatga

SEQ ID NO: 7367 - RNA, 1182 nt, synthetic construct
  source 1..1182: mol_type = other RNA
atgcattcactagttcactcagcacactgcagaagtctcgatcacccggcacataccaaggtccgccctatgttctcccttctttcgcagattgacaaaataatgcgggatcagatcgtgaagtacctcaaagacatcactattgggaacccaaaggaacttttcgacgttctgaatttcatcgcaccactgatcgatggatggtctttaaccgagccgaagtctggccggcagataatgagattcgccagtgtgaaagcaagacagagcgcctatgtagattttacgattccaaagaagtcaggcggttatcggaagatctctgctcccgtgaagccactgaaggctatacagtctgccattaatatcctgctgcaggccatttttgtgccagatgagcatgccacagggtttgttctgaacaggagcgtcaaagaaaatgccttgattcacgtcggacagacttgtatcttcaacatggatctggagaactttttcccctctatcaccaaattaatggtcagacaggctctccaccgggaattgggcgatcgactccagtccaacgacgtgataaatattatttgtcggctttgcactgtctctgatagtgagggcgtcgaagtactgccccaaggcgcacctactagccctgtgctgtccaatatcgtgctgaagtcactagacaaagacatgagcaaattggcggagcgaatggagtgcaaatactcccgctatgccgacgatataaccttcagccatagcaaaagtataaggaggatgtcacccttctggcagtccagactctataacattatcgctaagtacgggctgaaagtgaatgaaaagaagaccaagacctttgtacccggtacaaggagggaggtgacaggagtggttgtgagcgacaagattaatgtgcctcgcagctacatcaaacagctccgtgtgttactgcacctgtgggagaaatacggatatgcccaagctcaaatcatctttacacgagacttttgtaaggggatggaaaagaacttggtcaacgttattgacggtaagatcaactacctcgaaatgattaaaggcaaagacgatcctacgtatcgtaagtttaagtcccgcttctcccatctgcaatggaaagagaagcagtacagtaaccagatccaaaatgcgatctga

SEQ ID NO: 7368 - RNA, 1080 nt, synthetic construct
  source 1..1080: mol_type = other RNA
atgcgggagcaggtagccgaatacctgaagaacgtaaccatttcttctagaaagcaactgtttgatgccctgaatttcattgcccccctgattgatgtctggtccttggcagccccaaagtcaggacagcagttcttaagattcagctccgccaaatcacgcacgaccgggtatgtggatttcaccatcccaaagaaaacaggtggcgtgcgaaagatctctgcccccgtcaagcctcttaaagaggtgcagtcagctattaatacactgctccaactgatcttcattccagacgagcatgcgaccggattcgtgctgggcaaaagcgttaaggacaacgccctgattcacgtggggcaaacctgtatctttaacaccgacctcgagaactttttccccagcatcactaagaagatggtgagaagagcgcttcacactgagctaggtcatattctgaactcaaacgacgttatcaataccatctgcaggctctgcacagtgccgaactccgatgggattgaggtattgccccagggtgcacctacatccccaattctgagcaatattgtgctggccggattggaccgcgatatggctaagctggcagataggatggaatgtaaatacagtcgatatgcagatgacataacactcagccacagtaagcctgtcaggaaaatgtctagttacctgcagagtaaaatccaccgtataatcctaaagtacggcctcaaggtgaacgaaatcaagactaagacttatgtgcctggcagacggcaggaggttacgggggtcgttgtgtcgtccaaaatcaatgtggctcgtacttatgtcaagaatttgcgcatactgcttcatttatgggaaaagtatgggtacatacaggctcagctgatttttatcagggatttttgccacggcaaagaaaagaacttagagaatgtcatagacggaaaaatcaattacctcgagatgatcaagggcaaagacgacagcacttaccttaagtttaaacgcaggctcaagttgcttcagtacaaagaacggcaaaaaaccacatatacgaaacgggctatctga

SEQ ID NO: 7369 - RNA, 1080 nt, synthetic construct
  source 1..1080: mol_type = other RNA
atgaggacacagattgccgattacctgaaggacctgactattggtaaccgtaaagaactgttcgaggtactcaatttcatcgccccccttgtggattgttggagtttggccgagcctaaatctggcaagcagatcatgaggtacgcttccgccaacgcccgcaagtccgcctatgtggaatttagcatcccaaaaaaatctggcggtcagcggaccataagcgctcccataaagcctctgaaagcaatccaatcagctattaacatcttactgcagtccatctttgtcccggataatcacgcgactgggtttgtcctggacagaagtgtgaaagacaacgcactcattcatgttggacagacatgcattttcaatacagacctggagaattttttcccctccatcaccaagattatgatacggaaggctttgcatagagagctgggtgacaaactccagtcaaaggaagtgattaacataatctgcagattatgcaccgtacccaactcatccggcatcgaggttctcccacagggggcacctacttctccagctttgtccaacatcgttcttaagtcttttgacaaagacatgagcaagctagccgaaagaatggggtgtaaatactcgagatacgcagatgatattaccttctctcattcaaagagcataaggcgaatgtcgctcttctggcagagtcgcatttataacatcatcgcgggatatggccttaaggtcaacgagaaaaaaaccaagacccttgtgcggggaacgaggcaggaggtgacaggagtcgttgtgggagacaaaattaatgtgcctaggagctgcgtgaaacacctgcgtgtattgctgcacctatggaagaagtatggctatacccaagcccagattatttttactcgagacttctgtaaggggaaggaaaagaatctggtgaacgtcatcgatgggaaaataaattacctcgaaatgatcaagggcaaggatgatagcacgtaccggaaactgaaaagttggttcaatcgcttacagtggaaggagaagcaacgcagcaatcagatgcaaaaggcaatctga

SEQ ID NO: 7370 - RNA, 1080 nt, synthetic construct
  source 1..1080: mol_type = other RNA
atgctggatcaaatcgctgactattttaaggataagaccatcggcaacaggaaggacttcttcgatgccttaaatttcatctctcctcttatagatggatggggactttgtgagcccctcagcggcaggcgcattcttagattcgtaacaaaaaaatccaggcagaacgggtacgtcgactttactatccccaaaaaaagtggaggcgtcagaaaaatcagcgctcccgtgaagccactaaaagagatccagtccgccataaacatcctgctgcagtcgatctttattcccagtgatagcgctatgggcttcgtggcaggtaggaatgtgatggataatgcactgatacacgtcggccagacttgtatcttcaacactgacattgaaaacttcttcccatcaataaccaagattatggtgcgcaaagccctgcagcgagagttaagcaataaattaacctctcacgatgtgattaacattatatgctctctgtgtactgtgcctaacaatgtcggagttgaggtactcccacagggcgcgcctagttcccctattctgagtaatatagttctgaagtccttggacaacgaaatgagcaagttggctgggcgagccggttttcgttattctcggtatgccgatgacatgactttttctcatagcaagccaatcagacgtatgaatccgttttggaagtcccggattctaaatatcattgagcagcacggcctcaagattaatgactcaaagacgaagacatttgtgcggggaattcatcaggaagtgaccggggtgatcgtatcagacaaactcaacgtgagccggcagtacgttaagcagttgagggtcctgctccatctctgggaaaaatatgggtacgagcaggcccagaccatcttctcccgcgacttttgcaaggggggtacaaaaaatctgtgcaacgttatcgacggaaaaatcaactacttggaaatgatcaagggtaaggaggattctacatactgcagattcaaacaacgcctgaaaacacttatttggaagcaaaagcaactgtcaaccaacaagacggcatcggtgtga

SEQ ID NO: 7371 - RNA, 1020 nt, synthetic construct
  source 1..1020: mol_type = other RNA
atgaccggtatctctggcaactacattcgccgctttctgtctaagaactcccgacgcaaagcttacaagagttttaagatccccaagaaatccggcggattccgaagcattagtagccctgtgaatgacttgaaggacattcagcgcgccatcaatgccctcttactgtcgatttttgagccctcaccctatgccatgggattttgcaggaaccggggagtggatacgaatgccaaaatccatatcgggcagacctgtatcttcaacactgacttggagaatttcttcccatccatcactaaacagatggtacggaaggcacttcatagagagctcggggacgttattagcagcaacgaggcaatcaactatatatgctccctctgtacagtacctaacgatgagggaatcgaggtccttccgcaggggtcacctgcctcaccagtcttgtctaatattgtgcttaaagccctggatcgtaaactggctctgtacgccgaactatgggagtgcaggtacaccaggtatgcggatgacatcacttttagtcataatagcacggtgagaaagttcagtcaatttaaacagttgcggattagaagcattattgaggagttcgggctgaagattaatgaaaagaaaaccaaggtcctggtccaaggcgaaagactagaagtcacaggcgtgaccgtttctagtaacaaagcgaacgtggctcggaaatacataaaacagctgcgcacactgatgcacctgtgggataagtatggttatgaacaagcacagcacatatacgttagggatttctgtggaggcatcgaaaagtctctgactagcgtgataaacggtaagatcaactatctctgcatgatcaagggcaaacaggactccacatatcgaagattcaagtcacgttacgaaaccgcagagaagaagagaaaggctctctccaaaacaaaagtggtgttataccggaggtctaggaattggaataagaaatcctcaccagctcacctttga

SEQ ID NO: 7372 - RNA, 966 nt, synthetic construct
  source 1..966: mol_type = other RNA
atgaccgatcggcccgagaggacagtacggcattttctgccggctcgcgttcgggccgcctcttatgtggaattcactataccgaaaaaaacaggtggcactcgactaatctgtgctcctgtgcaacctctgaaggccgtgcagagagcgctcggaacaatgctgcagactctgtttcagccctccgacgctgccatgggctttgtcactgacagatcagtcgccaccaatgctagatgtcacctgcaccagaactgcgttcttaatcttgatctcgagaacttcttcccatcgataaccaaagcaagagtgaggcgtgcactcgaacgagaactggccgacagaataccttcctccgaggtgcgcagcctcatctgcagcttgtgcactatccccaatcagagtggaatcgaggttctgcctcagggggcacccacgagtccagtcctgtcaaatattgtgctgaaggggttagatcgacgcttagccgcttttgcaggcgcccacggctataactacaccaggtatgcggacgacatcacattctcccatgatcgccccatccggagattctcaccatttttcatggagcgcgtaaggacgatcatcgaagagtatggactcaagattaatgaccgcaagaccaaggtcagtgttaaaggcgaacggttggaggtaacagggctaacggttggggaaaaggtgaacgtcccaaaaaactacattaagagattgcgtacccttctgcatttgtgggagcactacggctatgaacaggcgcgactgatttactctagggatttcagccaaggaaccggaaagagccttaaaaccgtcatctacggtaaaattaactacctggcaatggtgaaggggcgggaggatcctactgtggtgggttaccgtaatcggtttaggagactcgtgaggattgctaaggccgaagagaggacatctatttcttga

SEQ ID NO: 7373 - RNA, 969 nt, synthetic construct
  source 1..969: mol_type = other RNA
atgacagaacgtccagaacgcattgtgagacgctttctgcctgccagggtcagagcggactcatacgttgagtttaccattcccaaaaaagcagggggatctcgttccatttgtgccccaatccagcctcttaagaaagtgcagcgtgctctgggaacccttctccaggctctctttcagcccagcgaagaggctatgggctttgtggcaggacggaatatcgctgccaacgctcgatgccatctcaatcaaagttgcattctgaacttggaccttgaaaacttcttcccctccataacaaaaacattggttcgccaggctctgaagcgcgaactcgccgatagaatcccgagctctgaagtacggaacctgatatgtcgcctatgtacgattcctaaccagtctggcatagaagtgctcccccaaggcgcccccacttcaccagttctgagcaatattgtgctgaagggattagatagaagattatcggcctttgcagaggcccatggttataattacaccaggtatgccgatgatatcaccttcagtcataaccaccctataagacggttcagcccgttcttcatcgagaaaatccggtctattatcgaggagtacggcctgaaaatcaacgacgagaagactaaagtgtccatcaagggggagcggcaggaggtcactggtctaactgtcggcgagaaagtcaatgtgccacggaattatatcaagcaactgaggaccctcctgcacctgtgggagcactacgggtacgagcaagcccagttgatttacgatcaggacttctgccaggggaccggtaagtcactgaagactgtcatttatgggaagatcaattatttggcaatggtgaaaggcagggacgactccacagtgatcggatacaggaaccgatttaggaagcttgttcgagtaacgaaggcgaaggaacaggcaagtttcacaagctga

SEQ ID NO: 7374 - RNA, 1056 nt, synthetic construct
  source 1..1056: mol_type = other RNA
atgaaggagtcacacattgcagaagctgcccgggaatatctgggcacagggaccgtcaagtctccacgagatcttgcagtcgcgatctgcagatgcggggagctattggacctgtggccactaggggagctgaccctcagccacttaaggcgccttagcactaaggcagtacggaaagagtgctatcggacatttagcatccccaaaagatcaggtggcgcgaggcaaattgcagcccctacgggccgcctcagagatattcagcgtgccattaacttgctgctccaggctcgcgttggcgtgatggaatgcgccacagggttcgtttgtggcaggagtgtaaccgacaacgccctcccacatattggaagtcacgtggtggtgaaccttgacatcgagaacttcttccctagcgttaccaaacgtatggtgcgcgaatccctgaaaagggagactcgcgaatggctcgaatctcacgaagccgtgaacatgctgtgtagcttagtgtctatgcccgacggcgagaaaggtgagatgttgcctcagggagcgccctcatcccccatgatttctaatatagtcctgggccggttggataggaggctggcaggattcgctcgagagcgtggctacgcctatactaggtatgccgatgatctgaccctgtccgggagagagatccgcaagatgagtgctgccgacatgaaactgatcgaaagaatagtggctgaggaaggatttaaattaaatcggcggaagatcaagcaacagggtgccgggcatagacagtccgtaaccggtctgacggtgaatgaacgcataaacgtctcgagagactttgtgaagaatcttcgggtctgtctgcatctgtgggagactaggggatacgaagaggcttcaggaatctaccgaagggactttagagggggtgaggacgtcgatttcgcccgcgcaatcaagggcaagatcaattacattgctatggttaagggacgtcgagatccggtgtttatggctttctcccggcgacttcggctcctcacaggcagaaaatga

SEQ ID NO: 7375 - RNA, 1326 nt, synthetic construct
  source 1..1326: mol_type = other RNA
atggcaacacggaccataaacggacgtgagtacaccaaagccgatttcgagaatcagttgcgatacctgaatgacgctcaagagcttgccaacctacttaatgagctgaaagcgccatatatctatagcgattttcgcggaaagcaactatcatttttcgcagataccaataacatcagaaggagatgcaaaacgttcagactccgcaagaaacacgggggctacagggaaatcaccgcccctaaaggccgcttgcacgacgtgctgcacattcttaacatcgtgttgcagacctatgatgaacccacaccctgggcttatggctttgtgtgtgggagaagtgtcgtggacaatgctaggccacatgtcggtaagcgctacatcctgaatctggacctcaagaatttctttccgaccatcaccagacgccaggtggccgactgtcttatggcggagcctttcggcttcagctctttagctgccgagctggtgagcggcttagctaccgtcaggactgataatggcgaagaggtcttggcgcagggctttgccacttctccaactctctctaacttcatctgcagggaaatggataaggagatcgccggagttgcagctgcccagggagttacatttacccgatatgccgatgacctgacgttttcaagcgacgcagacattctgcggcctcaaggagaactcgcacagcaagtgaaaaccattgtcgagcgatacggtttcattcttaacgaagccaaaacacatctgcagcggaggggtaggcggcaggaagtgactggattaatggtcacagagaaggttaacgtgtcccggagatacgtaagggaaattcggagcctgctatacatctgggaacgttacgggtatgaggacgcatgtcaggctgcatggaagtcatacaagcagcaacatggtaagacaaaagggcaccagcaccatgtgcccctgaacaaggtgctgggaggcaagctgcactatatgaagatggttcgcgggtccgatgatcctctgtacctcaggttcgcctcacgatacacttcgcttcagcagagatccaaaggcgacataaaggaggtggagtataaggcctatatgggcaaatgcttgagtaagtctgggaaagaccgcgtaactagaacgactgtactgagcaatgacaacaccagtacacgacagcggggggttacatccagtaatccatacgatcccggtaagaaaaacaagcggattctcaacttcattgtcatggtgatcatctttgctgcgattatactgataaagctctttctcaaatcccgtctgtga

SEQ ID NO: 7376 - RNA, 1326 nt, synthetic construct
  source 1..1326: mol_type = other RNA
atggctacacggataataaacggacgagagtatactaaagcagatttcgagaacaaattgtgccatcttagcgacgcgcaagagttggcagctatgctgaatgaactcaaactcccgtggtactactctgattttcgcgggaagcagctttccttcctcgcagatactaataacgtgcagaggcgctgtaagacattcagacttagaaaaaaacacggtggctatcgcgagattaccgcccccaagggcggccttcgaggcattttgaatgccttgaacatcctgctccaaacgtatgacgagcctacaccctgggcctatgggtttgtttgtgggagaagcgtggtggataacgctcgaccacacgtgggtaaaagatacatcctaaatctggacttgaaggacttctttcctacgattacccgtcagcaggtagcagactgcctcacagcggagccatttgggttctcaagcctggccgctaaactgatcagcggtcttgccacagttaggaccaagaacaacgaggaagtgctggctcagggatttgctacctcccctaccctgtcaaactttatttgccgggagatggacaaagagatcgcatctatcgccacagcccagggcatcactttcacacgctacgccgacgatctgacctttagtgcagacacggatatcctgcggccccaaggggaattagtgcagcaggtgaaagctatcgtcgaaaggtacggttttcggttaaatgaggaaaagacccatctccagcggcgtggacgacggcaagaagtcaccggacttatggtgaccgaaaaagttaatgtctccagaaggtatgtcagggaaatcagaagtctgctgtacatatgggaacgttatggctacgaggatgcttgccaggcggcatggaagtcatacaggcaacagcatgggaagactaagggccaccagcactgtgtgccactgaatgccgtgttgcgcggaaaactgaattacatgaagatggtcaggggcgctgatgacccgctgtaccaaagattcgttagtcggtacaccagcctgcagcagcgcagtaagggcgatattaaagaggtcgcctataaggcctatatgggaaaatacttatcaatttctgccaaggacaggacaactagcgcaaacgtgctgcccaatgataacacttcttccagacagctaggagcgacttcttccaatccatatgaccctcggaagaagtcgaagcgcatcctgaacttcattgtaatggtgatcattctagtagccataattctcatcaagctcttcctcaagtccctgttatga

SEQ ID NO: 7377 - RNA, 993 nt, synthetic construct
  source 1..993: mol_type = other RNA
atggcaacacgaaccgtgaatggccgtgaatatactaaagcagactttgagaaccggttaaggtatctcaacgatgcccaggagctggcaaaattgctcaatgaactcaaggccccgtatatatacagcgattttcgaggaaaacagctctccttttttgctgacacgaataatattcggcggaggtgcaagacattccgactgagaaagaagcatggcggatacagagagattaccgccccaaaggggaggctgcacgacgtactccatatcttgaacattgtcctgcagacatacgacgaacctaccccttgggcttatggctttgtttgcggacgctcggtggtggacaacgctaggcctcacgtgggaaagcgatacatcctaaacttggacctgaagaacttcttccccaccatcacacgccgtcaggtggccgactgtcttatggcggagccctttggattctctagcctggcagccgagctggttagtggccttgctaccgtgaggacagataatggggaggaagtacttgcacagggcttcgccacgtcacccaccttatccaatttcatctgtcgcgagatggataaggagattgctggcgtggcagctgcccaaggcgtcactttcactagatacgccgatgacctaacattcagcagtgatgctgacatactcagaccacagggtgaacttgcccaacagatcaaaacgatcgtggaaaggtacggtttcatcctgaatgaggcgaaaactcacttacaacggagggggagacgccaagaagtcaccggtctgatggtcactgagaaagtgaacgtatctcgccgttacgtttgcgagattaggtctttgctgtatatttgggaacgctatggttacgaagatgcctgtcaggtccgggggagagctacctcatgcagcacagagagacagcgggggatacggactacctatctgctgatcaagttttgggtggtttcctga

SEQ ID NO: 7378 - RNA, 1323 nt, synthetic construct
  source 1..1323: mol_type = other RNA
atggccactcgtaccgtgaacggaaacgaattcacaaagaccgactttgacagccgccttcgatggctcaatgaaccaaaggagctcagcgcccttctaaacgaggtgctagacgctttttgtttcaccaagtccaggcccgcccagctgaggttctttgcaaacacctacaacacccaacgccgatgtcgcactttcagacttcggaagaaacacggggggtaccgcgaaatcatcgctccgaagggcaagctgagagacattctgcatgccttgaatattgttctgcagacctttgacgatcccactccatgggcctacggctttgtctgcgggaggagcgtggtagacaatgccaggccacacgtggggaaacggtatgtgctgggcctggatctgaaggacttcttcccctcaatcactcggcggcaagtggcggattgtctcacgaccgagccgttaggattttcttcagtagccgccgaccttgtcgctggcttggcaagcgtgaggactgatgagggtcaggaagttctggctcagggcttcgccacctcccctacactgtctaatttcgtttgccaggagatggatcgtgagatagccgacgtcgctgccgctcagaatatcacatttacgcgctatgccgatgacttgacgttcagtagtgacgctgatatcctgaggcctcaaggcgcatttgttcagcaaatcaaaactatcgttgagagacacggatttcggctgaacgaagcgaaaacccacctgcagaggcgaggtagacgtcaggaagtcacagggctcatggtgacagagaaggtgaacgtcagccggaggtatgtgagagaggtccgttcgttgctctacatttgggagcgatatggatacgagaatgcatgcaaagctgcatggaaatcctacaagctgcagcacgggaaaaccaaagggcacctgcatcatgtgcccctcaatcgcgtactcgcaggcaagttaaactatatgaagatgataagaggcgcttcagatcctctttaccagagattggccggacgatatgcagccctgcgcgatgctaatcgggatggaattatgaacgtggaatacaatgcgtacatgggcgagtatgtccccaactctcatcggcgaaggcctgcgggtgatgacggactatacacagaaaatactgcaggtagacatagacgctctggtacacgcgacatttatagtccagaaagaaagggcaaccggattctgaagttcattttaaaagtggcaatgtgggccgctatcatactcgcctacctgtatttcaggtcccggtga

SEQ ID NO: 7379 - RNA, 1314 nt, synthetic construct
  source 1..1314: mol_type = other RNA
atgacctccaaaacctttgcccgtaccgatttcgatcgccagctgcgtcagctcagctctccggcagaactggcagctctgctgaatggcgtgttgccagcgttcttctacgccatctgccgacccgctcaactgagattcttcgcaaacacggccaatatcgaaagaaggacacgcactttccgcttgaggaaaaaacacggaggctaccgggagattatcgcaccgaagggggccttcgccgacatatcaagagtgctgaatactgtcctgcagacctacgacgagcccactccatgggcgtgcggctttgtccgaggtcggagtgtggtagataatgcaaggccacatgtcggcaagaggtacgtcctgtcactggacctaaaagacttttttcctagcatcacccggcagcaggtggccgactgtctagctgccgagccttttggcttttctcctggagccgtggagttggtgagtgggctgtgcacagcccggctcgatggacaagacgttctggcacagggcttcgccaccagccccactttatccaattttgtatgtcgcaagatggacgagcagctggctgaactggctgggcagcaagcagtgacttacactcgttatgctgacgaccttacattcagctctgatgccgacgtcctgcgacccacaggagacttcgtgcagagagttgaggatatagtcaggagccacggcttcgaacttaacggctccaagacgcatctccagcggagaggtagaagacaagctgtgacagggctaatggtgaccgataaggtgaatgtagcccggagatatgtacgccaggttcgttcccaattgtacatctgggagaggtacgggtatgccgaagcctgtaacgcagcgtggaagcactatcggctccagcacgggaaaaccaagggtcaaggccattttgttaacttagatgccgttctgcgcggaaagctcaactatttgaagatggtcagaggagctgaggacgctctctaccagcgactgcagagcaggtatgataggctttgggcaaaagatcgctcggcaatcggccacgcggtgaggaaggcttacgccgaaaactatgaggcgaaacagggacagcacggaaggcagagttggcttacggtggggtcaaaacccacaagtgcaccagctgaggaccgatatcgcgccggttccattgataaccctcttcctgctgaagggtcacggtctggtgtgaagcggattttaaaaattgcattgtgggttgccgccctcgctgccgtggcttactttctcctgcattga

SEQ ID NO: 7380 - RNA, 1437 nt, synthetic construct
  source 1..1437: mol_type = other RNA
atgatacgccaaaagcagaacctgaagttcgataaagagacggtcgaccgacaactgaagaacctggaatccgccaaacagctggcacagatcttgtatgacgccgtcaatgatgtgcggagagagccctattggctacgaaccaactccaaaaatggttacctgtatgactccatgcctcttgagtggcgatctgtttcccagctgaactattatgtagataccgccaaggatgactacaatcgattacggattttcaatatacccaaaaggaaaggtggtttcagggaaattgttgccccaaagcccgcatttagagtgagactcaaggcgattctgaagatcctgcagtcgtacgaagaagctacaccgtgggcctacgggttcgtgcaagggcgatccgtggcagacaatgccgccttacataccggcaagaattttgtgttaaacatcgacctcagcaattttttcccttccattactcgggagcaggtcaagcaggtcctcagtgctaagcctttcgaattttccccattcgccgtggacttcataagcggcttgtgcacgtaccgtaaagatggggtagacgttctcgctcagggatttcccacatcaccacttctctctaacttcgtgtgccgccaaatggatgaagatatcgctaaagtggctgcggagaataacgtgactttttcaagatacgcggatgacattaccttcagctctgatgtgaatgtgtttgactttaacggcgcattctacaacaagatcaaagaaatcatctcaagttacgggttcgtgatcaatcaaaagaaggtacgcctgcagagcaaaaccaggcaccaggaagttacaggcattgtcgtgaataaaaagcttaacgtctctagacgttatattcgggagatcaggacccttttgtttgtctggaaaaaatacggctatgaggctgcttgctgttgtgcctataggaataaccgcaaaaaggactaccataagtattaccactctattgaggttagtaagttcctcaggggaaaaatcaattatctgggaattgttcgcgggaaagacgacagcatatatctacggtttaaggcacagtttgacgaactgtacaaaaacgagagcgatgtgatgaaatcatacagcgacatgctcgagaaacaccggttgcgcagagaaaacaacagcgagtgtgaggaaatgtctgacaagtcgtgcggcgtgtccactaatgacgaggcaggcaacagtgtatctgcaaatagttcaacagatggaaacggataccagacacggatcgatagaaacagctacctgcgggatgctgatgataaggagagaaggaagaaggacaggcgtactatcatcctgatttgtttcgccttcctgattatctttcgcttgcttgtcttcatattttttaaggcctga

SEQ ID NO: 7381 - RNA, 1206 nt, synthetic construct
  source 1..1206: mol_type = other RNA
atggcacaggtaaaccgcgacgtggatcttaaggcccttgtcggtaatcagctgcagtacatttactccgcggaagagctgactaacgttttaaacacactggcgagcaatgtgggggtcccgagcgacttccggcgaaaccagatgctgtgcttcgcagacaccaggaatgactaccgcagggtaaagcggtattttatgcacaagaagcacggtggaagacgccccatagtcgcccctcaccatagcctgatgcacatgctacaggggtttaatgtgctcctacaacagtataatccacccacaccttggtgctacggcttcgtgaggggccggtcagttgtgcaaaacgcccagctccacgtcggcaagagatacatcctgaatgtggacattaaagacttcttccctagcatcaccagacagatggtggaagatgtattgaccgctgctccactgagatgctctacagaggccgcccagttgctgtcagggctttgtaccgtgatagagccggtaggcgacgtgctgccacagggatttcccacttcgcctacgctctccaatatggtttgtcggaagatggacgaggagttagcagctgccgcccaacgtatcggggcaacgtatagtagatatgccgatgatatgactttctcatgtgataacgatgtgctgagaacaacaggctctttttacctccaggtgagtacgattgttgaaaaatacggctttcggttgaacgatcggaaaaccagactgcaaagacggggaaggcgccagcaggttaccggtattgtcgtctcccataaagtcaatgtcagtcgcgagtatgcacgccagatccgttccctgctgtacatgtgggaacgctacggatactgggagacagccaaagctgctctccacgcttatcgagagcaaaacgggaagactaggagacatggagaatatctcactttgtatactgtgttacgtggtcgactcaactacatgaagatggtgaaaggcgaaaccgaccccacctatctaaagctgtggaacaaatacaaccagctgatgttgcgagacaagcccaaacggaggcgcgtgctcactgcacttacaaggatcgatcaaaggctgcaggcgccaaccatcattctcgctaataggaatgagcgagtggcccgtgttctgtggcagtctttgtggcggcttcattga

SEQ ID NO: 7382 - RNA, 1239 nt, synthetic construct
  source 1..1239: mol_type = other RNA
atggctcgcaatcatcgggatgtcaaccttaaagccctgatcggaaatcagttgcagtatatctactctgccgacgaactgacgaacgtgctgaacaccctggcatataacattggggagcactctggcttccgcaggaaccaaatgttatgttttgcagatacgacgaaagacaaccgtcgggctaagagatacaggatgcataagaaacacggtgggacacgggccatcgttgctccacatcagtcgctactgtacatgcttaaaggatttaacgctctactccagcagtattacgagccaacaacttggtgttacggcttcgttaagggcaggtccgtggttcagaatgcacaacagcacgtgggcaagcgttacatcctcaacattgacatcaaggactttttcccttctataacccggcagatggtggaagatgtccttctcgccgaaccactaaagtgttccacagaggcggctagactgctctcaggcctgtgtaccgcggctgagcctcaaggagatgtcctgcctcagggattccccacatcacccaccttaagtaacatggtgtgcaggaagatggatgaagagctggctgccgcagcccaacgcataggtgccacctatagccgctacgccgacgacatgtccttctcaagtgataaagacgtattgcgccctacaggatccttctatctccaggtaagcggtattgtcgagaaatacgggtttagactcaacgacagaaagaccaggcttcagcgacgagggaggcgacagcaggtcacaggtgtcgtggttagcaataaagtgaatgtggcccgtgagtacgcgagacagattcgaagccttttgtatatgtgggagcggtacgggtattgggaaactgctaaggccgcattaagaggttattgcgaacaatacggcaagacccgggggcacggcgaatatctgactctgtatgcagtgctgcggggccgcctcaactacatgaaaatggttaaagggggcactgacccgacctacttgaagctgtggaataagtacaatcagctcatgcagagggatactccaaaacgcaggcggggaacttatggcacaaatgctcacagaccggagccctctagtaccaatgattacctgggcgagccccaaagaaagggatgcgccggggtggtagcgctctttgtggtgcttactctggccggattgttggcatgcaatctgctggcctga

SEQ ID NO: 7383 - RNA, 1239 nt, synthetic construct
  source 1..1239: mol_type = other RNA
atggcccgtagaaaccagaatataaacctgaaaaccactatcggcaatcagctgcagtatatctacagtgccgacgagctgactaatgtgctgaatgacgtggcaaaacagatcggcgtgcaggctggcttcagaaccaaccagctgcagtgttttgccgacaccggtaaggacgaccgcagaacaaccaggtataggatgagaaagaagcatggcggaactcgagccattgtggcgccgcactcttcgctcctgtttatgttgcaggccttcaatgcccttttgcaagatttctacgtccccacaccttggtgttacgggttcgtgcgtgataagagcgtggcgcagaacgcacagcagcacgttggcaagcggtacattcttaacatcgatctgaaggactttttcccttcaatcacacggcagatggtagaagatgtcctgctggcagaaccaattaaatgcagcactgaagctgctaaactgcttagcggcctttgcacagcaacggagcctcagggtgatgtcttaccacaggggttcccgacatctcccaccctatcaaacatggtatgccggaaaatggacgaagaactcgccgccgctgctcaacgaattggcgccacttatacccgatacgccgacgacatgacctttagtagtgataacgatgtcctacggacgactggatccttttacatgcaactgtctaccatcgtggagaagtatggctttaggttaaatgagcgcaaaacaagactccaaaggagggggagacgacagcaagtcaccggggtggttgtgagcgataaagtgaatgtaactagagagtacgcccgccaaatcagaacattgttgtacatgtgggagcgttacggctatgaggacgcctccgaaaaggctctctggaactaccgcaatcagcatggaaaaaccaagggtcattccaaacggataaacctgtccgctgtcctcaggggtcgcctctcatatatgaagatggttaagggcgaggcggaccccacctatctgaaactctggaacaaatactgtgcacttcacgctgccggatatccaaagagcaagacacggaagcgcggaatgaggcctgctaacgatgactctatgcacgttgggggatatttgggggatcccccaaggcggggatgcgctttggtgattgcattctttgcattactgacgttcgcggggctgctggcatggaatctctacgcctga

SEQ ID NO: 7384 - RNA, 3048 nt, synthetic construct
  source 1..3048: mol_type = other RNA
atgatgacgtttatcgggttttggaccgctataaacggcctcgccgctgtgaacaatcaggctgcctttggcaaacttgagtgcttaagatacggagacactactctgccagacaggtacaaaatgtataacatcccaaagaagttccagaagaaaggtctgtccgtcagggctatatacgctcccaatgaccgccttaagtactttctcaagtttgctaacaacatactttctgaacagtacgtgcaaaacaattatgcttatgggtatgtgaagggccgaaacattgtatctaacgcaagattacacacaaacaagcactatgtgtgtaacctcgacctgaaagatttcttcccaagcatcagttacgatcgagcatatcttgcggccaagaagcacttcaaagatattgaaccgagcatcctcgagttgtgtattaaagcttcctgcgtgagcgtcgaccataaatgctttctggcgcagggttcccccctcagcccacttctgtcaaacgtcgtctgcattgacctcgacaaccgcctgtattcttactgctccgataatgggtttagttattcccgatatgcagatgacatgactttttcaaccaatcacacagataaatcagctattgagctacacatcaatacgatcaagcagataattaagcagagcagtttcaacattaacgaagagaaatgcaggatccagtccaatcaatacaatcagagcgtgacagggcttacagtgaacgagttccccaacgtgaaaaaggaatacatcaaagatctgcggaacatcctgtacatctgggagaggtacggatacattgacgctaataggcggtatcaaaggaaatataggatcgccaagcgcatcaagcccttaagtgacataatcctgcctaggatggaagacgtgattcgtggccggatccagtttcttaagaccgtcaagggctccaatgacaaccagtaccagcgtttcaataacaaatacacctcattgctcaaccgcgattgtaattttattcccacccacaagcccaataaatatattgaggggagcaatttcaagatatatcactccattctgaaggaccaagacggcaataattacatccaactcgacaagttcgaacgggcaatcgtgccagataactgtctatccctcctgaaattatgccaatctaatgcgtggagcaaaattataaagaccatcttcaacatccgcccgataaacaaagcaaattacaaatgggcccttcagctgaatagtaatacccgaaagaacgctgttaaatacggactgcgtgcctataataaacgcgagggcggttatgaagacgccgccaacctgttaagaattgcaatcgagctcggcaactacaattactttgaccagtacctgatctcttgcaagctcagtaatcagagccataacttgatacctgaaaatatcgagtacctcgaggccaacgagtacgggacgctgttgaaaaaatatgctggatattatagcgccaaaggtttcaagatctctcagatcatcggcaagagtaacggagacagcaccgtagatctatacaagacccctattcatcctatccgcgaagaacacaatgtcacagagaatatccagtggcataatacaactggagttggcatatacctgggagtcaacgaatatagatgtctagacatcgataatgtgaatggagatatcgaacgggttataatcatgatgctgcacctgctgcatctgcccctggactattcgtgggttattaagtcgggctcggggaaaggcttccatatcatcttcaaagcagaaaacatagaaggcttcaaggccgatatcgtcgcattttctaccaacaagaaaaaccacagagccttcgagagaattgagctgaggtggcaggagtgtttcctggtgctaccgccaagcctgcatagatctgggaatttctatggctttcggaacggtgatattcctacctataaccctatgcacgttaagcataacgacataaacactctcctggattacttttgtggttggacaaagttcattgagttgaagtacaacaacatcgactttgatttggtctacagatccaaatggggggccgactcctcatgtgggagtgtgtcaattaacctcccaatcgaatggctgagcgcatgcaacagccctgtgtgcgcaaatgaactggccattcggtacttaattggggagtcagtaagcccagataataacaaggcagtgcagttattcagaaaggccaataacacactgagtgcatataaccttgcttctttgatagcgattggatacatagatgacattggtgaattcaattccctcatttccaaatgcaaagatcatattgatgagatagacgtgcacttcaataactccaagcaccgcatcgaacgcgtgatccaaatcttcaatcagacccaccagaagaagctctatgtgtttttcgatacagagacgaccggcattcctctcgattacaatgcccctatttccgacattgacaattggccccggctggtacagcttagttggatgataaccgatgaggatgggaagctgattaaagaaaacgactacatcgtatacccaaaaggcttcgatatccccacttcatcaagcgccatccatggaattactaatgaatacgccaacaagaaaggtatcgacattgagactgttctggctgagttcattgaggacctcaagggagtttctctggtgatcggccacaatatcaattttgacatcaacattgtccaggcggagttgtttaggctggggatgactgacatctttaatgataagcggaaagtgtgtactatgaagtcttcagttgatttttgtgccatccccaacaagtatggatataagtggcccacattgcaggagcttcaccaaaaactatttggcgagatttttacagactctcataatgccctgtctgatatccgtgccaccaagcgatgctacttcgagttgaaagaaaagggaattttgtga

SEQ ID NO: 7385 - RNA, 1971 nt, synthetic construct
  source 1..1971: mol_type = other RNA
atggacgaggtgatatatttttcagatagcgacataaccgagcggtacagactggccagcattcctaagcgcgattcgaacggccgattcactaagcgacggaaggtgtacatgccaaccccccgcctaaaattctttctccaacaggcgaacagcctgttgtccgccatctattctccgccaccctgtagctttgcatttatcaagggtagaaccattgtgggaaacgccactcctcatactaacaagaagtatattctgagcttggacatcaaagacttctttaattcgatttccatccagaaggctgtaaacgctattaaatcagcattcccatggcagttccggggggagtttatacaggcaatcgtaggggccagtagcttaaatggccaccttgtgcaaggtagccccctctcccccaccatatccaacattgtgtgtctaaacctggacaaaaggatctcttcttactgtgaaagccttaagatatcattcactaggtacgcggatgattttacgttctccagtaacgacttcgatttcaagcgggattcctctttcttagataacatcactaagctgatctctgaggaaggattcgctttgaataatgagaagacccacatccagttatataataacaagcaggtggtcaccggtttggtcgtgaactctaaagttaatgtggctcgccgttacattaaggagatcagaaacatcctctatatttggaagcgctttggctacgacgaggcactcgagtcctttcgatttcattacctgcacatctctaggaaaattggcagttccctaagaagtcggatctcatacgaagacgaaaagcggatcttacactctagaatggtcaagaaagccacaaattactcacctcgtttggaccagcatattctggggaggctaaatttcctgaagatggtcaggggtgagaacgattatcagtatcttcagctcacccaaaaattcaatgagctcagtaagaaactcccgtacaaaaaggataaagacggcagctattcctttaaaagcattcaacactttgagtgggcactggggtgtctcgtgctgactgatgatgtgaagaacgaaaatggcacacaatttttcaagatgaacaacggcggaaaagctattattagcacgaagttactcagcttcctttcctccgtagaaccagaatactatagtgttgcactttccctgattaagtccaaatgccgggtgaaagccatcaacctggaagccaatctgtttatcatctgggccacacctttggacctgaagaagtacagatgggcgattatcgacgccgtgtacagggctgctagagatcgttatgaaagtattcattgccttgccaaggttgaaaggtcagagatagaaagcctgcacaaagactttcagttcgccatgaataatggaaattacgccatgattcatgcatatcttgacatatgcaatttcctgaacctggatagcgggctgtaccctgaaaattttgaccttctcaacagtaacgataagagcattctgctgcagaaatggggttggaactactattcactgtacatcgacacagtgcccaccgataaggacggagtacctctaagtgaatctactttcgacaattaccgccgccagtgggggtctaactttgctcacctgagatggaagggagctgatggcatagccctcgttgcgggaacaaacaaatgggtgatagaagtcacagacaggaatctcgatgaggacgatgttatgcgcgagctgttgtccaataaagagattgaagtctgcatcatccgaaagccaaccttgctgctcgttgtgaataaagacgtcctgcaggagaaagagtatcagggcttcacgatccacaaatcagggtactattctatctatccatacaaaggcgagcccatggagatcaagacaatcgagctgtcgtga

SEQ ID NO: 7386 - RNA, 1470 nt, synthetic construct
  source 1..1470: mol_type = other RNA
atgcctaattgcagtaactgttacaagaccctcgacgaaggcctcaacttctgtccatactgtggagcgagggtgtctcactccggcgataaactctgtccctcctgcaaccaaattttcaatgaatatgacggcagcttttgtggtcgttgcggctctagattgatcgtgtacgagagagaacagagcacgaacggacagcatgtaataaacagcgtcgacgatcttattgctaccatcaactctttcatccccaaaatcgattccaaagctgactctatttctaaggaggagctgttatcattcggaaatatcaacaatgaccgacgctacgagattttctatatccccaaaaagcgtcggaaataccggatgataagctctccaacccctagactgaagctgatcctgaggtgcttgaacgagattatataccagcatttcgctcccgcagggtatgtaactgggtttgtgaggaacctctccattgtggacaatggccggatccacgtgggccagcgatacgtatatactatcgacctggcaaactttttcgagagtgtgaccccggatatgatcatcccatatttgtgcaaagcaccttacaaccttaatccagaagtagcagacatagttgccaaaatctcatgtgttaagaacaggcgcaaaaactctatcggcctgagccagggtagtccactttcccctgtcctaagtaacatagtgtgcgcagacttagacaaaaaattgaatggattagcctccctgtaccgggccaagtatagccgatacgctgatgatattaccttttcttcctcaaacaacctgtatctccaggttaacgactttgagaagcggataattgaggccgtggaaagctcaaatttcaagatcaactacaacaagatccacctgtgtggccctcaatcaagacattatgtgactgggattgtgacaaattcgaaggttaatgttccgagagagtacatcagcaatatccggaatctactttatatttggagcagatatggggttaaggaggcgtacaaaaggtttgatgtgtggtacaagaaatacaggaagggcaaaccgactccattcattggtgattttctgcgcgggaagatagaatacctgggtgctgtccgagggaaaaacgaccctatttataagaagttcaagaattgcctggagtccctcagccagatcaattttaagacattttacgagcgccccaaacgtatgaaggtcagttttaatctttcggagcccctggtcaaatacggaagaacgtattatacagccgaaacaaggtatcgcggagaactggtgttgattagtcccaaactcaatgcctacattgaatccggggtcgattactcacctgcccgcgtgctagccacaaattgcgtggtctataagatcttcgataaggatggagtgaagctcctgatgaccactgaaaattga

SEQ ID NO: 7387 - RNA, 1146 nt, synthetic construct
  source 1..1146: mol_type = other RNA
atggctacccacctgtccacgatatgctctgccgaggagttgaggcaggcaatcaatagatccatcacccaaagcgggtattcccctttgagccccgcccgttataagtttttgacaacctctgttaccatgccatatttataccggcactttacgataccaaaacgacatggtggcggccggaagattgatgcccctaagaaaatgatgcaagcgatccagtctgctctgctccctctgctggaaggctcctttgtaccttcgtcagccgtttgcgggtttgtcaagaatcgatcagtggtgaacaacgctctcccacacatcggatgtggagtgctgctcaacatcgacattaaggacttcttcccgtcaattactcaccagatggtcactgacgcgcttgtgtctgagcttaagatgggacaagaggccgcccacgctcttggctggttatgtaccatccccaaaaaagggcagcgtgtgctccctcaggggagttgcaccagccccatactcagcaatatcgtgtgttcgaggatggaccgggagctgctaacactgtgtgcagctcatggagtcacatatactagatacgccgatgatctgagcttcagcgcaaaggagaactgctttgaagccggtagtgaattccgccagcgcatggaagagattattaaggctacttccctaaagctgaataaccgcaaaactcatatcgcctatccggggaggcggatggaagttacaggcctcgtggtcgaacgccgagcgaatgtagccagggattacatactggagctcaggcagctgttgtacatctgggagaaatacggagaaaaggaggcagctatttcattctctaagcatcacggtgaacggacccatagaagtcccattagacagatcattcagggtaagttggccttcatgagtcaggtgagaggaaacgacgatcccatcgtgaagcggtactccagctggtttgagcgtctgaaaaagaggccgcgcaaacagcagagaaaagccacaccacctcctcaacccacccccgttacaccaccagcaaaaggcgggtacttaggcatggtggcactgcttgtcggcctgtctatgcttatggtggtggcggtagctgcagtcttctga

SEQ ID NO: 7388 - RNA, 1134 nt, synthetic construct
  source 1..1134: mol_type = other RNA
atgaagtctgtcgacgatttcatcaaacttctgaacggcctgaggtactctcgctacggcgaaaaatgcaaacccataactagaaatttgctctattactacgcaagcaataaggtcccaatctcgaatctgtacacggatatttacattcctaagaaatcaggaggcaaacgtaagatccaaattccctgccgagggttaaaagagatccagggctatattgctgagatactaaacgcacttttcacaccacagagctgtgttacaggattcgtccgcggtaagaacatcatagacaatgcgaaacctcacgttgggcataaatatctgctatcctgggatatcaaggacttcttttctagcatatacgccaaactggtgaaatactgtctggtaaacgatccattcaattttccagatgacattgccaatctgatcacgaacatctgcggtgtcaggattgaggaggatagctgtaagagggtgctccctcaagggagtccctgctcccctatactcagcaacattgtgtttgccgtgttcgacaaatatattgttgatcactgcacctggaggggcgtcatctatacccggtttgctgatgacatgactttctcagctgatcacgacttctattacgactccagattttcttggggtcgcgtgctcccttccaacggccagttttatcataacaagcacttgagacagtttttctatctcgcaaagcggctgaatattaacaaaaagaagaccaggaagtgtaaacaggggcagcgaaagatcgtgactggaattgttgtcaacgacaagttaaacgtgaagcgggagtatgtaagagaaatccggaatctcctgtttatctgggaaaaatacggatataacgatgccaaggcccgtttcaataatcatgtgcacaagagtacacccaatgccaagccgagcgaattgctgaacgtattggtggggcggatctactttattaaacaggtgaagggcaaaaatgaccccatctttttacgcttcaagacaaagctcaagtacctgtgtagtatcatgaatacctccaaagctgtgagtatcagactgaagaccggtctgttcattaaaggaaaccttatatcacttgactga

SEQ ID NO: 7389 - RNA, 1275 nt, synthetic construct
  source 1..1275: mol_type = other RNA
atggaagacatcgacactaaaccaaggtccgggccatctaccgtgtttcatttgctggggctcctcaataaggcaaaacggcaagagtttgggtatcgtgcctggccgtttactctggaacagctgttcttctttagtgatcctaaaaagaaccacatatactacctgcaccacttcattcccaaaaaaagtggcggcgtacgcgagatttcttcaccctcttggatgcttaaaatgttccaagcctccgccaagaggcttctacaagataaatacgtcgcgcctgacaacgttatgggattcgtctctggccgttccgtcgctgacaatgcagcccggcacatcgggaagaactatgtgtttaatgccgacctgaaagacttctttcccagcataacacgcgatcgcgtgatctcaagcctaatgaagccgccattctgctttgggaaggaggccgcccttcttctcagcgggatttgctgcgcccacgcagacctgactcagaagggcaaggatacgtattgggtggtgcggggcgaaggaaaacgcggcaagctgatggacgcttcaaactaccatccagccgtccctgcgacactaccacagggtgctccctctagccctgtgttaagcaacgctgtgtgtcttactctcgataagaggctcgatggtctggcgaagcgatacaaagtgacctacacgaggtacgcagacgacatcaccttcagtagtaatcataatgtgttccgagagggcgactccttcctcaaggagttcaggaatattatcaaatccgagggattcattctgaacgaagataagctgcgtctgcagaataaagggcagagacaggaagtaactggactgatcgtgaacaagaaaatctccgtttcgagacagtatatccggtccatcggcagcttgttatacatatgggaaaggtacggagtggacgctgcttacggtagatttttaaagtacaagaccgatttggaggttaccgctgataatagacagctgtgtacctatgtccatccccacctccttgagacaatgcagggcaggatagcatatgtgagaatggtacggggcgaggatgatcccgtttggaagagactgaacgaacggtttttgaagctgaaagcccaatatgaatctagaggagtcatcggtaaccctacacgcattctgcattcatggacaattaagcgatttgagcagctgagtggattccacctccgctatggtccattgtatagctttatgtcaccttga

SEQ ID NO: 7390 - RNA, 1566 nt, synthetic construct
  source 1..1566: mol_type = other RNA
atgacttacgaggagaaggccctccgagaaaaggcctttgatatagagacgaaagaagatcttttgagcttgctgaatgatataaaagctgaccttactcacgagacaagttatccgttcaccatgcagaccatgatgcgctattctcggcccggagtgtactcatggagatacaaaaagatcttcgtgcctaaaaagacaggaggtgctagggaagtctacgcatcatggggcactctgaaatggctgcaggtgtgcgtcaacgaactgctccaggctctctacgatccttctgactacgcaatgggctttgttaaacggcgcagcgtggtcgataacgctaaagcccacgtttaccaaaactacgtgtttaacatagacctgaaggacttcttcccaagcatcacctactcccaagtgaaaaattcgcttcagcagctgccatttgggttcaatgaggagattgcgaaaataatcgctggcctgtgtaccattagtgatgacacccccgacctgatgcctaaaggaaagaaggaaaggaagagatactttttgcctcagggcgccccatctagcccagttctgtccaatgcagtatgtatttccctcgaccggaaattggcaggcctggctcgaaggttcggcttaacttttacaagatatgccgacgatatcacattctcgagtatgcacaatgtctatcaggaaggctcagcctttaggattgagttggaaaacatcatcttcaagcagggattccgcatcaacgcacaaaaggtgcggctgcatcatagaagtcggagacaagaagtgacagggctgattgttggtagaaaagtaaacgtgcctaagcagtatattaaggacctacgagccgtcctgcacatctggaaaaagtatggagaaggggcggctgctgcctcctattatcccaggtaccgcgccgggatcaagaaggagacacagttcaacttaaaggcagtgatgttaggcaagctttgctatctaaagatggtgagaggtgaggatgaccccgtttacaagcgcctgtccgatcagttcgatgaagtgacaagcaagcgaaaaaagaaatgccaacccggagttgaatacctcgggagctgcacgctcaaaacctttgagcgtcggttgaacgtggtaattgacattggagaggaggtctgtaagaataaatttacgcgtattcggctcaagaatggtactaccctgccaatctatatcagcaggctgatgccccctaattctaggaaggatagggtgtgggtgagcctttgccgccgtaccttcgaggcaggggggttctctgttttctacatgctccataactcctacgccattaaatcattcgtccccccactaaagtcagatatttttgacgagactgtctccaaagtcgtggaccttgtagtagcgtttcctattctccatgtggaagacgagtgtggcgtcatccagccaaagtatataccgcagaaaatcagtgaggtgatcgaccagtttctggccgaaaaaaatatctctcacaaggagaacatacccttttga

SEQ ID NO: 7391 - RNA, 1134 nt, synthetic construct
  source 1..1134: mol_type = other RNA
atgaacagaacagcaatcctgccacctaagaaggcggtcgcaacagcggtgaccaccagaatctgtgatttatggggctgcttgcacaccaaaaaggacttgctcaagctagtgaacgtggccctcgaggggctctatggtgagcgcgtgtgctctgttagcatggctcaactgaataaggctgcgtattcaagcctgaatccagataggtactgcacatttaagatcccgaaaaagaagaagggggagttcaggacgattgacgcccctgaacatagtcttaaatacattcaacagggcctgaatatggttttacaaactatctatgcacctcatccggccgcaatggggtttgtgccacgccgtagcgtcgttaccggcgcaaggatgcatctcgggcagagactcgtgtacaacatagacctgaaggatttctttcacacaatcacttccggacgactgtactcaaggctgacctctaaacccttctgtttggatggaaaggtggccggcattattgccgacatctgttgttactcgggtcctgacggtcgaaacgtactgcccatgggagctcccacctctccaactatcactaatattatttgcgagcgaatggatacaaagttgactagacttgctaaagcatatggcatgcagtacagtcggtatgccgacgatataacttttagcggaatggctaatgtcttcggagaagattcccggttcattaaaagtctgaggaatatcatagagcgcgaggaggggtttaccataaaccccgacaaaacgcggctgtgccatcgcggcatgagacaggaagtgaccggcgtaacagtcaacgaaaaagagaatgtgccacggtggtatgtaggccagcttcggaccatgcttcacaactgggaaatggacggacacgatcgtgctcaggccgtgttcgaacgccactacgtgcccaagttcacaaggccctcctcaggtttacctcctatccatcacatcgaaaatgttatcgccgggaaactgctctacctaaagatggtcaaaggcgagacggacaccacctataaagccctgaaccggagatttgccgctctgatggactgtttcattcagacttcccagacaatttga

SEQ ID NO: 7392 - RNA, 1116 nt, synthetic construct
  source 1..1116: mol_type = other RNA
atgagactcgacagaaacatcctggatagggaggcggccaagaacgctgtgaagtgtaggatttctgacctgtgcgggtgcctgcataccaagaaggaccttctcaaactgattaatgtggccctggaaggtttatacggtgagaaggcttctatggtgactatgtcccaactcgacaaaagtctgaaaagctctccaaacacagttcgatactatcgcttcctaatccctaagaagaaaaaaggagaactccgcactattgacgctcccgagcctaccctaaaatatattcaacagggactcaatctcgtactgcagaccatctacagcccacattcagcggccatgggctttgtgtcccacaggagcgtggtcacaggggcacggatgcatatcgggcaaaggttcgtctacaacattgaccttaaggatttttttcacacggtcacatcgggacgcctttataacagacttactacaaaacccttcaacctggatcgaaaggttgccggcatcataaccgacttgtgctgctacgcggggcctgaagggaaaaatgtgttaccgatgggcgcccctacatcccccaccattactaacatcatctgtgagcggatggacatcaagttgactcgcctggcaaaggcttacggactgaaatacaccagatacgcagatgatattacgtttagcggaatggccaatgttttcgatgagggaagtcatttcatccagtcaatgaggaatataatagagaacgaagagggttttaccataaatcccgagaagaccagactgtgtcaccgcggcatgcgtcaggaagtaactggcgtgactgtgaatgaaaaggagaatgtaccacgggagtatgctaaacagttgaggacaatgctgcataactgggaaatggacggctatgataaagcccaggccgtcttcgagcaccactatcaggctgacaacccgagatacgctgccacccactcagattttcgaccaaacttggaatccgtcgtggccggcaaactgttatacctgaagatggtgaagggtgagacagacgcaacgtataaggcacttaatcgtcggttcaatgcactccggtgtgatgtttga

SEQ ID NO: 7393 - RNA, 1143 nt, synthetic construct
  source 1..1143: mol_type = other RNA
atgaagaaagttgccgagattacagataggagagctgaggtgaaggcagccgagactagaatacatgacctctggtcttgcctgcacactaaaagagacttactccgcctggtgaacgtcgccctggaaggtctatacggcatggatgccaggaccgtgactatgcgtcagctaaatctttcagcgtattcaagtcttaacgcccaccggtaccgaacctttcagatcccgaaaaagagaaaaggcgaatttcgcacgatcgatgcaccagaccccactctcaagtacattcaacaggggctcaatttcgtgctgcaaactgtacacacaccccatcctgcagctatggggtttgtcccacatcggtccaccgtgacaggggccaaggtccacctgggacagcgtttcgtgtataatatcgacttgaaggatttcttccataccgtgacctccggaagactctataaacgcttaactctggaacccttctgccttgacggagaggtagcgggtctgatcaccgatctctgttgttacatggggcctgatggacggaatgttttgccaatgggagcccccacatcccccgctgtgacaaacattatctgcgaaagaatggatggcaagttgagcagactggcccgcgtgtatggccttaaatacagccgttacgctgacgacattacgtttagcggcatggctgatgtcttcgctgaggacggaaggttcataatgtctatgaggaacatcatcgtcaacgaggaaggcttcacaatcaatccggagaagacaaggctgtgtcactggggtatgaggcaggaggtgaccggaattacagtgaacagtcgagaaaatgtgcctcgcaagtatgttaagcagctgcggaccatgattcacaattgggaaatggacggccacgacaaagcacaggccgtctttgagaagtattacatggaacagaattacacccacaaccctgatgtaaaacatcatatagagaacgttgtcgccggtaaactgctgtatctgaagatggttaagggggagacggatccaacctaccgagcgttggaccgacggtttcgcgcactcactgagacaggcgggagggacactcaaggcaccgggaaaaaccggttatga

SEQ ID NO: 7394 - RNA, 1374 nt, synthetic construct
  source 1..1374: mol_type = other RNA
atgaaactggacgaacatatcaagcggcaggagctgcttgtccaaccggacgccaaaggcgcttcaaatggccagctaccagatgcccaggcagcggagagggggaatgtctttgagcgcctgccatattacgggaaatccagtcccgaggcccgacagaaagcagcagaaaggatgcctgatttgtggcgctgccttaatactaaaggcgatctactccacttattgaacgttgctctcggcgggctttatggagagtggcctcaaaagataacaattcagcagctcaacaagtttgcttacactagcctgggtgcaaagcggtacaccagcttcaaaattcccaaaaagcggcaaggggaatttcgcaccatagacgcaccagtacctatgttgaaatatatccagagaggactgaatttcgccctgcagtgtcactatacacctcacatgtcagcaatgggatttgtgcagcacaggtccgtggtggataatgccaaggttcacgtcggacagcgattagtctacaatatcgacttgaaggactttttccccagcattacggccgggcggctacataagagacttatggccaagccctttagcctgtctaaggagatggcgagtattatcacggatctgtgttgttacactaatgccgagggcaagcatgttctgcctcagggtgccccgacgagcccaacacttactaatattatttgcgagcggatggacagaaagctctccaggctggcgaaagcttacggactgaagtacacccgctatgctgacgatataactttttcaggtatggctaacgtgttccacgaaaattctcggttcttaaagtcaatgcgtaacatcatagagaatgaggaacacttcaccatcaacacagataaaaccaggctgtgccatcaaggcatgcgacaggaagttaccggcttgtctgtgaaccgtcaggagaacgtgtccagaaagtatgtgaagcagctgagaaccatgctccacaactgggagatgaatggctacgaaaaagcacaagaagtattcgccaaacactactccgagacaaagaagtctaacctgctcatgaagggaacacatcatattgaaaacatcatcgacgggaaactgatgtatctcaagatggtaaagggtggaaacgactgtacttataaaagtctcgatgctcgcttcagagctctcatggaccatctgcccgccacaaggattgacgggaataattcgccaaaagtgaccgtggaaatccctatggtccccaaagaggatgatgaatgctgggaaaccatctacaacctggagaagatccttaacaacgagaataacaacaatgacggccgtcaggtgtga

SEQ ID NO: 7395 - RNA, 1413 nt, synthetic construct
  source 1..1413: mol_type = other RNA
atggagattgacgaacacataaaacagcaggagcagcaaacccacgccgattctttagaggtgacactgggggagccactggagttcactttcgtggaaaatgccaacgtcttcgctcaactgcctgttcacggcgttagtgccaatccgaacaagaatggcatttcagataccattgttcgggtgcaggacctctggcgctgtatgaaaaccaggaaggaccttcttcacctgttgaatgtggcactggccggcatgtacggcgagcagtcaactatcctgacgatgaaacagctctgtggctacgcttattctaccattgaggcaaagtcttataccacatttcagatccccaagaaaaagaaaggggaattccgcaccatcgacgctcccgtgccaatgctaaaatatatccagagagggttgaatttcatactgcagtgcgtttacactccacatactgcagctatgggctttgtgcaacacagaagcgttgtggataatgccaaggtgcatacaggacagcgcctggtctacaacattgacttaaaagactttttcccgagcattaccgccgggagactttaccatcggctcatgtcaaagccttttagcctcaatgagaaagtagcatccattatcaccgacttgtgctgctacactaacgccgatgggaagcacgtgttgccccagggagcacccacgagtccaaccatcacaaacatcatttgcgagaggctggataggaagctggctcgtctggctagagcctatggactgaagtatactaggtacgccgatgacatatccttctccggtatgggaaacgtgttcgccgaagattcacggtttgtcaaaagcatgcacaatatcatcgaacaggaggagcattttatcatcaataaggataagacccgactgtgtcaccgaggtatgcgccaagaagtaaccggtctaagtgtcaatcagcaagaaaacgtgagccggacgtatatcaaacaactccgtacgctgcttcacaattgggagatgaatggctacgataaggcgcaggaggtgtttgcaaagcattacgcggagacaaacacaagaaacctcaagaataaagggacacatcatgtcgagaatatcatagcgggcaagctcatgtacctgaaaatggtaaagggagaaacagactgtacctataagaacttatttgctaggttcaaactcctgttggagaaccacacagacactaaaatagacaaatcgaagttctctgacgatcaggcccagaacatccctgtggacgaaggacctaagcatgtcactaacaacgagacagtacagagtgtcgacattgaaaatagcgatgagattctttctaccttttcctccctagaggaattgctgaacaacgaaaacgaatga

SEQ ID NO: 7396 - RNA, 1149 nt, synthetic construct
  source 1..1149: mol_type = other RNA
atgaacgtcgccaaacatggtcagtccaaatcactcgtccccaagccgctggaactgacccaggaaaaacgcagagcactggccgaccgagtcgcaatcctttggccccgcctgaagaccaaggccgatttgaagcagctgcttaacatcacgctgagcggccttttcggcccacactcgacgtttcttacaatgaatcaattgaactactccatctattccacaattgagtccaagcggtactcttcattcaggattccaaagaaaaataagggggagtttcgcaccatcgatgctcccatgccactgctcaagtacgtgcaacagggccttaatttcatcctgcagagtgtgtataccccacacattgccgccatggggtttgtccctcgtcggtctgttgtggacaatgcaaaagtgcacacaggccagcggcttgtgtataacatcgacctgcaggatttttttccctctataaccgcgggaagactcttcaaaagactaatggctaaaccgtttagcttgaataaagaggtggcctcactgatcacagacctgtgctgtcatacccatgagaacggtaaaaatgtattacctcaaggcgcacctaccagtcccactatcagcaatattatttgtgagcagctggataggaagctgtcccagctcgcaaaggcctatggcctaaagtacactcgctacgctgacgacataacattcagtgggatggccaatctgttcgccgagaactcaaagttttgcaagtctctgaaacacatcatagaagacgaggagggttttgttattaacccaaataagactaggctatgccatcagggaatgaggcaagaagtgactggcttgagcgttaacaggttcgaaaacgtgcctcggacctatgttaagcagttaagaacactcatacacaactgggaaatgaatggatacgataaagctcaggcggtgttcgctaaacactatactaaaaacgatcctcggcatctcttgagaaaatacgctggacgaatcgaaaacgtgattagcggtaagctcatgttcttaaagatggtaaagggggagaatgatgacacttataagagcctggtcgggcgttacaacgcgctcatgatggccgctggatgtctgtga

SEQ ID NO: 7397 - RNA, 3237 nt, synthetic construct
  source 1..3237: mol_type = other RNA
atggaggacctgcatatcaagaatggaataaagacactctggcagaatatgtcttcaaaaaacgagctgctgagcatccttaacaaagctgccagtatactctacggcgatgatgctaaaaagattgaaatgagccacctgacatatcattcctactccacaaataacaagaaacggtacatctcattccagataccaaagaaaaagaaaggggagtaccggatcatagatgctccatgtaaagggctgaagctgattcaacagtgcctgaatgtcctatttcatgaaatttacgctcccaatgtggctgcagtgggcttcgtccaaaataagagtattgtggatggagctaaaatacacctgcagcagaagttcgtctataatatagacctgaaggactttttcccaagtatcacctccggcagattgtttaagcggctccagtctaagcccttttgcctaaacgaggaaatagctagcataatcacagatctgtgctgtaatacgaatgcggagggaaaaagcgtgctaccccaaggcgcacccacatctcctactatcactaattttatatgcgagagactggatcagaagctcactaatctggctcacgcctatggactcaagtatacaaggtacgctgatgacatcactttctcgggtatggccaatgtctttgctgaatccggcaaattttgcaagagcttgcggcatatcatagaggaggaggagaaattcaagattaacacgtccaagactcggttactgcatagaggcaatcggcaggaggttaccggtataaccgtaaatgagaggttaaacgtgagcagacgctatattaagcagctgcgaaccatgattcacaactgggaaacgaagggctacatcgaggcacagtacatctttcagaagaaatacaatgagacgaacattaagaactcgaacggcatccattacatcgaaaacatcatttgcggtaaactagattatctgaagatgataaagggggaaaaggataggacctatatcaaactgaaagagaggttcgataaacttctgtttgggaacacttactctccactcaacaaccacattgacaaaatttttgagacgttgattgcgtctagatttaatgagtacaaggataagaacgccagtgacgagaacgaaaataagaaagagggtaagaactatgtgaacaagtcaatcaatacactagtctcggagctggacagtccaatgacactggaggaagccaccgaaacactcgtggagggtattgacgtgattagtgtacgcaatgggttcactagtactgaaagccgcgttatcgtggaagtgtcaacaatcaaaaaggatactaagagcccttctattaaccttgcagtgctcactgtcccgatcggcgagacatccctcatcatcaatgatgagattcaagaaggaaaattgttcatcgatgagctcaagtccctcaatgacaatccggaggactctaacaacttgaatatcgccaagaacattatgggacaaaacagccggattaggtcagttcacgccattctgaacaatgtactgaataagctttccgaagaccctaataacttccgtatctacaataacgggagggtaggatttaccgaggacgcccaagctttcattcggaaagagttgaaccgcattagccgccatctgtatctgtccgacagcgcgactcctatgctcggactgaccaataataacgagatagtgttcaccatcttggatgacaacaccttcgaggacgtcctcgtgcctactggtatagttcttgggaatacgaacgtggccgacgccgccaatagcatcaaaggtgccgaaaatattttccataagaacgccacaaaactgaccgaatataccactgccagaattgtgagagacttgataacgaaggtcgagggcaacgagagggtggttcggaaaaacggcaagggatacgaagcagtaaagtggcagttacgctatgataggcttcagaaagaggctgatatctctaacaccagcaataagactgccaaggaacagattgatgcacacaacgaaagccgcgaggcctacatacgaactgcagtgaaagagggaatcattatcatcaacttcaacaaagactctctggaaagcaataactaccttaagcacaagtatctgaacagaaagaacatcgcaaaaatcctgttgaacaagatgggcaaatgttttgttaccgaggaacaggttctgaatatcgtgtcccaaaagaagtacgttacagaagaacgtgccatagaactgatcagaaagtatgggggccataataagaaagagattggaaagtccaacgtcgtggagtaccctgacccaaagcagacctatcaatttcttagctttttctcccagaatgacggggggttaaaaaacctgacccacgacttcaactatgggtacatcgattatgacgtgttcattgcgcagtgcaagaaagagttcgaggaaatcaaaaaacgattccctaatgtgcaggagtctgtggtacgtcgcatcgaagaatttgcctttaaagaatccccgaattggtacatcaggcttggcaatgacaagaaatatattagatacgggtggtcagagccctcattcgtggaatggtacaggacaaacaaaatccaccccgccaaagatacacactataacgccgagatgattgtacccttcaagaattctatccaggttcgcgcagacaacaaaaaccttattggactactcagttcattagtcacaatggccttcggtcagaatccttgttgtaacgtcgaaatcacacagaatgttggggaggctcagttttataccgatgtcgaccgtctgggccaggctatttatcagatcttcagtaccatcaaggattattcagagcagaacttttgtgacaaagtgatcgtggattactacacagaaaacgattttaagatcctcaccatcacccacattgatagtaaacccaccaaaaagtctgacgacaaagattacttaggcggaaatggcactaccattaaaaaggcactcttcggactgtgcaattatgaagtccaagcggagttcccagatggtgcatatcgaaagatcatcttgtccgataattacgaagactttaagaagggccgataccttattgacaaggactcaattgacgggtacaaacacattatgaaattttactga

SEQ ID NO: 7398 - RNA, 1443 nt, synthetic construct
  source 1..1443: mol_type = other RNA
atgtcaaagaagaaagctaatagcaagagtgacctcaagaaagtgctggaccgaaaccggcataaagaggagaaagtggccgctaaggtcggtatgcagatggaggctgaggaagaagtcgcaatcatcgacttcgacgatgattcggcgagctcctccgaagacgtacagattgagactaccgggaaccccaagactgagcagaaggaggacggggtgaaacaagttactcatccactctctgaggaagagaagaaagagtgcttagaggagatccgcgaaagatggccgagaatcaaaaccaaagagagcctgctcagtattctcaatatcgctctgatactgctttatggaagggacgccaggaagttaactttgaggatgctcaattactacgcgtactcctcacacaacaaaaaacgttacatcacattccaagttcctaaaaagaagaaaggtgaatttcggacgattgatgcaccttgtgccggcctgaagatgatccaaagagccctcaacctgattttccagaccatctatacccctcacgaggccgctatgggatttgtgcctcaccgcagcgttgtgacaaacgcccgggtgcacgtaggccaaaagtacgtgtataacatagatctgaaggactttttcccatcaattacaagcggtagactttttaaaaggttgctggtcgctccattttcaatggataagaagatggcatctatcgttaccgatctctgctgctacaccaatgccgacggtaaaaatgtcctcccacagggggccccaacttctcccaccattaccaacttcatatctgagcatcttgatcgaaagctttctaaattggcaagagcctacggcatgaagtatacgagatacgcagatgacattactttctcctgtagttctaacatgtttgcagaggacggcaaattctgtaagtccctgaggaacattatagagaatgaagagcacttcaagattaacacagataagacacgcctgtgccatagcggggaacgccaggaggtgactggcctaaccgtcaatgaacagacaaacgtgacacggaaatatgtcaaacagatccgcctttttttgcatatatgggaagctaagggactgcccgaagcccagcggctcttcgaaaagcactacacacctaagactacgaggccgaatgtgggaattccccacatcgaaaacgtcatcgccggaaaactgctgtatctgaagatggtgataggcgaggaccgagatatgtataagcgtctagcttcacggctggacatcctggttggaaatacacaggagagcaatagtaccgatatctcccccaaagataagggggtgttgtccgtacctgaaaaaggcaaactgcccgcggagaaggaaattttgattgaactgaataccctaatcgagttacttgaatga

SEQ ID NO: 7399 - RNA, 1476 nt, synthetic construct
  source 1..1476: mol_type = other RNA
atggcaaagaagaagaacatcactaagaagcaaaacctgaaaaagaagttgggccaaacctctgcgtcgaagaaaacagaagtctccgaactagttagcagcgggagcgagaaagctgaggaggtactttttgccatcgagccaattgaggatgaccttgtcagagtggctgccgctgtgactgagctggaggatatagacagtgccaaagtgagcgacgaagaaactattagtacccaagcagatgcactgagcaagattgatgaattgcctaaatatggaggttcacccctgacgggagaggatctgaagcagcaactggccaagatcgtcgagggctggcactctatgaatggcatagatgacctgtgtgtggttctgaacatggccctgcaggcactgcatggcatggacgccgtgaagaccactgtgggcagactgaagctgatggtgcgcaaagggcggtacgttacattcaaaatccctaaaaagaagaagggtgagtttagaaccattgatgcaccctgcagcgagctcaaaaacatccagcaggctctcaattttgtcttacaagaggtgtactcacccaacgccgcggcgatgggttttgtgaagggaaaatctgtcgtgacaaacgcccaggtccatctggggcagaattatgtgtacaacatagacctgaaagacttctttcccagcataacctccggccgggtatttaagcgacttctggtaaagccattctgcttaaatgagaaggttgcctcactgatttctgatttatgctgttatcagaagggggaaaacaaagtcctccctcagggcgccccgacttcaccaaccatcaccaacatcatctgtgaaaaactagacttcaagctcacccggctcgctaaggcatacggattgaagtatacacgctacgctgacgatattacattctctggcatgaagaatgtgttcgctgaggatggaaaattctgcacttccctgaggaatatcattgaaaatgaggaaggcctgaagatcaatagtgacaaaacacgtctttgccatagggggatgcgacaggaagttacgggtttaactgtgaactcaaaaaccaacgtgagtcggaaatacataaaacagcttaggccactcatccacaattgggaagttaagggctatgacgaggcacaggctatcttcgccaagcactatgccgaaactaacattcgcaacctgaggtttaaaggggaacaccacgtggagaatattatctccgggaaattgatgtatttgaagatggtcaaaggagagacagactccacgtacaaaagttacgccaatagatttgaaaagctctgtaacgatacattcggggccggatcccagaaatcccagaccttgctcacccctctcatggacgacggtaacgtgctttctgtactcaatgatctagctacactgattgagacgaataccagcgagtga

SEQ ID NO: 7400 - RNA, 1311 nt, synthetic construct
  source 1..1311: mol_type = other RNA
atgaagaacagaatcaaaaacgatatggactacaataccgtcatcaatgagatttggagaaacctggaaagcaagaccgatatcgtggccctcatcaatgtgtctttgaaggatctttacggcgacaaggcctccaaaataagcttgcgtaagctcaactattacgcatatagcaaagtaaacgcaaaccgatacgtgagcttcgatattccaaagaaggacggttctatgaggcggatcgacgctccctgcagaggtctgagaactatacaacgcgcccttaatcacgtgtttcagattgtttacaccccgcacgaagccgctatgggttttgtcccagggaaatcagtggccaccaacgcaaagatgcatataggacagaggtacgtttacaatctggacttaaaggacttctttccctcaattagcagtggccgcgtgttcaagagattacaggctaaacccttcggactgaaggaagatatctccaggataatcacagatttgtgctgctacgagaatggcgaacaccggcacgttttacctcagggggcacccacttcaccaacgatcaccaacttcatttgcgagaggctggatgtgaaacttagtcgcctggcgaaagcctatggactcaactatactcgttatgcggacgatatcaccttttctggcatgaacgacctcttcgacatagacggaaaattctgtaagtccctacaccatattatcgaggacgaggaacatttcgttattaaccagaagaaaacacgccggtgtcacgctgggatgcgacaagaagtgacaggcgttaccgtaaatcagaatacatccgtcagtcgaaagtatgtcaaacaactcaggactctgattcacaactgggaggtgaaaggtcatgacgaggcccaggctatttttctgtctaactactccagtacgaagtatcataattttcggggagtgcatcacattgagaacgtcatcgaggggaagctgctgtatatgtcgatgattaacgggaatgaggatagcacctacagccagctcgtggtccggtttaagtctctgctggagacaatcgtctcaggcaaagccaatgcagaaaagggcctcggcaacgatacatcctctctagggaaggggggcaattgtatcactatatccgatatcctggatatctggggcaaaagcggaatggtagacgctttggaggtgtttaaagaaaatattgggatccttacgcagaaagacacctttcctacaggtttcaagactagtgacggagatcctttccttgactcaaatctgtga

SEQ ID NO: 7401 - RNA, 1161 nt, synthetic construct
  source 1..1161: mol_type = other RNA
atgagattgacggactgtattggcctgcaggcgcaaccccagtctgtgagtcctgcaccaaaagatgttagtgtcaggctccgggacctttggcgatgtctagagtctaagcaagatctgctgcgattaattaatatagccctggaaggactgtacggagacatggcccagatgatcaccatgaagcagttgatcaacatggtgtacactgccaatggggagcaccgctatacttcattccagattccaaagaaaaagaaaggggagttccggacaattgacgctccaattccaacccttaagaatatccagcggggcctgaattccgtacttcaagctgtatataagccccaccaagctgccaaagggtttgttaagggcttttcagtggtggacaacgcccgagcccatattagccagagatacatctttaacatcgaccttaaggatttctttccttctattcattccggtcgtgtctacgctagactcctggcaaagcctttcagcttgcccccggagatcgcctccattatctgtgacctctgctgctttaccaactcagagggccacaaggcgctgcctcaaggtgcacccaccagtcccactttaacaaatataatctgcgaacggatggatcgcaagctcctgaaactggctaaagcctataatctgcagtacaccagatacgccgacgatattacctttagcggttccacgttcatgttcgctccggagggcaggttttgcactctcttgcagcacatcatagaggaggaagaacacttcacaatcaacaggaataaaacaaggatgggccatcgtggaacacggcaggaagtgacagggttgactgtgaataacaaaccaaacgtttctaggaactatgtgcgccagctaaggactctgctgcataattgggagatgaaaggatatcagaaggcacagacggagttcctcgcgcattatgccgaaattaacaccaagaacttacaatgggatgggacacacaagatcgaaaatatcatcgcaggtaagcttctgtacatgaaaatggtcaaaggagaaactgatagcacctacaaaggcctgaaaatacgcttcgaccagctaatgcagaacagacgcaagtatatcaagtcgctcaccaaccctatatga

SEQ ID NO: 7402 - RNA, 1194 nt, synthetic construct
  source 1..1194: mol_type = other RNA
atgaccaagcaagagatcgatgaaaaaattaaggcccagtggtcagccatggaaaccaagcaggacttccttagacttttgaacttgagtaactgtgccctctacgctgagaaggcacagccgttcactttccgacagttgctctttcacgcccacacaacccggaataagaaacgttatgtctccttcaagattcccaagaagaaaaaaggggagtttcgcgttattgatgcacctaatcccacgctgaagagcatgcagcgcgccttaaactacgcactccaggtgatttatgaaccacacgcagccgctatgggattcgtaccaggacgctctatcgtgagtaatgcacagagccatactaacaagagatttgtgtacaatatcgacctgaaaaacttttttcccagcatcagtagcggcagagtgttcgcccgatttcaggctaagcccttttcctgtaataaagaggtggcttccctcatagctgacttatgttgctatcggaacgatttcggtactgttctgcctcaaggtgccccaacgtcgccgactatcaccaacattatttgcgaccggctggatgtgaaactgactagactggcgacggcgtacgggctacattataccaggtacgctgacgacattaccttttccgggatgtcaaatatgtttgcggaagacggccgattctgccagtctgtgaaacatatagttgaggacgaggaacacttcactatcaataaggataaaacacgcttgtgccatcggggcatcagacaagaggtcacaggtatcactgtcaacgagaaacctaacgtcacccgcgaatacgtaaagcaactgcggacaatgatacacaactgggaatctcaagggtatgagagggctcaggcaaggttcctggagatctacaataaaaccaatacaaggtatcacaaggccaagggcaatcatcacatcgaaaacatcatttccggcaagctactgtttcttaagatggtcaaaggagaaaacaatgcacagtacaaaaagctcgatgaaaggcttgtggccttagagtcaacccacacagatccaattccccagaatcgtagcaatgccgtgatacctcctgctatgggagacaacatcatttctaacgagaaggaaatcctcgaggagttcatgacactgaacaaactgctggagtga

SEQ ID NO: 7403 - RNA, 1014 nt, synthetic construct
  source 1..1014: mol_type = other RNA
atggacaaagacaagctgtctctgctttcctccttgtcaaaggaggaactcttcaatctattcagcacctttgtcgagtcccaaaatgcagtgcaaaacactgattctgaaacagttgactttgccaatcaggctaaggaaatgtggcataagctcagtaatgaagccgatttgagagcactgattaacaccgtaagtgttaaggtgtttggtaagttccagtacaccgaagcacagttcggccactgtttcaacatcaaccacagtcggtatactactttcgagatcccaaagaaaaaacctggcgagtatcgaacaataaaagcgcctaatccgacccttatggggatgcagcagtgtctgaactatgtcttccagcagctttatcaaccaattgagtgcgcgacaggatttgtacccggacgcagcatagtggatggagcacgcgtccatttgtctcagaagtacgtgtacaacattgacctgaaggatttttttacgagcgttactgcacagaggctggtcaacaggctccagatcgagccctttggtctgagcgaagacatggcccagctggtggctaatctgtgctgtgacaagactaagtatgacaagtttgtactgccacaaggggcccctacctcacccacaattacgaatttcatatgtgactccctcgatcggaaattaattaaactcgccgctgcccacaatctgcgttactcacggtacgccgatgatatcaccttcagcggcatgcagaacgtgtttgcggccaacgggcgtttctgtaaatctttgaggcatatcattgaacgcgaagagagattcactatcaaccctgccaaaaatgcttcactaagttcccggaatgctgcacgctccaacagacacaactgcaaacccaaaaccgagtgctttgcctctctctaccaaacagtgacctgcgctgtgaagcagctgggcgagaagcgaatcagacacagcgcttcgaggatccttgagacattatga

SEQ ID NO: 7404 - RNA, 1218 nt, synthetic construct
  source 1..1218: mol_type = other RNA
atgcccgaatcggagcagaagaccgaagagaaagaggccaaggtggaactgctgaggatactcaatgtgatgaagaagaaactttacggggacaactcctatccgataacaatgaaacaactcaactaccatgcctattcaaaaaacaacccaaaacgatatgtgcaattccagattcccaaaaagaaagcaggagaattccgcactattacggctccaaatgcagggctgaaggccatacagcggtgcattaacgccctgctgcttgaacagtttgaagcgcatcctgcagctaatggctttgtgcccgggaagagtattgtggacaatgctagagtccacctgggacagaagtacgtctacaacatcgatctcaaagacttctttcctagcgtgaccatcggcagggtatttgcgtgtctgcaacttccacccttctcatttgacaaacacacagcttccttgatcgctgatctgtgttgccacgagggagttctcccccagggagcacctaccagtcctacactaacaaatatcgtctgctctcgcctggattggcgtctctcaaagctggcaaggaggttcgatctgcgatacagtcgttacgccgatgatataactttctccgggatgtccaacatttttcacgaggacggtgccttcgttaaggatttacgccacttcgttgagaaggagggttttttgatcaacgaaactaaaactcggaccaattcctactatcagagacaggaggtcactggcttaacaatcaacgaaaagcctaacgtgactcagcgctatgttaagcagattcggaccatgttacataattgggaggcttctggatatgaggcggcccaatcagtgtttttcaagcattatcacccgacaaaaaatgtaaatgccgagcaccatatcgaaaacatcattggtgggaaactagactacttgaagatggtgaaaggagtcgacgacgccacgtacatcaagctgagagatcggtttggcgaccttctgagcggcagagagaagaccaacagcaccgccaggccaggcaatgttatcccagtggtggatattagcgtacttaacgagggcaatattatcgacatcgagctggtcaatgaggaagagcaaaagagcaaagatacccacggcctcttggacgaaaagctccagcagttgtgtgaatctgggttcgacctatctatactgtga

SEQ ID NO: 7405 - RNA, 1074 nt, synthetic construct
  source 1..1074: mol_type = other RNA
atggagcaactaaataagttcaaaaaggagttgtacggggagaattgtcacgccataaccatgcagcagttgaatttccacgcctatagtgaacacaattcaaagcgttacatacagtttcagattccgaagaagaagaaaggcgagtttaggactattactgctcccaacaaaggcctgaagtgcatccagcgctgccttaacgccatgctcctgcggcagtttgcccctcatcctgctgccaacgggttcgttcccggcaaaagcatcgtcgacaacgcaagagtccacgtggggcagaaatacatttataacatcgacctcaaggactttttccctagtgtgactatcgggcgggttttcgcatgtctgcagcttcctccattcaaatatgatagagagacagcaagcctgattgcggacctgtgttgccatgagggggtgctgccacagggagctcccacttctcccactatcacaaatatcgtgtgccagaggcttgattggagattgtccagactcgcactgcggtacaatttgcattactccaggtacgcggacgatatcacattttcaggtatgaccaacctatttcacgaggatggagacttcgtgaaggctctccaccatttcgtggaaaaagagggtttcaccatcaacgaagccaaaacacgagtgaactcctattaccaacgacaagaagtaaccggactgaccatcaatgagaaaccaaatgtgacacagcggtacgtcaaacaaatcaggacaatgctgcataactgggaagttaatggctacaagtatgcccagtcggaattcttaaagcactatcataccacgaagtacatcaactttaagggagaacaccacattgagaacgttataagcggcaaactggacttcatgaaaatggtaaagggcgagaaggatcatacgtatctgaagttaaaggaacgctttgatcgccttaccattatagatgtctctggtattctcgacgtctgggaaaaggagggaattgacgctgccatggatctctttatgaatgtgaaaaaacacaacggcgacgagtga

SEQ ID NO: 7406 - RNA, 1299 nt, synthetic construct
  source 1..1299: mol_type = other RNA
atggagaagtccttaaaagacgaaatcaatgccatcattgacgactgctgtgctaaatatagctctttcagtatcgaaacctttatagacatcgtaaatgagattcacagtaaggtcttccaggagagctatctgatcgagatcgaaacactaaaaaagatcgcgaattccgtcgataagtatgacaagttcgagattcccaagagaagcggaggtgtccgagaaatctacgctcctaaaaagaacctgaagaagatcctctattaccttaactttatcttccagaacatctacgtgcgcaatttcagcttgtacatttcaccgaatggttttataccaaatcgttccgtggttaccaatgccaaacgccacctctgcaagaactacgtctttaatattgatctggaagactttttcccatctatcaaacagtacaaagtaagcttcatgctgcagattgctccctttaatatgagcaagaatgatgccaacctcatggccaagcttatttgctatcaggatcagaacggcgagtcctttttaccccaaggagcccctactagccccattatctccaactttgcctgtcgatttctggatataaaactcgtgaacttggctaagcaattccgcctgacatacagtcggtatgcagatgatatcacattttcgtcaaactacaatgtgtacgacgataaattcatggacgccctgaccttggtgatagaggaggaggggttcaagataaataaaaataagacgcggctgcagaagcggaatatgaggcaggaagttacaggagttattgtgaactacaaactcaacgtgtatagaacctacatcaagaagctgagggtactgttacatatggtgaagaaatatggctacgagaaggcaaacgagatttacaatcaaaaggagcagagtgataaacaaaaagacctgaaatcaaccattgcggggaagctcaattatctgaagatgattaagggctctaacgatactacttatatgggcctcatgaattcttacgtcgaactattcgacataaaacagaagaacaagcctccaataccagatgacgaatctttgatcgtgtgtgaaactgcagagaagttgcttaaagaactgaccgcttctaacaacctgattctcaccaatatcaaaaacgagtcaaactatctgaaccttcctaagactcagaacgtttccaactccaaagtggccaatagcgaaaaagcaattacaacggagtcactagtggacagaatccttagtaaactgagggagatcctgtga

SEQ ID NO: 7407 - RNA, 1992 nt, synthetic construct
  source 1..1992: mol_type = other RNA
atgaacatcaagtcgatcaacggaatcaagaacatcaatgacctcattgatattatctactactacaacgacgagcataacatcgaaaacaacctgcacatagaaaccagcactatcaatttcctcgcattctatgcgaagaagaaatacaagaagttcgaaatcccaaaaaacaatggggaattccgaacaatatatgcaccaactaaatacctcaagacgattctgaaatcactgaattacgcctttcaggccatctataagaataatcaagtggctcatggctttctgcctaataaaagtgtggccactaacgccaagaagcacatatctaagaactacgtctttaacatggacctaaaagactttttccagtctattcaccaggcacggatttggaagatgctccagattagcccctttaatctcccgaaagatatggctaatcttctagctggcctgctgtgttaccaatatccccgggaaagcaaggagaaatcctttctcccacaaggtgcccccactagtccaatcattagcaacttcatttgctacagactggataaatccctcctcgaacttgctaaaaaacacaacgctatctacacccgctatgccgacgacattacgttcagttcaaatatcaatctgtacaagaaggattctgagtttcttcagaagatttaccgtatcatcaataacgaagggttcagtattaatgagaacaagattagactgcaggggaaaggctatcgtcaggaggtgacagggattatcgtgaatgagaaaatcaatgtgtccaaaaagtacatcaagaacctgagagccttaatttacatgttagaaaagtacggcgaaaaagaagccaatgagttttactataccaaccatgcaaaatcgctaaatatggttatttccggcaagctgaactatttgaaaatgatcaaaggcgagagcgactccacctatctgaagttgaaagagaagttcgagaaacttgcgaagaacgacgttttaatcaaggaacctaacaaagaaagtgcccaaaagaccaaacgaaatcccaagcagaaccctaacgcaaaacacaatccaaaggcgttagtagacatccttcggaaattctcccagtcagactcccccttcaaggctactgttcataatgagagcaattacccctcctacaacggctatgacaacttcatgacatcacttaataaggagtggaatgagatacaaaaagatctgaacgcatatagctacaggctctataacaaattgttgggtttcctgtttaagtctaccgaggagctgaccaatgcagataattataaggggtggggagaatcaaacgtgaaaatagggtggtcaagtagcgagatctctgagtactgcaaggctaacgacaagaataatccgtttgagtataaactgcctgatcgctatattatagagcacaaaaacggatccattacaacattcggggatatttgcatgaagatctttaagtacgagattgagttccgcgatgagaaccagcagttttttaagctgattcaggacaatagaaagaagttgggatctggttttaatgtcaaaatcgatgagaagatccagggagtctctttttacagcgacacacacctggtatcagaagccataaacaagatctttaaccagttcatcgaacggaaaaagtatatcaatatcagggtgagtatggaaacgactgatgagtaccataaattcatcttcagccagctcgaaagcaaatgcaacaagggctctaaggaaatgctgaaggagattaaggacggcgatttcgaagatataaaaaaacgcctgttctccctgtgtgattggtctatagaagctaaatgttccgacggaaacttcaggataaactatcttaaaagcgacaatgagaaggacattgataagttgcctgatgcccctgagggttttacccacatattgaggttttataagtga

SEQ ID NO: 7408 - RNA, 1638 nt, synthetic construct
  source 1..1638: mol_type = other RNA
atgtcaaaaactagagtatatgagcttgccaaaatcctgaaagtgacatccaaagagataatttccaaggcgaacgagctcaatatcgccgtgaagagccatagttccagcctggacgaagatgccttaaaactgattacagacgcattcgctaccaagccccaaatcaaaaacaatacatcagcaacgatcaagattaccctcaaagacaaagagcaaacctctctaaacgaacatatccagaaagccttcaatgagctgcggaacattgaggatctcgcaagcctgataaacaaggtgaataagactatctatgagcacacccataagatcaaggtgaaacacctcacttatcacgcctaccattccaaagataagtatcaggtctttaagattccgaagaagagcggtggcgagcgtgaaatttattctcccagcaagggcctcaaatacatcttaaagacactgaacatcatctttcaggcactatacaaaccccagagcgttgcacacggcttccttcctaatcgctcagtcgttactaatgccaaattgcacgtcaataagaattatgtgtacaatatcgacctcgagaacttcttcccaaatattcatcaggcgcggatttggaagcgcctgcagcaccctccctttaatctgaatggaaagcgtatcgaaatcgccaacttgctggctaaccttgtttgttttcagtacgagaaaagcagtaatgagaagaactttctccctcagggtgccccgacctctcctatgctcagtaatataatttgccacagactggacaagaagctgctcgaattggctaaggcctacaacgtgaaatacactagatacgctgatgacatgacgttcagttctgatcacaatgtgtaccaaaaaaacagcgagttccttcagaaactgttttctattatccaatcggagaacttcaagataaatccaaagaagatcagactgcagaagagggggtacaagcaggaggtgacgggcctgatcgtcaatgaaaaaattaacgtgagccggtcttatattaaaaatactagggcactgatccacctggtcgagaagtatggtgatgagaaagcccaaaagatctttgtggaaaaaaacggatccaagaacttggatctagtgatattcgggaaactgcagtatttaaagatggtaaaaggctctgaagactcaacctacaccactttgtatcagaaggccatgaacgcatacaaaatgatcgaagttgaggtgaccaaatcaaataacgatgaaaagaaacagaccgagattatcaaaaagaacaccattaacgagcaacacaacccaaaggagctggtaaagatattgcggaactttacaacatgtgaaaaacccccttgcgctcttaaggctgccgttcattccgaagaagaatattaccagtttaacgggtacgaagactatatacgaaatctgaagtccgcgtggaggaagattgataatccacttaggaatctctccaaacgattacatggcaagatttacgcttttctgttcgcttcggacctagggacccaggagcgcgtcgacaagagtaagagtaaaaactccggatggggagactcaggaatgacattcgggtga

SEQ ID NO: 7409 - RNA, 2007 nt, synthetic construct
  source 1..2007: mol_type = other RNA
atgccgattaataaggtgacaccagatcagaagaataagatagagatcctgttcaacaagatttccaatattgacgactttctgtccttgatcaataaggtcaataagatccagtatcaggagtataagaaactcgagctgaaacagctgacctattatgcctttatcaacaagtcaaagtacactacctttgaaatcaagaagaaaagcggtggaaatagggaaatatactccccaaaaaccgggctgaaatatatcctctccgctatcaacatcattttacagtccgtctataagcccactatagcgacacatggctttatcaatcaccggtcaattgtgacaaacgccaaaaaccatacggataaaatttacgtctacaacattgacctggagaatttttttcccagtatccaccaggctcgcgtctggaagaaactgcagttacctcctttcaacctctgcgaaaataagatccaaatttctgagctgattgccaacctggtctgttatcaacatatagagaagacaacagagaagaatttcctgccccaaggggcaccaacttctccgataatatctaacatcatttgcgagcggctggatagacgcttattaggcctggccaagcgtttcaatctaaagtatacaaggtatgcagacgatatcaccttctcttctaatcacaatgtttaccagaagaacagtgattttatcaaggaactgaattccatcatcagtaaggagaacttcaagatcaactctaaaaaaacccggcttcagaagaaagagtacaaacaagaagtgacaggaattattgtgaataagaagactaacgtgtccaaaaagttcattaaggaactgcgcactcagatctatctactagagaaatacggcgttaagaaatcgaagagcatttacaaggagtactacaagaagatcaatggggatatagagctgatacctaatatgatgaatgtgatttacggtaagctcaaatatttgaagatggtaaaagggcaaaacgacagcacttatctgaaacttaataaccgattcgagaactgctttaagaataagaagcattttgcttcacagaactttaccagctacgagctcaaagaattttcgaaccaccagccgcaaaaaatggtggaactgttgaaaaagttcacatcagaagaacccttgaaaagctctacccatccaacgaaaaacaacgagtgttacctagattttatcaaagagttacgggtgacatggaaaatttacgaggaagagtataaagacttcatcaacgaaaagctcattagcaaaatctacaccttcctctgtaacccaaaccccaaaaatggttggggaatagataacatcaaacttggctggacaagctccaaacttaaaaagtggtgtgagaagaatcctaatttgatgcctaacaagtttcccattgagaatactatctacaccttccaagatatcatcaattacttcaagatggagattgagattacccctaacagaaataacctgtatagcttcctgtttgacatcatggacaatgaactgtgccagttcgagaagctcactgatgaagaaactgaggagatactggacgaagcaaaattcttcatcgacacccagtggattaaggaaggcctcgagcttatttttaacgagattaaccagagatccagtgtttcaaaacgaatcagaattcaggccaagaaaaataaggagttcattgagttgaagatcacccacatcaacagctttagtaaattctccccagaaaaactccttgagaggcttgaaaacggagtagggagttttccctacatccagcagaaatttacctctctctgcgacatcgccttgcagtcaaagtaccactcaagcatattcaagatcaacatactgaacaactacaatgatgaggaaaagctgattaaagacatcaatacggaagaagaaggctttacctatattttcaggttctatcgttga

SEQ ID NO: 7410 - RNA, 1710 nt, synthetic construct
  source 1..1710: mol_type = other RNA
ttcgtattgaataagtccaatgtgaccaatgccaaagtgcatatcgacaagaactacatatacaccatcgacctaaaggatttcttttctagtattcaccaggcacggttctggaaacgcctgcaattccccccctataatctggatggaaccaaaatcgaactggcaaacctgattgccaacttggtcttcctccaaacagagaagcaagaggagaaaaactttctgccacagggtgcccctacgtcacctattgtcagcaatattatttgtgaacgtcttgatcggcgtctgctggggttagcgaagaggtttaatgtgaaatacactcgatatgctgatgacatcacattctctagcaaccataatgtttaccagaaagactcagagttgatcatcgaactcaacaggatcattgccaacgaaaactttgagataaacccaaagaaaactcggttgcagaaaaaaggatataggcaggaagtcaccggtatagttgtgaactccaaagctaatgtgaggcgcaagtacataaaggaggtccggacatacttctatcttattgaaaagtatggcctggaaaaagctgagcgcgtctttgtgcaacatcagtacaaaaataacccgaaccttaagaattacaagtacctgtccagcgtgttgttgggaaagttagagtatctcaagagcgtgaaggggaaagaagactctacgtatctgaagctcaagaacagatacgatatttgcttccccaaggaggaaactagtaaggagaagaaccttaaactgaaaaaggaaccaatccacaatcccaaagaggtggtcgccattctgaacctttttacccagaacaataacatcctgaaatacactacacacaattgggataaagaggagctggacagtctggacaactttttgaaggagatcaagatcgaatggaataaggttaacaatagactcaaagagctgactcctagattacacgccaagatcatttctttcctgttctctaaaaagctgggcaccctcaatctaactgataatcgaaataaggtgtggagatgggggatgagccagatccagttcggttggtcatccccgaaacttagagagtggacaaaagaaggcaatagtcctttctcgtacgtactcgatgaaaagtatcggaagaaaattgatggcaagtcgattgacaggttttccgacatcgtcgaagtatttaagaacgaaatcgagattcgctccgataataaccaactcaagaagctgttcattagcaagcagaagaaatacctagggtttgactttaacgtggagtttgttaatctggaaggggtggacttttacaccgatgttcagcatttagatttcggactgaatgagatcttcaaggaaataaaacagcgaaagctgtttccaaaaataaagatcgaagcgatcaagaacatcgaggcaggttttattgagctatgtatcacccacattgattcattccccaacaaaacaaaggaggagatgataaaagaagtggaggacggcgacttcagcaaaatcaaagagaagttcacaagtatttgcgactggtctatagctagcaaactttccgacggaaactataagattaattatctcggaggcgaagaatcattcgagaagctcaacgaggagcctatcggctttacgcacatcctcaaattttataagtga

SEQ ID NO: 7411 - RNA, 2073 nt, synthetic construct
  source 1..2073: mol_type = other RNA
atggagctcgattccaaagacaaaatctacatctacaactctttctacaagatgaacaataagctcgatctgcttcagttgatcaacttctgcaagaaaaagatctatggtgaagaagctcaccccatttccctcaaacaattcaattaccatatcaatcccttgtacaataacttcagatacaacagctttatcgtgaagaaaaagtcagggggcgataggattattttttcccccaacaatgggctgaaagtcatacagaaatgcttaaacctcatactccaggtcgtgtataaaaacccatctaaatatgccacaggatttattagtggacgctccattgtggacaatgccaagatacatgtgaacaggaattacgttttcaacattgaccttaaggacttcttctattctatagatcaggctcgggtctggggtcgcctacaagtccaaccattcaatttttccaagaaggagaacaagctggaattagccaacatagtagcctccctgtgttgtcacagtatcgaggtggaacgttttgtggaggggacctggatcaaaaatcagaagaacgtgctgccacaaggcgcgcctacatctcctgtgatcagtaatatcatttgtgagcgacttgactattacctatccgcagttgcaaaacggttcgggctgaagtatactaggtatgtcgacgacatcacctttagttccgaccagaatgtgtatcaggttgacggggatttccggaaggaacttgaaaaaatcgtgcaacaggagggtttctatttcaatgttaacaagacgagactacagaaacgcggatttcggcaggaagtcactggggtaatcgtgaacgagaaggtcaatacaaacaaacattttgtcaagaggctgaaaaagtggatctacctgtgggagaactatggctatgaaagggcatcaatattctttaaaagcgagtatgaagcagataaactgaactttaagactacccctagcctggtttccgttttacgaggaaagctgaattacctgaagatgctcaaaggagacaaagattctctgtatctcaacctgaatagcaaatttgacaagctgctgaatggaagcattgatcagaagtccagcctgatcaagattaccaaaccagctatccctgtgatccaccaacctcagaagcttgtagcaattttgaagaaattcaccacgaacaatacagccttaaagtactcaacgcacacttgggacggcggtaaggacactgagatcttcgctaacatagaggatttccttattatggctgagagagaatacaagactatcagctatgatttgagcattctgtcgaagccgctgaacgccaaaatttggacctttctgttctctgacaacttttcaaagaatggctggggcatgtttaatgtgagattcgggtggaattcaatggagctgcataagtacctcaatggtaaccccaacaataaacctgaatcttatatcctgccagaggagttccagcagaacattaaaaagtatgggaaaagctttctgatccagagcttcaaaaatgtgatagacttgttcaagaacgagattgaaatccgtgatgagaattcaaccctcgaggacatagtaattagtttgcacaagacctaccttaatggctttaacatcctgaagattgaaaacctcgcgaataaaaacttttacacagacgtggattacttatacaaggccctcgagctcgtgtttcataatatccagaaacgcccccagtatcccaatgtgggatacattgggtacgattttgaggattatttctgcctcgaaatcatgcactttgagtctaacgccaaaggaaagagtttcaaggactcaaaatttacccttaaggaaggcgatttcggcacaataagcaactacctaaaaaatttgtgcgattggagcatcgagtcttcttttagcgagggcacataccaggtcaactttctgagttccaagaatatttcgccgtacaaattgaaatcatccagtgaaggcttcaagtacattttcaagttctacaagtga

SEQ ID NO: 7412 - RNA, 2073 nt, synthetic construct
  source 1..2073: mol_type = other RNA
atggagctgaactcaaatgataaaaggtatattcaggcaaccttctttaagatgaaaaataaggcagacctgctctacctcatcaacttctgcaaaaagaagatatatggcgaggatgcctacgacatcagcatggttcagttcaactatcatattgtgcctagctacaacaattatcgatacataaccttcaaggtaaagaagaaatctggtggcgaccgcaccatattcagtccaaacaatggactgaaagtgattcagaagtgcctcaatctgatcttccagatcatttataacctgcctagcaaatcaacaactggttttgtgccgggcaggtctatcgtggacaacgcgaaggtgcatatcaacagaaattacgtattcaacgtggacctcaaagacttctttaatagtatcgatcaagcccgtatttggggccgacttcagattcagcccttctactttagtaaaaaggagaagagattggaacttgccaacattattgcttcactgtgttgccacccaatagaagtggagcggttcgtggacggttgttggattaagcaaataaagaatgtcctcccccaaggagcacccacaagtcccattatctcaaatattgtgtgtgagcgcctggatttctatctgaacgccgtagctcgtcgctttaacttaaagtatacccgctatgtcgacgatataacgttctccagcgatcataatgtgtaccagtctgacggcgaatttcggaaagaattagtacggatcataacgaaagaaggattctacttcaataccaataagaccagactgcagaaacgctactttagacaggaggttacgggcgtgatcgttaacgagaaggtgaacgcaaacaagagatttaccaaaaggctgaaaaagtggatctatctgtgggagaattacgggtacagaaaagctagcctattcttcatctccgagtacaaggacgataaaattaacctgactagcatcccagcacttgaggatgtgatcagagggaagattaattacctgaagatgctgaaaggagataaggattctctctatttgacccttaagtcccggttcgacaaactgctgaatggccctatcaaccacgagtctcaaatcatcaagataattaaaccccccattcctattatccatacaccgaaagaactcgttagtatcctaaagaagttcagttccaataacactgccctcaagtactccacacatacatgggacggcggtaaagacaatgaagtcttcgattcaatcgacgattttttaatcaaggctgagatggagtataaactgatatcctacgagctcagcatcctttcaaagtggttgcacgccaaaatttggactttcctctttagcactgacttctctaaaaagggttgggggatgtttaatgtccgttttggctggtctagcatagagctgagggattttttgaacgccaacccatataataggcccgaaaactacattttaccagaaaagtatcagcaaggaatcaagaggtacgggcggaatttcatcatcaacaacttcaagaacgtcatcgacctatttaagaacgaaatagagattcgggatgagaattcaatcctagaggatatcattatctcgctgcacaaaacacacttgaatgggtttaacatcgataagctggagaacctgtccaataagaacttttacacagatgtggactacctttataaggccctcgaattggtctttcacaatattcagaaaaggccacagtatcctaaagtcggatattatggatacgactttgaagactacttttgcctggagatcatccactacgaaagcaatgctaaagggaaatccttcaaggattccaaatttaagttgaaagagggggattttggcactatttccgtttacctccgaaacttatgtgactggagtatcgaaagcggatttcttgagggggactatcgcataaatttcctggcgtctgaatccattatgccttatgagaaaattgacttttcggaaggcttcaagtacattttcaagttctacaagtga

SEQ ID NO: 7413 - RNA, 1203 nt, synthetic construct
  source 1..1203: mol_type = other RNA
atgacgatactacccgaccagaaagattacattcagaagcatttcgaggcaatgcagaataagatcgaattcctcagcctcctaaattatgccaaatcaatcctattcggggagaagggcgagccttttgttatccgacagctcaactactacattaacaccgcttcaaaagctgcgtcctaccaagcgttcgaaatcaagaagaaaaatggaggaacaagaaatatcctggccccaaaccaaggcttgaaggcaattcaatcctgtctgtctctcatcttgcaagagatctacatagtgaatgccgcggcaaaggggtttgtgaaagggcgatccattgtagacaatgccagcatccacattcagcaatactacgtctttaacatcgacttgaaggattttttctctagtattgatcaggccagagtgtgggctcggctcaagatggctcctataaacctgaattcctcaactaacaggcaggagctgtccaacattatcgctaagctgtgctgtcatgaactggaggtggaacgcctgaatatggagggtgaatgggagaagcagaaaaaaaatgtcttaccccagggagcacctacgtcacccgtactctctaacctgatttgcgagaagttagacaagagactgaccggtgtggcaaggcgcttcggactgcggtattcgcggtacgccgacgatattaccttcagcagtctgcaccacgtgtataacaatgaaggcgattttgtgcgcgaaatcactcgcataatcaacgaacagaactttcacataaaggaaacaaagactcgcatgcaggggcagggctacagacaggaagtcacaggacttatagttaacgagcgtgttaatgtgccaaagagatatacaaaggagttaaggaaatggctgtatttgtgggagaattatgggcacgatagggcttatctgttcttcaaacagagctacctgaacgacaagatccgggataaccgtttcaaaccggacatgattaagattctggccggcaaactcgactttcttaagatgatccggggtgcagaggatcatatgtacaaaaaactccagcaacgatttctggccttgatcccaaaaactagctctcttagtaaagtccttgacacctgggaggagcttggcattgaaaaggccatggaagagtattatgctcataggaccgcctga

SEQ ID NO: 7414 - RNA, 2106 nt, synthetic construct
  source 1..2106: mol_type = other RNA
atggagctccaaaaaccacaagttgagtatattcgcaagtcattccgtaagatgcagagcaaaaaagacttcctgacgctgttaaactacgtgaagaacatcttgtacggggaaaagtttcaccccatagtgctaaaatctctgaactatcatagtaaccctgccaacaataacagacgctatatcaagttctctatcaaaaagaagagcggcgggagccgaataattcacgcgcctaataagggcctcaaagtcattcagcggtgcctaaatattattctccaagcactgtacgacgtagatgaacacgcctttgggttcgttcccgggagaagtatagccgataacgcacatctgcatatcggtaaggcatatgtctacaacatcgatcttaaagacttctttacgggtgtggatcaggctcgcatctgggcccggttgaaggtgaaaccatttcagctgaatggaagcgtggggcgtcacgaacttgcgaatctcatcgccggactgtgctgtcagtccatgattgtcgaaagaaaaggcgaagacggggcatggctgaaagaggtccggaatgtgttgccgcagggtgctccaacatctcccgtgctcaccaacattatctgtcagcaacttgattactatctgggaagggtagccctgcggttcggacttacatacagtcgatacgctgacgatataactttttcctcaagccactttgtttaccagaaagaaggcgagtttatcaatgagctggagcgccaaataactgaccacgggttttacatcaaatattcaaaaacccggctgcagaaaaggggctatagacaagaagtgacaggcctggtagtgaatagcaaattgaacgtccagaggaggtatatcaaggacctgcgcaaatggctatactattgggagaactacggatataaaaaggcatccgtgttttttgaatccgcctattccgccgacaaggggtatctaggagccaccaacccagtgatggcgaaggtcattcgcggcaagctcgattttttaaaaatggtcaaggggaaggacgacccgactttctttaagctcaatcagcggttcgagatcttgactgatattgtgaaggaagagctgcaaaatcaaaatacagcagagccgaattgcgtggccgttcctgtcatcgacggacttcctgtgttacacacccccctggaagtggtaaagatcctcaaaatgttctccatcaatgagtcagctctgaagtttgctacacacagttgggaggctggactggacgacaaaatattcaagaactacccagatttcatccgaaaggctaaaaaggagtttaacgtggtgtccagttctctcaacgaactgaatccccagttgagagcgaagatcctctctttcttgttcaacaaaagagttggcataaagtggggaatgcggagagtccgctttggctggagctcacccgagctgaaggaagccatggagaggacccccgagatgatgccagagaacatggtgctgcctgaacatgctcagtttcgggtaacttctcagaggggcggtacacagaccatccagaaattcaaacaggtgattgacatattcaagaacgagattgaaatccgaaatgacggtcccgtgctggaagaactcatctatgactaccattttaagcacctgcagagcttcgagatcatggagttcaccaatctcaacgacaaaaatttctacaccgatgtggattatcttcataaagcactggatttggttttcgggaatattgccaagtacccaggtaatgaaaagctagttggctacagattaattgatgacccttcgtactaccagctggctatcattaattacggttcccgacttaggggcgtttcaattgccagtgaaaagttcttgctgaccaagggcgattttggaacgattaagaaaaggctgaacaacctttgtgattggtcgatcgagacagagtttgccgaggggtcctatcgtttaaactttctcgcttctgatcctaacactgcaagcgtcgagcctattcagtacgccgtcggcttcacctaccttttcactttctataagtga

SEQ ID NO: 7415 - RNA, 1218 nt, synthetic construct
  source 1..1218: mol_type = other RNA
atgaagctggccgaggaaaagtctcagcacattctcaccgccttttctaacttgaaaagtaaggaggatttcctggaactgctaaactacaccaagatcattatatatggagacaaggcgattccttttacgctcaaacaggttaactactactctaatccgagaatcaatatcgagaggtacgccgcatttaccatcaagaaaaaatcaggtgccacacgcgttatccacgcacctactaaaggcctgaaggctattcagaagtgcctcaatctgatcctccagattgtctatgaacaacatcagcataaagccgcaactgggttcattcccagtaagtcaatagtagacaatgcactcttacacgtcagatccatatatgtgtacaacattgatctgaaggactttttcccctccatcgaccaggccagaatttggggccggttgaaatttcctcccttcaaccttaatgataaaacaggccgcttggaaatagctaacataatagcttccctctgttgtcacgagatggaggttgagcgcatcaagccagatgggagctggcagaaagaaaagcgaaatgtgctcccacagggtgcgccaactagccctacactaacaaatatcatctgccaacagcttgatttctacttgacggcggtggccaaacgattcaacttaaaatacagtcgttacgccgacgacatcacctttagctctcaccataatgtgtatcaagagggcagcatcttccttcatgagcttcaccggattatcgctgcccagaacttccatatcaagccatcgaaaacacgtctgcaaaagcaggggtacaggcaggaggtgactggaattgtagtcaatgaggacgtcaatgtccccaaaaggttcgtgaaacaactgcgcatgtggctgtattactgggaacagtatggctatgagagagcctatacctactttctgcagcagtactccgctgacaaaggtcacaccaagaagggacggcccgatatggctaacgtgattctcgggaagctgaagtatctgaagatggtgagaggcgctgataaccacatgtaccagaagctggcatataggttcgaacagctgagcaaagaaaacttaaatcaagaagatcggccggcccatttgaacaaagtgctgtcaattctaatccacaagggacttgacgaggcaatggacttttataagaggtga

SEQ ID NO: 7416 - RNA, 2229 nt, synthetic construct
  source 1..2229: mol_type = other RNA
atgagtattaaggaggaacagtcacagtacatactgtcttccttcagtagcatgaaatccaaagaggatttcgtgggacttttgaactatgcgaaggtcattatctatggggacaaagccgtgcccttcactcttaaacacctgaactaccactcaaacccgcaagtgtcaaaaaaccgctacacggcatttactatcaagaaaaagtctggagctaaccggacaattcacgctccttccaaggggctcaaggctatccagaaatgcctgaatctactgctgcagatcgtctacgcccagcaccagcataaggccgctacagggtttgtccccgggaaaagcatagtagataatgctaaactgcacactaacagcatctacgtgtacaatctggatctgaaggacttctttccctccatagaccaggcacgagtctgggggagactcaagttcccaccattcaatctgaatgagaaaagcggcaggcttgagttggccaatatgatcgctagcttgtgctgccaccagctagaggtagagcggctccaaccggatgggtcttggcaaaaagacgtgcgcaatgtgttgccgcagggcgcacccacctcaccaacactcacaaatatcatctgtcagcagttagacttctacctgagcgctgtggccaagcgtttcaacctgaaatacagtcgttacgccgacgacataacattctcatcacagcacaatgtctatcacgagggtggcgaatttcttaatgagctccaccgcatcattgccgcccaaaatttccatgtgaaaccatctaaaaccagattacagaagagaggctataggcaagaagtgaccggcatagtggtgaatgaacatgccagcgttccaaaaaggtatatcaagcagctgcggatgtggctatattattgggaacagtacggctatgacagggcgtactcttattttgtgcagcagtacaaggtagacaagggatacaccaaaaaaggaaaacctaatatggcaaatgtcatcaagggcaaactcgactatctgaaaatggttaagggctccgactctgcagtatatcaaaaacttaccgaacgctatgacctcctgaggaaggaagaaccagcaaagactaagctcaccatcttttccacgatctccgagactagcgagagcgactcctctttcatcaagattgttgttgaaaacagtgctagcccctctattcccgacaaactgacccgggaaatcaacattcctaaggataccgtgctcccccatgttcttcttattgataacaaactggtcattgaggggacgactcctacaaaaaagctgttgccacataaccccatgcacacagttagttttctcaagaaattcaagatcgcagatggctccggattcaaagagttggtgcacgatgtgattctgtcagatgagattgtggacgatataatcagcaaggtcaagtcccatccaaattttatttaccattacaagcaggagagggtttcgaacatcgaatacattaacgtgggcattcagagtgaggttattcaactgatcaacctgttcgagtcggagggtatccctttctacaaggagacaggaaaacaccctttcaacaatgatgagaagtatactgagtttgcgaagaagtttaaaaagaagtaccgatatggatctggttccgagtacagcaagttacatcaagatattctgaacattgccattgaccagaagataccgcaggactgtattgagttcctccccgatgaaagagcctttaacatacgcagcggctttttcacctggcagcctctgatctatcgaggcctacggcacatctttcagtgtatagccgatcacagcaacatccacggtgaatcgctgaagcatgtagatgacaaagaagtcttggtgaaggcggagaagggagatgcagatgggcataagtttatcgaagtcagtatcctggacaagaattcaaaggctaccatagatagtgacttgctgctacacttttacaaggagtccactgccttcaaacaagacttcagaaatctgtgcgactggttcatcgaatgtgattttaccgccgaacctcccaaaaggattaacctcttaattgctagaagacttgggtctgaatcagtcgagatcgagccattatctaaccctgtgggtggatttaaacatgtgctccggttttatgacgtgcgctga

SEQ ID NO: 7417 - RNA, 2175 nt, synthetic construct
  source 1..2175: mol_type = other RNA
atgaagactaaaaaagacttcctcggcctgctgaattacactaagggcattctgcttggagataaagctgtgccttttgagctaaaacatttgaactaccactccaatcctaaggcaaaccctaaacgttatgtcgcctttgccgtgaagaagaaagccggtgggacaagaaccattcacagccctgccaaaggtctgaaggccatccagaaatgtctcaaccttatcttacaggtggtgtatgcaaaccaccagcataaggccgctaacggctttgtcccaaacaagtcgatcgttgacaatgctagagtccacgcgaatagcttgtatgtgtacaaccttgatctgaaagacttcttcccatctattgaccaagcgcgggtttgggggcgactgaaattcccgccgttcaacttgaacgagaagaccgggcggcttgatctcgcagggataattgcctcattgtgctgccattccatggaggtcgagcgtctggatgatgcgggcaactggaagaaagagattaggaatgtcctaccccagggagctccaacttctcctaccatcaccaatattatatgtcagcagctcgacttctacctgacagctgtggcacgcaggtttcaattgaagtactcccgatatgcagatgatataaccttcagttctcagcataatgtataccacaaggacggcgagtttctgcaagaactacataggctgattgcagctcagaactttcacattaaggagagtaaaacacgcttacaaaagcagggctaccgccaggaagttactggtctggtagtgaatgaagaaccaaacgtcccaaagagatacatcaaacaactccggatgtggttgtattattgggagcaatatggctacgatcgcgcttacagttacttcatgcagcagtacaaagccgataaaggccatcttatcaagggaaagcccgacatggccaacgtgattaaggggaagctcgactatctgaaaatggtgaaggggactgaatcgaccggttatcaaaagctagcggagcggtacatcctgttgacgaagcaggaacctgtggcagaagaattcacagtgtccaatgacatctccgggatgtccgaactcgttagcagtgttatcaaggttaccctcgaaaatagcggtttaccctcaaaccccaacaaattaattaaggccatcaacatccccaaagatacgatactcccgtctgtgttgctcatcgacaataaaattacaaccgaatccacatctagtaataaactgtttccacataacccactgcacaccgtgtccttcctcaaaaagtttaagattgccgacggcagtggatttaaagagctggtgcacgacatcattctgagcgacgaggtagtgaaggacatcattacgaaagttaagtcacaccctaactttatttaccactataagaaggaacgtgtactcagcatcgattatctcaatattggaatacggggagaggtcatccagctgatagatctgtttgaatctgaaggaatccccttctacaaggaaaccggcaagcatccattcaataatgacgaggtgtatactgtctttgccaaggagttcaagaaaaagtatagatacgggtcaggttcagagtactccaaacttcagcaggacattttaagcatcgcctcagatcagaagatcgccctggattgcatagaatttctgcccgatgagagagccttcaatatcaggagcggattcttcacatggcagcccctcatatataaaggacttcggcatatcttccagggcatcgctgatcacagcaacataaatggagaggacatcaagtgcattaacggcagggaagtgcaggtccgcgctgagaaaggggaagccaatttttgtaagttcattgagatctccatccttgataaaaactcaaaggctaagattgagtctgacctgctacttcactactacaaagagagtacagcatttaaacaagactttagaaacctgtgtgactggatcattgagtgcgatttcaccgtggagcctagcaaacgcatcaatctgctgactgcatctcacttcaactacaatattgatgagatcgagcccctggaccacctggtaggcgggtttaagcatatcttgcgattctatgacataaggtga

SEQ ID NO: 7418 - RNA, 2118 nt, synthetic construct
  source 1..2118: mol_type = other RNA
atgaaattggaccaggccactattaaccacatcaacaccacattccacaagatgaagtcaaaaaacgatttcctgtcccttttgaacttcgtcaagggtaaaatttacggggagaagatacacgcgttcgagattaaaaacctgaactactacatcaacacgaagagtaagcagaatcgctacaccaaattcatcattaagaagaagagcggcgaggataggatcatccactctccagctcctgggctcaaggccatccaaaagtgcatcaatgttattttccagagtatttacgaggtgaaccccgctgcaacgggattcgtaatcggaaaaagtatagtcgataatggaatagtccatagcgggaagaactatgtgttcaatttggacttgaaagactttttcagcagtattgatcaagcccggatctggggcaggcttaaggtgccaccctttaatctaaatgaacagaatggcaacttggagattgccaacataatcgcaagcctctgttgtcacgaaatggaggtggaaaggtttgacgcaatcaacaacaagtgggaaaaagtaatcaagaatgtggtgccacagggtgctcctacatctcccaccctcattaacattatttgtcagaagcttgacttctatctttcggccgtcgcgaaacgctttagcctcaggtacacaagatatgccgacgacataactttttctagcgatcataatgtgtaccacaacaatggagaattcctgaccgagatcaaacgtatcattaagagcgaacgttttgacattaaggatagcaaaactcacctgcaaaaacgcggctatagacaggaagtcacaggcttggtggttaatgttaaacccaacgtccattccaagtatgtgaaacaaattagacactggctgtatatctgggaaaaacatggctacgaatatgcctccaagttctttattaacccttacctgaagaacaagattaatcctaaagacaacatccctgatctgtacatcatcctgcgcgggaaattaaattacctgaagatgatcaagggttctgacaattcgacatatattaaactgtccaatcggttcgatctcctcaattcctccgagaagaaagtgctgcaggagcagtctgaaagaataatcctgtcaaagattctgcccactactgagaatgacaaggtgtacatcctccccattattcataccccgaaagaggtagtaaaaatactcaacaagttcaccctaaacaacagcgcactcaaatactctacccataattgggattctggacaaaatgaggatatctttaaggatctggctgactttatcaaaaaagcgcggtcagaattttatcccgcatcagaacagttaaagatgcttaagaaagagttgcatgccaagatcttttcgtttctattcaatgagaaggtcgccgagaagggctggggaatccaccggatcaaatttggctggagcagtcctgagctcctgaaggagatggaaaacaatatcataaaaccggagaattgcattcttccaaagaacgctcagttcatcttaaaaaccaacacaggcaatcaaaccattcagaagttcaaacaggttatcgacatctttaagaatgaaatcgagatacgagatgagaatagtatactgttaaacctactcttagagaaacatgacatgcacctgaatggtttcgagataaaagaggctaaagacctggaaaacacgaatttttttaccgacgtggactacttctcaaaggcccttacccttgtgtttgaaaacattcagaaacgaccagaacacaagatcgtctcttatgttatcaaggagaagtcagattcttacattctggaaattatgcaccataactcaactgctaagggaaagtcctataaagacaagaagctgagtctgcagtccggggatttcggcactattaaaatgcacctcttgaacctgtgcgagtggagcgttgaatccgagttcaaagaggggcccacaaggatcaacttcctgcactccaatgaggatacactgccatatgaaaaaatagatgacgtgaaggggtttaagcatgtgttcaagttttacaagtga

SEQ ID NO: 7419 - RNA, 2070 nt, synthetic construct
  source 1..2070: mol_type = other RNA
atgaaaagcaaaaatgacttcctgtccttgctaaacttcgttaaggggaagatttacgggggaaaaattcatgcatttgagctgaagaatctaaactactacataaacaccaagtctaaacagaacaggtacactaagttcacaattaagaagaagtctggcgaagaccgcattatccactcgcccgttcccggccttaaagctattcagaaatgtatcaacgtgatattccagagcatatatgaggtcaatagcgccgctaccggcttcgtgatcggaaaatctatagtggacaacggcatcgtgcactcaggcaaaaactacgtgtttaacctcgacttgaaagactttttttccagcattgatcaggcgagagtatggggcaggttgaaagttagcccatttaatctgaacgagcagaatggaaatttagagatcgcgaacatcattgccagtctttgctgccacgagatggatgtagagcgatatgatgccataaataaccggtggtataacgtgacaaagaatgtcgttcctcagggagcaccgacatcccctactttaataaacatcatttgccagaggctggattactatttaagcgcagtggcgaaacggttttctctgaactatacccggtacgcagatgatatcacattctcgtcgaaccataacgtttatcaaagtggtggggagtttattacagaaattgaacggatcatacgtagcgagaagtttgacatcaaagactctaagactaatctgcagaagagggggtatagacaggaggtcactggcttagtagtcaatattaaacctaacgttcactcaaagtacataaaacagattcgtcactggctctacgcatgggagaagcacggatatgaatacgcctcaaacttcttcatcaagcagtacctgaaagacaagattaatcccaagacgaatacacctgacctatacagcgtccttcgtggcaagctcaattacttgaagatggtgaagggtttcgagaactccacctatctgaagctcagtaatcgcttcaaccttctgatagacttttccgacaagaacgtaaccctgacgcagtccaatcaagtgacagtcagcgaggtgctgcccgaccttaagaataacaaaatttcaaagctgcccatcatccatacccccaaagaggtcgtgcgcatcttgaacaaatttaccctgaataactccgccctaaagtatagtacccatacttgggatgccggccagaatgaggacgtgttcaaagatctgccagatttcctgaagaaagctaatagagagttcaaccccgtgagcgaatctctcaaaactctgagaaaggaactgcacgctaagatcatctcctttctgttctatgataaagtggccgagaaaggatgggggatccatcgggtgaagtttggctggtccagtcctgaacttctcgccgagatgcagattacgaacatcaaaccagaaaactttacgatcccggagaaggcccagttttcattggaaaccacacgaggtatccagaccattcagaaattcaagcaagtcatcgacatttttaagaacgagatcgaaattagggatgaaaatagtgtccttcgcgagctcctgatcgaaaagcacaacactcatctcaatggtttcaatatccgggaaatgcgcaacctggagaataccaatttttttacagacgtggactattttagcaaagctctgaccctgatcttcgagaatattcaaaaaaggccacagcataaattcgtaagctacatacttaaggacgaggaagattcttacatcctcgagattattcaccacgattctaccgccaagggaaagtccatcaaagacaataagctctcactggaaagtggtgacttcgggactgttcgaatgcatttgctcaacttatgtgaatggtcagtggagtccgaatttagagaagggccaactagaatcaatttcctcgattctaatcaagatacaccaccttatgtgaaaatcgatcaagctgagggattcaagtacattttcaagttctacaagtga

SEQ ID NO: 7420 - RNA, 2121 nt, synthetic construct
  source 1..2121: mol_type = other RNA
atgaaattagaccagactgtgattgactatatcaacactacatttcacgagatgaagagtaaggatgacttcctctctcttcttaatttcgtgaagaagaagatctatggagaattgactcacccgtttgagatcaaaaacatcaactactacatcagctctaaatctaaacaaaaccgctataccagatttgtgatcaaaaagaagtctgggggagatagaatcatccattcccccgttcctgggctaaaggccctccagaagtgcatcaacataatcttccaatgtacctacaaggtgaatcccgcagctacaggattcgtcataggcaagagtatcttcgataatgccattgtacacagcggaaaaaactacgtgttcaacttggacctgaaggattttttctccagcattgaccaggccaggctttggggtaggctgaaagcagcaccttttaatttaaatgagtcctccggtagactcgaactggctaatattatcgcatgtttgtgttgccatgaaatggaagtagaacggtatgacccaataaacaatcagtggtataaggccattaagaacgtcgtgccccaaggtgcgcctaccagtccaacactgatcaacataatctgccagcgtctggattactacctctcagctgtcgccaaaaggttttcggtgaattacacacgatacgcagatgacatcactttttctagcgatcacaacgtctaccagaaaaacggcgagtttattaccgaagtggagcgtatcataaaggtggagaacttcaacattaaggatagtaagacacatctccagaaacggggttatcggcaggaggtcaccgggttagtggttaatcacaatccgaacgtgcacaacaagtacattaaacagattcgccattggctgtacgcttgggagaaagatggctatgagtacgcttcaaatttcttcattgaagcctatctgaaagacaagatcaatcccaaagccaccacccctgatctgtcaaatgtgctaagcgggaaactcaattacctaaaaatgatcaagggatttgacaatcccacgtatattaaactcaatgctcgcttcgagtcactgttgattaagggcgacaaaaaaaacaaagagacaaccgccgaccaaagtcttaccatggacgggctgagcgagattgaatattccaaggtgtccaatttaccagtggaacacacacctaaggaggttgttcggatccttaataaattcacgctcaacaattctgcactgaagtatagtacacacaattgggacgcgggacaggatgacggcatattcaaggacctgccaagctttctgaagaaggccaattctgagttcaacccagtctccgagcatctcaaaatgctgagaaaggagctacacgctaagatcatctcattcttattctacgacaaggtcgccgaaaaggggtgggggacttacagaattaaattcggctggtccagtcctgaactactgttggagatgcagaacaacaacattaaacccgagaactttatactgccgcagtctgttcagtttttgctggaaacaaacactggcgtgcaaacgatacagaagtttaaacaggtgatcgacatcttcaaaaacgaaatcgaaattagggacgaaaactcgatgctcagggatctgttgctggaaaagcatgataaacatctcgaaggctttaacattcgagagatgaagaacctggagaataccaatttttttactgacgtcgattacttcggaaaagctctgaccctgatatttgagaatattcagaaacggccagagcaccgattcgttagctatgtactcattgatgagtctgacggttatatccttgagatcatacaccacggaagcaacgccaagggtaagagcattaaggataaaaaactgtcactggagtcaggcgattttgggacaatcaagactcatcttcttaatctgtgcgagtggtccgtcgagtccgaatttaaagaaggccccacgcgcatcaacttcttggatagcgacaagaatactctgccttatgtaaagctcgatcaagcggacggcttcaagtacattttcaagttttacacctga

SEQ ID NO: 7421 - RNA, 2118 nt, synthetic construct
  source 1..2118: mol_type = other RNA
atgaagctcgaccagacactgatcgactatataaacactacattccacgagatgaaaagcaaggacgatttcctcagtctcttgaacttcgtgaagaaaaagatttacggcgaggacacccaccccttcgagatcaagaacatcaattactatatctcgagcaaatccaaacagaaccgttacaccaggtttgtcatcaagaaaaagagtggtggggatcgcaccatacactcacccgtgtctgggttgaaggctctgcagaagtgtatcaacctcatctttcagagtacatataaggtgaatccggccgcaaccggctttgtcattggaaagtccattgtagacaacgccattgttcattcagggaagaattacgtgttcaacctggatctgaaagatttcttctcctcaattgaccaggctcgcctgtggggacggttaaaagtggcgccatttaatttgaatgagcaaacaggccgactggaactggccaatataatcgcatgcctctgttgtcacgagatggaggttgagaggttcgatacaataaataaccagtggaacaaagtgatcaaaaacgtgattccccaaggcgctcccacaagccctacgcttattaatatagtctgccagagactggattattacctgctcgctgtagctaaacgcttttctctgaactataccagatacgccgatgatattaccttttctagtgatcacaacgtgtatcagaagaatggggagtttatagccgaggtccaacggatcatcgagaaagagaactttaacattaaggactccaaaaccagattacagaaaagaggataccggcaagaggtaacgggactggtggtcaatcataagccaaatgtccataacaactacattaagcagattcgccattggatatacgtatgggaaaagtttggatacgagtatgcaagcaacttcttcatcaaacagtatctaaaggacaaaatcaacccgaagactaacacccccgatctcagcaatgtgctgtccgggaaactgaattatttgaagatgatccgaggtttcgacaactctacttacatcaagctgaatgaccgttttgaactattgctcaacatcagcatccagaagaatgagaatatcgtggccgaccaatccacccttcttggaatgccagaagtggagaacaatgaaaactttaaactcccagtgttacacacaccgaaggagcttgttcggattctgaacaagttcacccttaataattcggcactaaagtactcaactcataattgggatgccgggcaggatgaagacatctttaaagatctacccgattttctcaagaaagcctcaaaagaattcaacccagtctctgagtatcttaaatcactgaaaaaggagctccacgcaaagataatgtccttccttttcaacgaaaaagttggcgagaaaggctgggggatttaccgagtgaaattcggctggtcctcacctgaactgttgaaagagatgcagattagtgacataaagccagaaaactttactctgcctcaaaatgctcagtttaggctcgagacaaatagaggtaatgagactatccagaagttcaagcaggttattgacattttcaagaacgagatcgaaatcagggacgagaacagtatcctgcaggatcttctgctggaaaagcacgacaaacacctgaatgggtttgagattaaagaaatgcagaacctggaaaatactaacttttttaccgacgttgactatttcagccgcgcgttgacactgatctttgaaaatatacagaagaggcctgaacatcggtttgtgagctatatattagtcgacgaacccgactccaatatcctagagattattcatcatggcagcaccgccaaaggtaagtctatcaaggacaaaaagctgtccttggagagcggagatttcggcactatcagcatgcacctgagaaatttatgcgaatggtctattgaaagtgagttcaaggaaggccctatcaggattaactttctcgactctgacaaagatacgcctccttacgtcaagatcgatcaagtggatggtttcaagtacattttcaagttctacaagtga

SEQ ID NO: 7422 - RNA, 2061 nt, synthetic construct
  source 1..2061: mol_type = other RNA
atgatcttaaagaccgaaaacatcattttcatcaaggagacgtttcagaacatgaagtctaagcatgactttttggacctgctgaactatgtgaagccatttatttatggcgagaagacccagagctttgatcttaaccacctaaatttccatagcaattctaacaccaagaagtacaagtctttcatcgtaaagaaaaagtctggcgcagataggacaatcaattccccatcaaagggtctgaaggcaatacagaaatgtcttaacctgatctttcagacgatttacgacgtgcatccttctgtctatggatttgttaaaagcaagtccattgtgaacaatgctaatattcactcaggcaaccactatatctacaacatagacctgaaggatttctttagcagtatcgaccaagccagaatatgggggaggctgcagtatcccccatttaatctcaacaaagaacgggatctgcttgaagtggccaatatgatctcgtcattatgttgcttcaaaattgatgttgagaggctggatgagaataatgaatggcagattgtgaacagaaatgtccttccacaaggtgccccgacctcccccaccatcactaatatcatatgccaacagctggatttctatttgacagcagtggctaagagatttggcctccgatattcacgctatgccgacgatattactttcagtagcatgcacaatgtatacaacgaaaacagcgattttatcaaagagctgaatcgcgtcattagttctcagaacttccatattaagcagagtaaaacacgactgcagaaaaaaggctacagacaggaggtaaccggtctgatagtgaatgctaaacccaacgtcaactcccgttacattaaacagctccgtatgtggctattctactgggagaaccatgggtatgaaaaagccaatctgttctttggctcgcagtactttaaggacagaggatatgttaagaagcgagtgcccaatctagagttcgtgctcgatgggaaactcaactttctaaagatggttaaaggggcagaaaatggaacatacctgaaactttacgagagattcagggtcctctctgaaaagaaaatatcgtttcaggcggtgcagatatcaaatattaaagaggtgaaacacgaccctcaagagacagtgaaactcttgaagttcttcaagtacgacaacaagtacagttttaaacagttggttcacaagcccgtgaacgaaaacgacttcaattttatcgaaatcctcaaaactgcgaacaagcaatttatggatttcagcgtggataacaataacaaactgaacatcccaaaggaccttatatccggcgtccagaatctctttgagattctgcgcacttccggcatcgatttctacaatatcaacaatctccaccccctggaagacaagaacattggggcaaagattcagctgttcaaaggggattaccggtttggaaatgagaaaagcgaatctagcattctcagcgacctgatcatcaggaccgctctgaaaaaggagttctcagaccaaatcaacaacattgtctatagtttcggagaaaatgataacagcggactgttcgactacaaacagatcattttctatccggagttacagaaattccagtccaaggctaatttcttcacctgggtgcctaacgttaaaatagccttgtccatcatctttgagtcaatcttaaaacacagcaacgtgaatgggaaccgcaattttacacttgaagagaagggcattatcatcaatatcgagcggaaggccgtgaatgatctgattaagattgagttgtccatactggacaagaattctttgcttatgggttccattgacaacatcctgtccgacatgcgccgggacttcttccctgttttggtgggaatatgcgatttcaaggtccaatttaagagtatcatggaggaaaactatgaatgtcgggtcctcccttatgcctctaaagtaaagcctattgacgaggatccacaaggcttcaagtacatctttactttttacgactga

SEQ ID NO: 7423 - RNA, 2079 nt, synthetic construct
  source 1..2079: mol_type = other RNA
atgaagcttacacagaccgatatcagctttattaaggagtcctttgagaaaatgagggataagagtgacttggtggccctgctgaattatatcaagcccattctttacggagagaagacctacttatttactgtgcacgacttaaactaccacataaacaacaagaatgacaaccgctatgagaagttcgagattcgaaaaaaatccggcaaaagccgcgtaatacactccccaaacaatgtgctaaagtcgttccagaagtgtctcaacctggtgttccagacagtgtacaaatttcacagcagcgcgactggttttattggcggaaagtcaatcgttgacaatgctaaaatccacgtggggagcaactacgtttacaatatcgacttgagagacttttttccatctatcgatcaagctagactgtggggacggctgcagtatcccccctttaacctgaacaaggaaaacgacaatatccagcttgctaatattatcgcctacctatgctgccataagtataaggtcaaacggctgatcgatggcaaatggaagattgtggagaaaagcgtcttgcctcagggagcccctacctctccagtagtctcaaatattatctgtcagaggttggacttctatctgagcgccgtggctaagagatttggggccaaatattccagatacgccgatgatattaccttcagttccgttcatcacatttacaaagagaaccatgcattcatcttagaagtccagaaaataattgccaacgagaatttcaccattaaccctcagaaaacccggttacaagaaggcgcatacaagcagatggtgacaggcctggtggtaaatcagaacgttaatgtctccaagaagtatatcaaagaactccgaatgtggctgttcttctgggagacatacggggttcagaaagcaaccgttaagtttaacctctaccgcgccggccaggacataggtagtagctctaacatgattaaggtgattaggggaaagttggatttcttaaaaatggtcaagggggcgaacaacctcgcttacctgaaactcctgaagcgattcactgaactcgtctctgcccaaaactctatgcaaaaaaaattggacaagcagaagcatatagagacgtttaagatatctgacttcaacctccaccagaagacaacgcatcacgaacctcaaaagctagtgtctctgctgaacaatttcacagccgggagtaacctgaaatatgctactcacgggtgggaggagcacgagacatatgatgagttcatcatcaagctgacaagagattggcagaagattgaagacgacctctttgatctgaagaagacctttgcgaccaaaatcagcgtattcctcgattctgaaaaagtggaagaaattggctggggggctaaaactgcaaatgaacgcatctattttggctggaaaagtaaaagtctggtcgagtggagtcacgcaaatcccaataaatccccgttctactttcctattccacaagataaaaaggttttcttcgacggaattcaaaccaattacttctatgacgtcacagagattttcaaacggcagattgaaatacgcgaggagaataatcatctgcataatcttttcatggacctgagaaagaactacctaggctatgatttcaagcttacgtcaataaacacgaaaggtatcactttctttaccgacgtgaatactctcaaaaacggaatcattaagatctttgagtccatcaagaagaggccacagtttccgaagataaagatcgtagtggaacacctcgaaaattccatcgagatcaaaatcatccatgtggattcaatctgcaacaggcccatcaatgataacaaaatacttctggccaatactggggactttgcagatcttaacaaatacttcaccaatctctgtgactggtcaattgagtcaaattttatcgacggtaagtcatacaggattaactatttggactcgcgtgtgggcatagataagatctccactatcagcaagcgtgaaggttttacatttattctgcggttctatctgtga

SEQ ID NO: 7424 - RNA, 1329 nt, synthetic construct
  source 1..1329: mol_type = other RNA
atgatattgaccccggagtttaagttccaggtccaaactgccttcaaggagatgcagtctaaaagtgactttctggagctcctcaatatcgcaaaacagatgatgtatggggacaagacagtcccctttagtgagaagcaattgaactacttcatcaccaaggattctcaagttatcaagtcccgagtagactttcggatcgacctgagcaaatttgaacctttcattgaggagaacgtggttattgagaagaagaacattaatcgcaaagactgctatgtacccttcatcattaagaagaaatcaggtcaggacaggacaatccacgcccccgttaagggtttgaaggagttccagaaagcacttaacattatcttgcagtgcctgcacgaaccacacacagcggctacaggcttcgtaattgggaaaagcattgtcgataacgctaagaagcatatcggacaaacatatgtctacaacatcgacttaaaagacttctttccatcagtggatagatctcgagtatggggccgtttgctggtggcccctttcaatcttggcactacagtggaacggaaaaatatagccaactttatagccactctctgttgtactcccatggaagttgaacggttcaaggaagggaactggatcaagataacgaccagcgtcctacctcagggagcccccacatcccctacccttaccaatattatctgtgagaaactggacaaacgcctgaatggcgtggcgaagagatttgggctcaactattcccgctacgctgatgacatcactttcagctcaaagcacaatgcttacgaggtgtccccaaccaaggtggaaaaaatctttgcaagcggcacgacctttgattgcgaagttagaaagattatcactgagcagaacttccacataaaagagactaaggtgagactccaaaaaaggggatataggcaggaggtgaccgggcttgtcgtgaatgataagatcaacgtgacccgcctctacgtgaagcagcttcggcagtggctgtatttatgggaacgttacggatatgataagtcctacgccattttcctgaatatctacttagcagacaagggacatgtgaaatctgaacagccaaacatggccatggtgattgagggcaaactgctctatctaaagatggtgaaaggcgctgatgatgggacatacctcaaactgaagaaaaggtttgatctgctactgggtaccacgtcgaagaataacagtgaagcagttaatattctggatctgatatttgacgtcggtctggacgaggctatgacccattacaaaaaatga

SEQ ID NO: 7425 - RNA, 1278 nt, synthetic construct
  source 1..1278: mol_type = other RNA
atgcagacgaaaagtgactttttatctctgctcaatctggctaaactggagatctacggagagaaaaccattcctttttccgagaagcagtttaattactatctcaccaaggactccagtacgttcaagagcaagattgacttccagatagatctgtcgggagatagtgtcgtcattaacgagaatgtaatcgtggagaaaaaaaatcagcaaaggaagtcctgttacacaagcttcgctatcaaaaaaaaaagcggaaaagaccgcactatccatgcaccaatcaaagggcttaaagaatttcagaaggccttgtgcctagtgttacagtgtctctatgagccccactctgcggcaaccggctttgttctgggtaaatccatcgttgacaatgccaagaagcatgtcgggcagacttatgtgtacaatatagaccttaaggacttcttcccctcgatcgacaaaagcagagtttggggtcggttgctggtggccccattcaatttgggcaactcaaacgagcggcgcacacttgccaacttcatcgctactatttgctgcacacccatggaagtagaacgtttccaagaaggcaagtggatcacagtgactacttcagttttgcctcaaggggcacctacgtccccagctattaccaacatcatatgtgaaaagctggacagacggctgacaggagtggctaaaagattcggactcaattacacccgctatgccgatgacatcacttttagctctaagcacaacacctatgaggtgtctgattcaaaggtggaaaagatctttgttgccggcagtagcttcgattgcgaggtgaggaaaattattagcgagcagaactttcacattaaggagtctaaggtgaggctgcaaaagagaggctatcgccaggaggtaactggcttagtcgtcaacgataagattaacgtgacccgacgttacgtcaaacagctgaggcagtggctttacttttgggagcgatatgggtatgataaagcatacgcatttttcctgaactactacctgtcagacaaggggcacataaagttcgagaagccgaatatggccatggtggtcgaagggaagctgctgtaccttaagatggtaaaaggcgccaacgatggtacctatctcaagttgaaggaacggttcgatctgctcgttggcacagcgtccaagaataataacgaaaaagctaccatcgtggatctaatttttgatgtgggactcgacgaagccatgacacattacaaaaagtga

SEQ ID NO: 7426 - RNA, 1359 nt, synthetic construct
  source 1..1359: mol_type = other RNA
atgaaaataacattggaacaatcaaagacgatccaggaggcttttaagaagatggactccaagaatgatttcctggctctacttaatgaagcgaaaaagctgatgtatggcgacaaaaccattcctttcgaggagaagcagctcaactactatattagcaaggattcgatcaagaataagagcgtcaaaagcgagaagaatatcagcaccgtgcttctaaaggaggagacaagttttaaggcgtccgttcgcaaaccttcctacacatcattcacaatcaagaaaaagtccggaagcgacagaactatttacgccccggtgaaggggctgaaagagctgcagaaagcactgaacattattctccaggcaatccacgaaccacacatagcagcaacaggcttcgtactggggaagtcaatagtggacaacgccaaggttcatgtcggccagatctacgtgtataacctggatctcaaggattttttcccatccgtggataaggccagggtttggggccggttactggtggcccctttcaacctcaacacctccgatgaacggaagaaaattgctaacatgattgccggtctgagttgcacacccatggaggtcgaacgctttatcgacaataattgggtgaagataaccactgccgttctaccacagggagcccccacctctcctactcttaccaataccatttgtgaacggatggacaagcaattgtctggcgtcgctaagagatttgggctcaattatactcgatatgctgacgacataactttcagcagtaagcataactcttacgaagtctcaccgaataagttcgagaaaatttttgtgtctggctcaacctttgataaagaagtgagaaagatcatcgctaaccagaattttcacgtgaaggaaagtaaagtcagactgcagcaggaaggattcaggcaagaagtaactggactggtagtgaatgaaaaagtgaacgttacccgtcgatacatcaaacaattgaggctttggctgtattattgggagacttacggttacgacaaatcttactcctttttcctccagaagtattgccgcgagaaaggcaacgtgaaaaaagggcagccaaacatggccatggtcctggatggaaaactgttgtatctgaaaatggtgaagggtgagaaggatgagacgtacttgaagatgaaaaataggttcgacgttttagtgcttaacacgacccccagcaaatctctcgtgcccaataaactgctggaggtaaaggacacaaaggagaacattgggaagaacatcgtcgatttaatcctcgagatcgggcttgagggtgcaatgaaaaattacaaaagttga

SEQ ID NO: 7427 - RNA, 1359 nt, synthetic construct
  source 1..1359: mol_type = other RNA
atgaaactggccctggagcagattaataacctgaaaaccgcttttgagaagatggacagcaaagaggacttcttggcactcctgaatctggctaagtctttcttgtacggcgagaacacagtcgtgtttgaaatgaagcagctgaattactacatcaacaaagaccagaaaacaaccaataagaaggtgaacttagagggattgctcaataccggggatgatcgcttcaagactgccgtcagaaagcccgcttacacaagtttctccataaaaaagaagtctagggaggaccggattctccatgcaccagtcaaggggctgaaagagttccagaaagccctgaaccttattttccagtgcgtttacgagccacacaaggccgccaccggcttcgttctcggaaagtctatcgtagataatgccaagctacatgtcaatcagaattacgtgtacaacttggacctaaaggatttttttccatccatagatcaggcaagagtctgggggcgcattaaagcagccccttttaatctggagacaactgtagagcggcaaaaaatagctaatatgatcgcagctttgtgttgcactcctatggaggtcgaaaggaacactaacggtgaatggaaaaaaatcacgcttcccgtgctgcctcaaggagcaccaacgtcccccaccttgaccaacgctatctgtgaacgtctcgacctgaggcttgcaggggtagccaagcggtttggtctgaattatagtcgatatgccgacgatattacgttttcaagcaaacacaactcattcgaaaagaccaagaatgtttttgagaacatctatctgaaggactccacttttgacaaggaagtgagaaaaatcattgctagccagaacttccacatcaaagaaagtaaggtgcggcttcaaaagcagggatataggcaggaggtgacaggcattgtggtgaacgacaaggtgaatatcaaccagaagtatatcaaacaactgcgtcagtggctcttctactgggaaacatttggctatgatcgagcctaccagtattttctccaaaaatatgtcgcgaacaaaggtcatgtgaaaaaaggccagcctaatatggccatggttctggatgggaagttactgtaccttaagatggtgaaaggcgaaacagatccggcgtacctgaagctcagagagcgcttcgaaaaactcattggctcgaagtctaacatctcagagatcctggatttatgggaaactaagggaatagatgaggctatgaaagccttttatttcgcgaagcagcaagacgtactgcccaaggtgagcacccgcctaaatgttgaagacattttctacctttga

SEQ ID NO: 7428 - RNA, 1281 nt, synthetic construct
  source 1..1281: mol_type = other RNA
atgaagttcacccaagagcagaaatcacagatcaggtccctctttgacaaaatgaattctaaatcggacttcctctttctcctgaataaagccaagatgatagagtatgaggataagatgatagacttcgaagaaaagcagctgaacttttacatcaacaaagactcaaccaacaagaaagacgcggaatcccttaccaaaaacagcaagaactttttctacaactccttcagtattaagaagaaatctggaaaggagaggattatcaacgctccagttacaggactgaaaaacttccaaaagagcctcaatatcatcttacagtgtgtttttgactgtcacgacgctgccactggctttgttcccggcaagagcatcgtcgataatgctaagattcatgtggggcagacttatgtatacaacatcgatttgaaggacttcttttcttccattgataagagtcgaatatggggtcggctcctgtttcccccgtttaacctgaatacatcttcccaacggaaaaaaattgcaaatatgattgccggtctagcatgcactcctatggaagtggagcgctttatcgatggctattggtgcaacattgaaaattcagtgttacctcaggggagtccaatgtcaccaataatcaccaacatcatttgcgaaaggcttgacagacagttgaccggcgtgtccaaaagattcgggctgaactacagcaggtacgcagatgatattactttcagcggcaagcacaacacgtatctgaaaggactgggagtcgtggagaaaatcttcgagaaaaattctacgtttgaccttgaagtccggagaatcatcaacaacgagaagtttcacatccaagaggacaaagtgcggctgcagaaggagggttatcgccaagaggtgacaggcctggttgtgaataataaggtgaatgtctctaagcgctatattaagcagctcagacagtggatatattatctcgaaacatatgggtacgataagagctacagtttgttcttgagcaactacattgatggcaaaaaaaattcatccagccagacccctaatatgcttatggtaatacgtggtaagctgctgtacctaaagatggtaaaaggagataagaacgaaacctacttaaaactgaagaatcgattcgattcggtcattatgccccattccagtattagcttcatcatcgacatttggaagaatgacgggatcgaaaaagccatggagatctactacaaccagaaggtgaaaaatgagaagtga

SEQ ID NO: 7429 - RNA, 1329 nt, synthetic construct
  source 1..1329: mol_type = other RNA
atgaaaacaaatgtggatcaacagaccgagataaaggaactattccaaaacatgaagaaggaggccgatttgtggcatctgatcaacgtggcgaaaaaacacattcacggcaccaaggcatctaatttcaagcccaaactgcttcagcatttgatcctgaaagacgctaaggagttcaacctcgaaaattcaacctcagtcttttatcaccagtttgagatcaagaagaaatccggcggtatcagaacaatccacgcgccacaccctaaactcaaggaagtccaggaggcccttaattacatcttccagtgcgtatatctgccccatccgaatgcaaccggatttgttgtaggtaagagcattgtggataacgctaagaagcacgttaatcagaaatacgtatacaatctggaccttaaagactttttccctagcatagacaaaagtcgagtctggggtaggcttctaatagccccattcaacctgaagaacagccctaagggtattaagatagccaatatgattgccagtatctgttgtacaaagttggacgtggaacgtattaaggacggcgtgtcccatactattttgacctccgttctgccacagggagctcctacctctcccactctcactaacgccatttgcgaaaaaatggacattcggttagccggagccgccaaacggtttgggctgcagtactctcgatacgctgatgatattacgttctcgagtaatcataatgcatgcgagtacgcgaaagggaagttcgagaagatctacaagaaaaacagcgtcttcgataaggaggtgcgcagaatcataacagatcagaatttccggatcaatgagtccaaggtgaggctccaagtcaaaaacgtgaaacaagaagttacaggaatcacggttaatgaaaaactcaacgtctctcgcgactatattaagcagcttagaaagtggctgtattactgggagagctatggctttgataaagcatcaaccttctttactcagaactacatggcagagaaagggcacctggtgtccaaaaagcccaatatgactcacgtgctggaaggcaagttactgtatctgaaaatggtcaagggagccgaggattctacttatattgggctgaagacaaggtttgagaagttaagcggccgcgtgaacaaaatagaccagctgttggacgtatgggaaaaagagggcgtggaagctgctatctccttttacaactttgggaaaaaagctaagaagattgcaaccatcgtggattttgagtcattcctcatcgacaacatcaacattgacaacaagatcctctga

SEQ ID NO: 7430 - RNA, 1383 nt, synthetic construct
  source 1..1383: mol_type = other RNA
atgaaactggcgattgatcaggaaaaaaagattaaacagctgtttgccaagatgaatagtaaagaagagtttttgcagctgctcaatttctcgaagaagatcatatacaaagaggagactataccattcaccattacacagctcaacttctacatctcaaaggacagtaacaagttcaactccaagaagaaatactaccacacgtttgaaatcaaaaagaaaagtggggctcctagaacaatacacgcaccttgtaaggggttactagagttccagaagtccctgaacattattcttcaggcattgcataagccgcacgaagccgctacaggatttgtacccaacaagagtatcgttgagaatgctaaaaagcacatcaacaagaactatgtgtacaacatagaccttaaggatttttttcccagcgtcgacgctgcaagggtttggggccgtctcaaagtagccccttttaatctgggctcatctgacaataggaagcaaatcgcaaatatgattaagagcctctgttgccataagatgaaggtggagcgctttgtcgataataactggataaaactggagaagctggttctgcctcagggagctgccacctcacccacactcactaatgccatctgcgagcggatggatatcaaactcactgggttagccaatcgtttcaatctggactacactaggtacgccgatgacattaccttttctagcaatcacaacacatacaagatttccttagaaaaggaggaggccatcttcgagaaagatactacatttgatatcgagctgcgcaggatcattaaggagcaaaacttccatatcaaggaaaccaaagtgagactacagaaacggggttatcgacaagaagtgaccggcttagtggtcaacgacaagatcaacattaaacgcagctacattaagagcgtcagacacaatctctatttgtgggaacggttcggttatgataaggcatacgagctcttccttaacaattatctgaaggaaaaaggccataccaagaaagggaatccaaatatgctgatggtgttggagggaaaactgctgtatttgaagatggtgaaaggcgaatccgacagcacctatcttaagttgaaatcccgatttgataagctttctatcactccccagccagtggagaaaattaagaagagactcacgctgaaagagaaacggcttaaaaccgacaacgccaaaaacaagtctgatatttcctcaatcgaattcatgaaactggtcgctaaggccaaagccaagaaagaggcgaataagaagaagaacatcaacaagatactggacgtgctgttcgaaaaaggactggacgaagcgatgaaactatatgacaaatga

SEQ ID NO: 7431 - RNA, 1323 nt, synthetic construct
  source 1..1323: mol_type = other RNA
atgaagcccacacctaaccagaaatatacaattaggcagctcttcgcagaaatgaaaactaaggaagattttctcagcctgctgaattacagtaaggaggtgctgtaccgtgagaaaatgattccattctccatgaagcaactcaacttttacggcagcccgaagtttaatatccacagattcgacaagaaattctatcacgaattcgaaatcccaaaaaagtccggtctgaagcggctcatacacgcgccaactaaaggcttaaaagagttccagaaggcactgaatcttattctccactgcgtgtatgagcctcattacgctgccaccgggtttgtgcccgacaagagcattgtggataattcgaagcctcacgttggcaaactgtacgtgtacaacattgaccttaaggacttttttccctcaatcgacgcttcaagggtatgggggcggctgctggttactccatttaaccttggaacaactaatgagagacgatacatagcaaacatgatcaaaatcctgtgctgtcattacctgccagctgagcggtttgtcgataacgtatgggtgactgagaaacgccatgttttaccccaaggcgcagccacaagcccgaccttgacaaacgccatttgtgagcggctcgatatcaggttgtccggggtcgccaaaagattcgggctcacttatacccgctatgccgacgatattaccttctctagtatgcacaactctttccccaacaaagaaggcgtcgcggaaaccatctttaagaagggatccacctttgatctagagctcaggaaagtcatcgagtcccagaacttccacataaaggagaataaagtgcgcctgcagaagaaaggctataagcaggaggtgacgggtctggtggttaatgataagatcaacgtgcctcggagctatatcaaggatttgagacactggatctacttctgggaacgatatggatacgacaaggcttacgagctgtttttgaagaagtacagtaacaatcgtggccatgtgaaaaaaggcaagcccaatatgggtatggtcattgaggggaagctactttatctaaagatggtaaaaggatcagaagactctacctatttgggacttagagaaaggttcaagacgatatgcgatgaaaattctaacgacaacaataagacggtcaatacacatatcgaagggctgctggaggaatttttccttaaaatggacaagcctattgagaataccaacacccagaaaattttagatctgatcttcgaggaaggactcgaccgcgccatggagctgtacaaaacatga

SEQ ID NO: 7432 - RNA, 1305 nt, synthetic construct
  source 1..1305: mol_type = other RNA
atgaagctcaacacctatcaaacggagtatattagggatctttttgcgaatatgtcctcaaagaaggacttcctatttctgctgaacaaggtcaaagagttaatctacaaggaaaagacgatcgccttttcggaacaacagctgaactattacatcaacctcaaccccaacgtgaaaatggaaaaaaagtacttcagcttcagcattgaaaagaaaagcggaggcactagaacaatccacgctccctcagaaggcttgaaggaatttcagaaggcagtgtcgatcatcttatccgccatccatcagccccacgataatgcgaccggattcatccagaataggagcatcgttaataatgccagaaaacatatagggaagaattacgtctacaacatcgatttgaaggactttttccccagtattgatgccaatcgcgtttgggctaggctccttattgagccattcaatttgggaaccagtgtcgagcgcaaaaagatcgctaatatgataaaggccatttgttgcaccaacatggaggtgcagcgcctgatcgatgacaaatgggagagcgtgaacttgaacgtccttccacaaggcgcatccacctcacctgttctgactaatattatttgcgaccgactggacaaaaggctgactggcgtcgccaaacgctttggcctgaattatactaggtatgccgacgacatcacattctcttccaaccacaatgtgtaccgcctggattccggagatactgaaacaatctataccgctaattctagtttcgatagagaggtacggcggattattgtggggcagaagtttcatgttaaagagtccaaagtcagactccagaaacgaggttacagacaggaggtaaccggtcttacagtgaacgaaaaggtgaacgtgccaaagcggtacataaaggagattagacactggatttacttttgggaacgttacggctatgacaaagctacagagctgttccgtgtgaagtatcgaaaggacaaggggcacatcaaaaacgactcaccgaatctaataatggtgctggagggaaaactcttatatctgaaaatggttaagggtgagtacgatcctacctacgtgaaactgcggtctaggttccgggagctcttgaacccagacagtgcaattacaattaacctcagcgacgacaactacgaatctatcatactggacactatctttagcgacgggcttgatgaagcaatgaaggaatatgatcctgtctatatagagatcatgtctcctgagcagcggaataaagatgtatga

SEQ ID NO: 7433 - RNA, 1134 nt, synthetic construct
  source 1..1134: mol_type = other RNA
atggaagacctcctatctctcattaagctggtgaatgaaatgttatacggggagacagctaaggcggtgaaactgaagtcacttacttactattcaaaccctagcttgaggggagatgtgtacgagaaattcaagattccgaagaaaagcggtggcgttcgagttattcacagtccagttagtggcctgaaaagcatccagaaggccatcgctcatatactgcaatcagtttttgagccccaccccaacgccactggatttgtgaccgataaaagcgtagtggacaacgctaagccacacaccggcaaaaacttcgtattcaatactgacctcaaggacttctttccctctatcgacaagcccaggttttggaaacggctgcagtatccaccatttaatcttaatcgcaataacggacggctggaactggcaaaccgcatctctgccatctgcttcactgaccttgaggtcgagcgtaaagttgagggacattggaaaaagcaagtgaaggacgtcctcccgcagggtgctcctacctctcctattattactaacatcatctgttaccgcctcgacgtgaaattaacgtccctggctgaacagtttggctgcgcctatacacggtacgcagacgatatcacgtttagttccaaccacaacatctacaataaggatggcgaattcagagcctccctcaagaaactgatcaaggaggagaatttccatgtcaagcaccagaaaacaagactgaataccaagaccgaaaggcaagaggtgacagggctgacagtcaatgagaaggtcaatgtaaacagacggtacataaagcagctgagacattggatatacttctgggaacagtatgggaaagagaaagccgaagaactaattctgaacaactacaaggcagataaggggcacgtgaaaaatggagagcccgatatcgagaatgtgattgatgggaagttacgatatttgaaaatggtcaaaggtgcaaacgatcattcctatcgcaagttgcagcacaggtttgaagtgcttaccggtatatcgattaacttcaatcctgatcgtttgttcgaagtctgggacagcgacggcattgtggccgcgatggagtattattacggctga

SEQ ID NO: 7434 - RNA, 1365 nt, synthetic construct
  source 1..1365: mol_type = other RNA
atgcaattcagcgcagagcatataactcacattaggcaggaatttgccacaatggccaccaaagaagagttcgtcgctcttctgaactacgccaaagagatcctgattggtgacaaataccaaccctttgagttgaagcagattacctattacgccaatgctaaggtttcaggagtgaggtacaagaagtttgaaatcaagaaaaagagcggcggcgtaagggtcattcatagtccaatcaaaggtctgtctattatacaaaggtgcttaaacgctatcctgcagtgtgtttttactcctcacgatgctgctaagggattcgtgctgggacgctccatagtagacaatgccaagaagcacgtggggaggaactatgtctataacattgacctcaaggattttttccccagcgtggaccaggcacgggtgtggaagtgcctgcagttgccaccctttaatctggtcgattcagagaagtcccagatagtaacgcgcaagacaatcaagagtgaagttttggccttgatgaaagcgaatgggctgggagaagatcgacaaaccctgaatcgggcactcgataaagtgtccccacagatcaataaggggcgaatccatctggcccacattatagcctctctaagctgcactgagatgatcgtggagcgctgtatcgacggtgagtggcaggaagttaagaagaatgtactaccccagggcgctgctaccagtcctatactcaccaaccttgtgtgccagcgcctggattatcttctgactggcgtggcaaagcgtttcgggttacgatacacaagatatgctgatgacattaccttttcttctcagcacaacatttttaaggaggacggcgaatttatcaaagagcttcggagaatcatcgccgaacagggcttccatatcaaagaatcgaaggtgcgtctgcagcaggcagcattccgccaagaggtcacgggtcttatcgttaacaagactgtcaacgtgaatcagaactacattaaacagctcagaatgtggttgtataactgggaacggtacgggtacgacagagcgtataactatttcctgcctagctacttcgccagcaaaacaacacctgtcaaaggcaaaccggatatggcgaatgttattggcggaaagctcaactacctcaaaatggtgaaaggcgagaataatgaaatgtatctcaagcttaaggagagatttgacttcctgatctccaactgtttaccaatccggtcaatcctcgacatttgggagcacgagggaattgagaaagccatggggtcattctacaatgtgaaagcagatcaacaggtgctgtccatcattaaaggggacctactgtga

SEQ ID NO: 7435 - RNA, 1206 nt, synthetic construct
  source 1..1206: mol_type = other RNA
atgaagatagagaagaagcacattaactacattagaaacgcatttgagaagatgcaaagctctaatgatttcctcaagctcttgaactacacaaaaccattagtctatggtgaaaactatgtgcctttcgaactgaagcagatcgtattttactcaaatccaaagaacacctccaaagcctacacggaatttcagatcaagaagaagagtggcggtatccggaccataaatgcgcccgataatcacttgaagattattcagaaggttctggcattcatccttcaatgtattttccagcctcatgaggctgcaaaggggtttgttaagggaaaaagcatcattgacaacgctcgggaacacacaggaaagaactacgtttacaacatcgatttcaaagacttcttctctagcatagataaggcccgtatcaaggggagtctcaagaatgagcccttcaatctgaataacaagcaggctctggctaatatcatctccgaaatctgttgcacggagatggacgtggagcataaaaatgagaagggcaactggattcggataaaaagtaacgttctaccccagggcgcccccacttcacctatcttttccaacattatttgcaaggaggtggatgtgaaactgaccggcgtggcgaagcggtttaatctcaagtataccagatatgccgacgacattactttctcttccatgcacaacatttatcaggaaaacggcgattttttgaaggagcttaacagggtcatcaaagtggagtcatttcatatcaaagagtcgaaaaccaggctgaaaaaaactggatacagacaagaggtcactggcttagtggtaaatgattcagtgaacgtccgaaagaggtatgtaaaacagataaggatgtggctatactattgggagaaatacgggtataataaggcaaaaacaatctttctccgcgactacatcaaagacaaaggactgctgaagagtatgaaaccgaacttcaaaaatgtgctttctggtaagttggaataccttaaaatggtcaaaggggccagcaacagcacatatattagcttaaatctgcgcttcgaaaaactctccaataagaacaaccacatagacagagtgctggaagagtgggaacgcaatgggatcaataaagccatcctggagtactatcgaaagccacaacagctgtttattcagtga

SEQ ID NO: 7436 - RNA, 1443 nt, synthetic construct
  source 1..1443: mol_type = other RNA
atgaagattgagaaagagcatatcaagtacatccaggatgagtttgccacaatgcagtcacgggaagatttcctcgatctgctgaactatgcgaagcccttgatttacggggataactatatcccatttgagctcaaacagataacttattatgctaacccgaaaagaagtagaaaggcctacaaggaatttcaaatcaaaaagaagagcggtggcgtgagaacaatttacgcgcccgaaaacggcttaaagaccattcagaagaccatcgccctcatcctgcagtgtgtgtttgagccccatgaagctgcaaagggattcgtgatgggaaaatccatagtcgacaatgccaaggaccacgtcgggaaaaactatgtttacaacatcgacctcaaagactttttcccatcgatcgaccaggctcgggtatgggcctgcttaaagctggccccttttaacctgatcgatcagaagacaagtaaggagttcgatttcaaaaagcttgaaacgggaattcgccgctttacaaccgaatttgacgaggagattttctaccaactgaagggagggacttttctgcttgtgaacgacaaaaaaggcaattataaggcataccaaaagaggctgaaaaaattggataaggatgttttcaaggacgccgccaaatacattaccactgatgcaaatctcaaagaactggagaagcttacagtgcatagggagaaactggcaaatatgattgctagcctctcttgcacgaaaatgcaggttgagaggaaggacgagaacgggtcctgggtgaaggtcataaggaacgtgctgcctcagggtgcccctacaagcccagtgtttagcaacataatctgtcaacgactggataagaaactatccggtgtcgccaagcgcttccacttgaattatacccgctacgctgacgatatcacgttttcttcaatgcacaacgtctatcaagaaaacggcaagtttctgaaagagttgacaaaagtgattaagggacagaatttcgacatcaaggaatcaaagactcgacttcagaaaactggctatcgtcaggaagtgaccggcctaatcgttaacgacaaggtgaatgttcggaagcggtatgtgaaacaggtaagaatgtggctctactactgggaaaagtacggctacaacaaggcggagagtatcttcctgaaagattacttcattgacaaaggtcacgtaaagaatgcaaaacccaatttcggcaatgtcctgtctgggaaattggagtatctgaagatggtcaaaggcttcgaaaacaccacttacctgtctctaaataagaggttcgaaaagttacttggggtgatagatcctatcgagcgtattctcaatgagtgggagaataatggaattgactccgctatgaaaatctataaaaccgacatacacgagtga

SEQ ID NO: 7437 - RNA, 2259 nt, synthetic construct
  source 1..2259: mol_type = other RNA
atgcaactggagcaggagcaggttgaaattattaggaccatgttccagcaaatcaagagtaaaaacgacctcctgaagttgataaacttcgcgaagaagctgctgttcggcgaagctgctcacgctgtgcccttaaagaccttaacatactacggaaacgcaaatctcgcaagcgacgcatatcggaccttttcaatcaggaagaaatctggcggaaaaaggccgattcatgctccggtcaaggggctcaagcctatacagaaggcccttaacctgatcctgcagtgtctgtttaccccacatcatgcggctaatgggttcgtgcccgaacgttcaatagtggataacgctaaggtccaccagggggcccactatgtgtacaacatagatctgaaggacttctttcccagcatcgatttgtctagagtcgccgcatgtctgcgcctgcctccttttaacctgatcgacactgccgaggaaccgctggcctttctggtggccaatttgtgctgcactcccatccttgtcgaacggcaaaatgagtccggcgagtggatcaacaagatactgaacgttcttccacagggcgcgcctacgtcccctacaatcacgaatatcgtggcccagagactcgacaaacgcttaacaggtctggcccggcgctttggagctaatttttctcggtatgccgatgacatcacattctcttccatgcacaatatttacaaacaggacgaggcattcaccattgaattgactagaatcatagagtcacaggggttctatatcaatccaagtaagacaagactgcaaaaaacagggttccgacaagaggttaccggcctcgttgtcaacgagaaggtgaatgtgcaccgccgatatgttaaacaaattcgtcactggctatacctttgggagcggtatggctacgctcaggctgaacaaatcttcaaaagggaatatgtgaaagacaagggatacgcaaagaaaggcaatcccaaacttgaaaatgtgcttgagggaaagttgctctttatgaagatggtaaagggcggagaggacggtacttttttaggactgtggcgccgcttcgatcatttgctaattgaactcaacgaggtgcgagataatacgtcaatccctgaggaggcattcaccgaaaaagagcagctgactagaacgatcaagatatcgctgctaccaatcgatgacggcaagttcattcagactctgcagcacgacaaattgatccccatgggtgtcgccctcccatacgaggagacatttgaaaacaacatcgaagagacttacgaaaagccatccctccagcacaatcccattaacacaatgaacttcctcaagaatttcaagtacgacaatgcaagtggctttaaagaattggtccatgcaccctttgacgtggacaacttcgatttcgaaaagattctggacaccgtaaagaatcacccaaactttattctcacctttaagaacaccagagccgaaaaatttaccggggagctgcccctgggcctttggaagaaggccaaagagctgattaatcatctcagcacagaggggctcgacctgttcaaactaactaaacagcaccctatagagagcgagaaattcctcacagaaatccaggacttcaagaagaactataggtttagttcagatgataccgagtcctcgatcctgaagaagctgattattcatgtggccaaaaaagctgagcacaagaacagcgataagaacattgtattttccttcgggaatacagatcagagtggtcagtttagtgatgaccaacttgtcttcctccctgatgagcgaatattcggtcttagatccggattttttacctgggtcccaaacgtgaggaataccctagcctggattttcaaagggattttgcagcatagcaatgttaacggttcccggacgtttgagaaaaaaagcaagaagattgttgtggagatcaataggtttagggataaagacattggactgactaaagtacagctgaccatctctgatgaattcagcgtgttgaaaaagtctccagatcagttcctggaggacctgttaaatagcgagccttgcaaacactatctccggaatatcgcggattgggccatcgaatgcgactgtgataacggcgaatcatacctgtttcagattttacccaagaacgactataaacgtcttgaaagaaaagtgaactctttcaagcatatcatcactttctacgactga

SEQ ID NO: 7438 - RNA, 1257 nt, synthetic construct
  source 1..1257: mol_type = other RNA
atgcagatcaatcaggaacacattgacactatcaaagcacgctttcaacagatgaagacaaaagaggagcttttggaactcgttaacttcgcaaaaacgctggtgtatggcgagaaggccaaacctgtgcccctccgaactttaacctattatgggaacatccaggtcgcgggtagcgcctacaaggagttcagtatccgcaaaaaatcagggggagtgcggaagatccatagtccagttaaaggcttgaagcccatccagaaagctttaaacctgatcctgcagtgtgtcttcacacctcatcaagcagcgaccggattcgtgccagagaaatccattgtggacaatgctcgagtgcatcggggcatgaactacgtgtataacattgatctcaaggatttctttccgtctgttgatatgaacagggtcaaggcctgtttgcgtctgccccccttcaatgtaatatatacggatgaggctcctctggcctttctgattgccaacttgtgctgcacaccaatcgaggtggaacgcaagaacgataagggggaatgggagaaaaaggttatgaatgtcctgccacagggggctcctacctcaccgacagttactaatatcatttgccaaagactagaccgaaagctgaccgggctcgccagaaaatacggagcacagtacacaagatacgccgacgatataaccttcagcagcatgcacaacatctacgaagagtcctctgaatttataaagctgaatgagggctataggaatttcatccgggacatggtcaaaattattgagggccagcggttttctattaatcccaagaagactaggttgcagaagtccgcctacagacaggaggtgaccggactggtagtaaacgaaaaagtgaacgtgcggaggcggtacgtaaagcaaatacgcagatggctatatttatgggaaaggtacggatatgtccaggctgaggctattttcaggaacgactacagagcagataagggtcacgtgaagaagggagaaccttctctccaaaatgtgcttgatggcaagcttctgtttctcaaaatggtgaaaggtggcggcgacggtacttttagcaagcttctcgaacgttttacaaaactgaccgattcactggaacaggtccgctcggagaatgtcgacctagattccgtgctggacgttctgctgaacaaggggcttgacgacgccatgaatctgttcgacaagtttaaaagtctcggccagtga

SEQ ID NO: 7439 - RNA, 1290 nt, synthetic construct
  source 1..1290: mol_type = other RNA
atgaaaattgagcagagtcacattctggaggtgcgcagcgtgtttgaaaagatgcattctagggaggattttctgaacctactgaatcaggtgaagcctttggtttatggagtgaagacagttcctatcgaattaaagcaactcacctggtacgccaaccccaatctcggtgggaaacgctatagtgacttctccatcaaaaagaagtctggggctgacaggttaatacacgcacccgttagcggaatgaaaagcatacagaaagccctctccttcatcttacagtgcgtgttcgaaccacacaaggccgcaaccggctttgtcatcgggagatccatagtcgacaatgcacgcatccatcagggctgtaactatgtgttcaacattgaccttaaagatttcttcccctccatcaatcagtcacgagtttgggcctgtctgcaaatggagccttttaacctgaacgagaaaaagagtatagcccctaccgaatcggcagacaagtactttatggtgcggtcccgtaccattgccggacgtaaacagattgccaacatgatcgccgccatttgttgcacagagatgactgtagagcggcaggacgaaaaaggggagtgggtgcaggtgaaacagaacgtgctgccgcaaggcgcgccaacatctccagtaattactaacatcgtctgcaaaaagctggatcacaggctaaccggtgtcgctaataggtttggccttagatattcacggtacgctgatgacatcactttctctagcatgcacaatgtgtatcagaaagatggagagtttctcaaggagttgcatagaatcattacggatcaagggttccacataaatgagaaaaagacccggctccaaaagactggccaccggcaggaagttacaggactggtggtgaatgagaaggtaaatgtgcagaaacgctacatcaagcagctgaggatgtggctgtactattgggaacgatatggctacgaaaaggctgagaggatttttctggaacagtacatggatgatagaggccatcttctggacggtggtaagccaaatatgatcaacgttcttgctggaaagctcgactacctgcgcatggtgaaaggcgctgataactcagcatacaagaagatgaaaaagcatttcgacaacctgatcattgaaaaccgaagcaatgtcatcacagaccccttgagagtcaaagaactcgacgatgtcttgaacacgtttttcgagtcagggttcgatgtagcgatgaataagtacagcatgaattga

SEQ ID NO: 7440 - RNA, 1149 nt, synthetic construct
  source 1..1149: mol_type = other RNA
atgaccaatagagaggatctgcttaccctgctgaacctggctaacaagcacctgcactcaaacaaggcgttggatttcgagctgaagcaacttaattggtactctaatccagccataaacaagagacgatacaagacgttcagcatccagaaaaagtctggcgctgaacgcaaaatccacgctcctgtgaaaactttgaagtacatacaacaagcactctgctttgtgttagagtgtgtatttgaaccccataaggcggcctatggatttgtcaagaataagtcgatcgtggacaatgctcagaaccatgtcggtcagatatacgtatacaacatcgacctcaaagattttttcccttccatcgaagccgggcgactgtttagcaggctgcagtatccaccattcagcctgagcgacaaaagggacgttgcaaatgtgataacttggctctgtaccgaaaagctggaggttgaacggttcaataaagaaaacagtacatgggaggccaaagagctaaatgttcttccgcagggagcacctacgtcccccctgattacaaacattatatgctataagctcgactacgttctgtccgccgtggctaaacggtttgggttaaagtattctcggtatgccgatgatattaccttcagttcaatgcacaacgtgtatcagaagaactcagaattccttactgagttgaagagggtcattcaggaccagaatttccatatcaaggagtccaaaacaagactccaaaaagatgggtttagaaaggaggtaacaggcctgctcgtgcacgagagtgccaacgtgcataagcgttacattaagcagctgcggatgtggttgtattattgggagcgttacggctacgagaaggcatacggtttctttctaccccagtatgtgggcgatcgcggtaatgtcaaaaaaggcaatcctaatatggaaaacgtcatcggcggaaagctggaatacctgaaaatggtgaaaggggtggaaaacgagctttatctaaaactcaaagacaggttgtctatcctcattggatacaccgagcccatcaaccagattttagacgtctgggagatcgaggggattgaaaagctgtggaaattcatcattcgcatcaatgaaactaagtga

SEQ ID NO: 7441 - RNA, 2151 nt, synthetic construct
  source 1..2151: mol_type = other RNA
atgaaactcgaagaggctcatatcaagtccatcaagtcatccttcgagaaaatgaaggacaaagaggacctgctacaattactgaatttcgtgaaacccctggtttacggtgaaaaaaccataccctttaagctcaaacagcttacctggtatgccaattcgactttgaagggaagaaggtacaaagagttcaacatcaagaagaagagcggagaacaccgtactattaatagccccgtgagcggccttaaagccattcagcgaatcctgaatttcattctccagtgtgtctacgaaccccataaagctgccatggggtttgtgaatggaaaatcgatcgtcgataatgctcggctccatactggcaatcactatgtgtataacatcgacctaaaggattttttcccctctattgaggccgggcgcatctggagtagatttcagcatcctccattcaacctcaatgatagaacaaataggaaggagctggctaacatcattacttggttatgctgctgcgagatggaggtcgaaagactggatgagaaaaatcagtggcacatcgttaagcgcaatgtactgccgcaaggcgcccctacgtcccctactattagtaacattgtctgtcatcagctcgatttttatttaagcgcggttgccaaaaggttcggcctgaagtactctcgctacgctgacgatattacctactcttcaatgcacaatgtctatcaaaaagggtcagaattcctaagcgaggtgcatcggataatcagtgcacagtcctttcacattaacgtgaataaaacgcggctgcaaaaagcagggtaccgacaagaagttacgggtctgctcgttaatgagaacgttaacctgcagacacgctacataaagcagttgaggatgtggctgtactattgggagcgatatggctatgaacgcgcctctggtttttttctgcagcaatacgtggcagataaaggacatgtgaagaatgggaaacccgatcttgccaatgtgattagtggaaaactagactacctaaagatggtgaaggggtccgagaacgatctgtacctgaagttgaagaataggttcaaccaattgactacaaaaacaatcgaccagatagacctttcaaaggtaaaaaagatctccaagccctcggaacgggaatctataatcgaggagaacattgacatcaacaacaataacagctatcctattctccacaacccgcagaaaaccattactcttctgaagtccttcagtgtgaatgagaaggacctgaagtactcaacccacagctgggaagagggaaagtacaacagttatgaggagtatatcgagaagatcagaatcgaatggaatgaaataaaggacgaacttaagaatcagtccccacggctcttcgcgaagatctccaacttcttgttcaacaacaaactgggccagaagaatgaggagggctactacatttcctggggggaaaaaagactgaaatttggatggtcaagcgcaaacctcaaggaccacatgtctgatccaggtaactcaccgtttagctgtccaattcctgatcagattagggaactggataagaggcatgatttgctgtactttaaagactatgctgacgtgttcaaaaatgaaatagaattccgggaggatagtaacaacttcaagaagatgatccttgaactttgggaaaaggagctcagctatgactttaacattaaaggagtggagcagtttgcaggtttctctttctttacagacgtgcacctggtcaaggaatctcttagaacagtctttagggacatgtacaaagtgaaaccacagtttcctaccataattatcgagaagatcagtagctttaacgagcgagggtaccacctgattaaggtaacccagaaagatagctttatcactcgtgatgtaaacgatccaaagttaacatcacctagcggcaacctcttctctataatccgcaatttaaagaatctctctgactactctatcgtctcccggttccgcgacggcagaaattatcgtctgaactatttgacatccaccaaaaccgacttcatcgagacattgacccaggacgagaacaccctgggcttcagccacgagttcaagttttatctgtga

SEQ ID NO: 7442 - RNA, 2268 nt, synthetic construct
  source 1..2268: mol_type = other RNA
atgattaccgagaaagataaggaatacatcgacatcgcattccacaagatgaggaatagggaggatctgctctccctgctgaattacgccaagactattctgtttggccaagaagccagtcagattgcattgcaccagctgtcgtattacgccaatcccaaagccggcggcaagcggtatcacacgtttcgaatcgcaaagaaaacaggcggttctagaaaaattcatgcccccgtggaggggttgcgggtcatccaacagtgtctcaacctcattctgaaatgtgtgtacaaaacgcagcaacaagcacacggtttcgctcagggtaaatccatcaaaacaaatgccgctatgcatgttggatcctactacgttttcaacattgaccttaaggactttttcccttccatcgatcaggctagggtctggaaagtcttgcagctggaaccgtttaatttactaaaccgggaacccgcagaacaggaagggatagacaattacgaaatcgctaatctaactgccgcactgtgctgcacgagtatgatggtggagcgtatcgacgaggagggagagctgatcaaggtgcgccgaaatgttttaccacagggggccccaacatccccactgttgtcaaacgtgatatgccagcggctcgattttttgttagccggggtcgctaaacgcttcggattaaagtacagcagattcgctgatgacataacattctcatcccttcacaatgtatttcagtctcatagcccatttaccaaggaacttactcggatcatatacgaccagggtttccggatcaatgaacagaaagtccgcctgcaaaggagcgcctatagacaaatggttactggcatagttgtcaacgaaaagaccaacctgactaagaaatatctggtcagtttgcgcaagtggatatatctgtgggaaacatatggattcgcccgtactctggagatctatagacaggagtataaacttgaacagattaagcctctggatatcgacctggtggccatccttcgaggaaagattgcctttctcaaaaatgtgctgggggacacaaatccgagatataagcagtacaagtataggttcgacgcgttgaacgctcccactctcgccgagaatatgccagtgcaaggagatgctagggagatggcaaagaagttagatcggattgacgagctgctgaagtctaataaaattccttccgtggatgccagcatcgaagagttaagagaattcgtgtctcttgtgcatcttcgctctgagattcccctgatagataacccgagtaaagagacgaacttggaggacgacatccacgatcctcgcttcgtagtgagtctcctcagcaagtttaccgaagaaaccaaccttaagtacaccgtacacatgtgggacagcgagaacagatatggcagctttcaggatttctcaagtgcgattttcgcagacatcaggcagtacaaactaaggtccctgccccggtacaatagccgactctactggaagatcatataccccttcattattcaagaacacaccctcaagaagaaatctggcgagccattcgaatatgcttggggccggtataacttgaagcttggctatcactaccccagtaccctcgctcagtggatggactctaacccaaacaaatcgccttttatgatgcccattagcaaggacctgcgtcctgcagagcctatcaaggggcgaagcatctcatacttcgaggatgtggtagacatctttaagcaggccattgagttccgtggaaacgacctctattatctgttcaaagagctgacagggtcgttgctcttcgatttcaatatcgaactgctcaacctgaaaggcatatctttttttaccgatacccatcaggttgagaaagcgctgagaattatcttttcaagcattcgcaagtacaccgagtcacctcagatcagggtgtcaggtacatatatctctgaagctcactactttgatatcgagatcctgcagctaggatccttttgcgataagccaattgatgaccccaagataaccctcaaagggaacaagggcgactttaatactattcgcacactcctgcattctctatgtaactggtccgtcgagagtaggttcagagtgggcgacaagtacaaattctacagactgaactaccttaactcctcagcgagcgatgagatcgaagagatggacgccgcagaggggtttaaacatcgcctgcggttttatatttga

SEQ ID NO: 7443 - RNA, 2220 nt, synthetic construct
  source 1..2220: mol_type = other RNA
atgaaaagccgcgaagacctgcttgatttgatcaactactccaagaaagcgctgtacggtgaagatgtggagcctattacaatttcacagcttacgttttacagtaatccctcagccggcggtaaaagatacagacagttcaacattgcaaaatccagcggtcagtatcgcgctatacatgccccggttcagggattgctcctgatacagaggtgcctgaacctcatactgtcctgtatctacaaaccaacccctcaggcacacggctttacccccggcaggtccgtgaagacaaacgcattcgtgcacgtgggcaactattatgtcttcaacgttgatctcaaggatttttttcctagcatcgaccaggccagaatttggaggatgttacagctaccacccttcaatctagttgccaagaacgactctagaatcagcccaaaaaaccggtacgaactcgctagtatgatctcagccatatgctgtacctcgatgttggtagatcggattgacaggaaggggaacttgacgcgagtggtaagaaatgtcttgccacagggggcacctacaagtccattcttcagtaatatgatttgtcagaggctcgaccagcgcttgatgggagtcgctaaacgtttcgggcttaagtacactagatatgccgacgatatcaccttctcatctctgcataatgtgttccatagccacaatccctttatcgtggagatgcgcagaatcattaccgagcagggattcacagtgaatgaagacaaagtgcgcttacagcggactggataccgacagatggttactgggctcgtagttaatgaaaaggtgaacgtgacacgggaattcataaaatctctgcgcaagagcttatatcttctggaacggtataacgaggagaaggcctcccaggcttacattaaggataataagcttgacgacgtcagcattaacgatattgacatccaggctattgtgacaggaaagatcgcgtacctcaaagatatcctcggaaaaaactcgcccaggtacctgagctataagacccgaatcgaccagctgtacccggggaaagggacaacggtgcccgtggagaaggtggatgccaagacacttgctcgcaatattgaccgggtgaagcacaacctgctgaataatgagctgccgactgaaaatgcaagtttcgaagaactgagagcattcgtgcggcttctaagggacgagaacagcgtctcagccttactcgtcgacaaagccggccaagccgaagaagatgaaatccatgatcctaactttgttgtgagtgtcctcgaaaaattcacttccgagacacatctgaaatacgctacgcactattgggacacccaagacaggtataagaactataatgttttccgcaagtccatcatggaggacgtccggctgtttaagctgaggctcctgcctagatacaattcccacctgtactggaaggtcatccacccattcctaatacgagataagcccgacgagaagaagtctggagagaaattcgagtatcagtggggtcgacataagttgaaggtgggcctgcaatatccaggcatcctggaggagtggatgcaggaaaatcccggaaaatctcctttcagcatgcctatacccaaagagttacggccccctttccgcatttctggtaagtcgctgacctactttgaggacttcgttgatgagtttaaaaacgaaatcgagtttcggcgtaatgatcttcactatctgatcaaggacattacctcctccatggaatttgattttgatatctcaatcaccaacctcaaaggcctgagcttttatactgatacttaccaagtagagcaagccctgcgcattatctttaacgctattcgtaagtaccctggcgcgccaaagatcattgtcaatggctcttatgacaccgaggcgaagtttatcgacatagacatattgcacattgactccttttgcgatagaccattaaatgataggaagctccagctaatggacaaacgaggggactttttcactatcaggaaactcctgaacagtctctgcgattggtctattcaatcaagatttcgggtaggtaacgagtatacttcttacaccatccactacctgaatagcacaggcgcccaaaacccggagaaatctgcagatgctctggggttccttcataaattgcgtttttacctgtga

SEQ ID NO: 7444 - RNA, 2286 nt, synthetic construct
  source 1..2286: mol_type = other RNA
atgaagattgagaaagaccaaaaggactacgttgttaaagcttttcactcaatgcgcgatagggacgatttcgtcaaactgctcaactatgcaaagaagattatttacggggaaaaaaccgtattctttgacctgcgacaactcacctattactctaacccgaatgtgaacttcaaaagatacaagagcttcgagatcgctaagaaaaatggcaagtcccgcaaaattcatgccccagtgaaagggctgctggtgattcagaagtgcctaaacctcattcttaattgcattttccagcctaccgtcttcgccacaggatttgttatgggcaaatccattgttgacaacgctgcattccatgctggtaattactacgtttacaacatagacctcaaggactttttccactctgtagaccaggcacgggtctggaaatgtctgcagctaaagcccatcaacctgagcctgtttcagaatcccgaagacaacaaatataactcctccctagaaatcgtcaacatcatctcagctctgacttgtaccgagctccttgtcacgaggacagaccgaaatggcaaggagatcgaggtgaataagaatgtgctccctcagggagccccaacctctcccctgattaccaacctggtatgccagaaactggactatctgttaagcgccactgcaaaacggtttggcctcaagtactctaggtacgcggatgatatcactttttctagcttgcacaatgtatatcagcagaatagtgatttcttgatcgaactgaatagaatcatcaaagaccagggtttcgtcattaacgaagaaaaagtgagactgcagaaggacggattcaagcaaatggtaacgggattggtagtgaataagcatcctaacgtgtccaagtcgttcatcaataacattaaaatcgacctgtactactgggagcattatggctacgtgaaagccacgaaattctttctgagacgatataagcacactaaggaaagcactaaaaaggtgaacgtggatatgagcaatgtgatttgcggacgcctccagtatttaaagatgattaagggagccaacaacaaaacctatacctccctggccctcaaataccaaaagctgcttgcgaagaaacagaagagtgagctgaatcccgaggacgtgcactttaaatcagtcgagtcatcgggctatgacctgacagaaaacggcctgattaatccagacctaaagacatttatggtcagtattctgaactctgaccaaatagcactggccgagaaacaggagatcttcgcaaacgttaatctggagttatctcggttggtgaacaatgataatacagggaagaactcgcttgggtcttcctccagtataaactctagtagcgtcaccacagacgggtggaaatccgaacattcacctaaggatgtggcccgtttcatgagtttgtttaataagcgggatggattgaagtaccttactcacgacttcgacgaggagggtaagttcgaaatctcctttttcctggagaaatggaggtccatctttgaacagagcttacgggggaagaatggctttgaaatcccatcttccctttatcgcatagtgaatgagttcgctttttcaggcaaacctaattggacgagcgtcaacgatagattagtgaatgaaggatggagcaccgacaagtggataaagtggagctccaagaatatgctgcacccctttagaaacactgggttgaaagtgatcattgaagactttaggagactcatcagggttgagtcaccaaatctggagttcttagtgaacgaagcttttagcgatgctctcatcgatgagaacaataagtacagcttgaaactcgatcaagtctcaaaagccgatttttatacacacatccctagcttgaaacgcgcgctgtttgcaatcttcagtgccatgggtaagtatggtggggatcgcgatatatctgtgtcttaccagcggtcaacagaggatgatttcttcgtgcgtaagctcattatcagtcagacaaacagctatcccaccaaagagctagagcagatccttatcgagtggaacactgacaagggagccatgggcggtataaagcataatctttacgggtactgtgattggagtatagagactaagattgataacacaccgtacaggataaacattcttaaggacaaaaagaccccaaaattcgatgttattggcatggaagaaatcataggcttcaagcacatcctcaagttttactatatctga

SEQ ID NO: 7445 - RNA, 2298 nt, synthetic construct
  source 1..2298: mol_type = other RNA
attcagcggatgaagcaacaggcttccaagaacatctacatcatgaagctcaccaagaatcagtgtgaatacattgttaagcgtttccgtgaaatgcgaacaagagaggactttttgcacctagccaattatgcaaagaagattatctatggcgagaaggcatatgatttcaagctgaaccagctgacctattactcaaatccccgcgtcaatcccaacaggtatagaacgttcactgtcaaaaagaaatccgggggcgtgcgcatgatacatgccccaactaaggggctcatggagattcagaaaagcctcaacctgattttgaattgcgtgttcaacgcccactcatctgcctttggctttgttccgggcaagtcaattagggacaacgccgccgtgcatgctggaaattactatgtgtacaacattgacctgaaggactttttttttagtatcgaccaggctcgagtgtggaaatgttttcagctggcacccttcctgttagggaagaaaacagatacccttaacgacgagaaaggtaaaaacctggaggtggtcaatatgatcagcgctctctgttgcgctgagatcgagactggtatgcagcaaaccgacggcactttaaacatcgtgaagaagaacgtggtacctcagggggcaccaaccagcccaatagtcaccaatatcgtgtgccagcgtctagattttctgctcgcagcggcagcaaaacggttcggcctcaaatactctagatacgctgatgacattaccttctccagcctgcataatgtgtaccaaaccgactctgatttcatcgctgaaataaaacgggttattaaggagcagggctttcagattaactctagtaaaacacggcttcaaaagatggacgaaagacaaactgtgacgggcctggtggttaataaaaatgtgaatgtgcctcgcaactatattaaaaaaatgcggagctggctctacctgtgggaacgatacggctatgagaagacgtattcattctttctgaacgattacatacgggataaaggacacctaaagaagcggactcctgatatggcaaatgtcttaagaggaaaactcgagttcctaaagattgttaaaggtactgatgataaggtttaccagcagctgaataacagatatactgtcctcatcgctaggaacagaaaggactcacttaatgaccgcctgttaaactattgggaattgcacgggttgcacgctgcttgggaacacttcaaggcggagacagggattatgaccattgacaaattccttgacaaactgcttaaggagacagtaacggatgacgagagaaagaacaaactgttgaagcttatccagtccagcttaaacacctccagccttctgaccaagtcaacatccaaattcaccattcccgacaatgagaagctcaatatgccaaagcgagtcgccgactttatgagtttgtttgatgatcccgccgggctgaaatatctaacacacgatttcgacgagagtgaccagatatttgacatcgaaagcttcctgccccaaaccaggaaggtcttcgaagataaaaccaaaccgggcaatctgacgatcccctcgtcgctgtggaagatcgtgtacgagttcgccttcagcgaaacaccagattggaataagggttgcaaagacgggtggtctttacctgataggataaaatggtccatcgatagtaaaaagcatctgaaacggaatgaaggatttgctgcgacaatcgaaagttttcgcaagctcactcgcatcgaggcccctgaactcaagaggctgattaaccagatcgtaaaagaaaagcttggagacaaataccctgagtgtacaattaagctgaaagactgcgaaaaggcagacttttacacacatgtcgcctacttctctgaagccataaagctgctgcttgatggattcaataaaaggatcggagagtgtaaggaaatagccattacctacacccggaaaaacgatgacccttataggttgaggatcattactctcgaacatgtaggatcctttccaatgaagcccctggacgatttcttccgcgacttgggcaacggtaagggagagctggcggatgcccgaaacaagttgacaggctattgcgattgggccatcgagactatctgggactctaaactcgtgagaatcactctgcttggggccggcaatgagatcgagtacctcccaaacacaaaagaggtgtccaaccgcataaccggttttacccacatcctgacattttatcagaagtga

SEQ ID NO: 7446 - RNA, 1386 nt, synthetic construct
  source 1..1386: mol_type = other RNA
atgaagcccacaaaagagcagattgattctatcaagaccaagttttccgcaatgcagactactgaagacctcctcgatctgttaaacttctcgaagtccattatctacggtgagaaggttatccccttcaaacttaaggacatcacgttttattgcaatccgaaacgaaccattgatcacaagtggaagttctttcatcagtatcaagagttcactattgcaaaaaagtctggagggacaagaacaatatatgctcccaaaaagggccttaaagccgtccaaagatcaattgcgtttgtattccagtgtatattcgaaccccacaaaagcaccatgggcttcacgaaggagcggtccatcgtccacaatgcccagctccacattaactcatattacgtgctgaatatcgacttgaaggattttttccctagtgtggaccaggcccgcgtttggaagtgtctgcagcaagcaccctttaatctgaaccaagcaacctcaaaagtgttcgagacatttgccatagacgaatttaagatcaagtatccagagcagtctaaaaagatccatccgaacaagaagtttgtgattagcgatatcgatagcaattacttcaaggctaccaatcgaattcctaaagcagctagattggagctggccaacatgctggcggccatttgttgcaccgagatggaagttgagagtatactggctgacggctccgtggagaaaattaagaaaaatgttctgccacagggagcccctacctctccaatcctttcaaacgtggtgtgccagaaattagatctcagactggcaggggtagccaagaggttcgggctgttgtactctcgctacgcggacgacataactttcagcagcctccataatgtgtttcaggtagacagtgagttcaagaaagaactgtaccgtatcattctcgatcaaggatttaggatcaacgagaaaaaaactcggctgcagaaggacggatacaagaaagaggttaccgggctgcttgtgcacggtcaggtcaatgtccagaaaagctttatcaaggatttaaggatgtggctgaacctatgggaaaggtatggttacgaaaaggccaataacatcttcttgaacgagaatggacctctgctgaatacgactgccaaaatcaagaaagctgaactacgtaacacacttgaaggcaagcttaattatctctccatggtcaaaggcctcaacaacattacctacgtgaaattgaacaaccggtttcggactctgaaaccaacaattaagatccatacagaagaccgcagtgcccacatcgaaaagaccctggagttgctactcaataacggcataaatgatgctatggctttctaccagcctcaatga

SEQ ID NO: 7447 - RNA, 1209 nt, synthetic construct
  source 1..1209: mol_type = other RNA
atggatacgaaggaaatcacgatagagcagaagaagaaaattgtggaattctttggggtcgtgaacacttctttcgggttttgtgtgctgctcaattactgtcagcggatcctctatcctaaaaccgtatatcagatttctcagtttgagctgaggaccttagcccaccctgatagtaagaaacgttacaagacttttaccatacggaagaagaatggcgggactcgaactattcatgcgcccaagcccgaactaaagatggtccttcgctgcatcaatctgatcctgcaatgtgtatacacagtccatgaaaatgccaatggctttgttgagggcaagagtgttgtggataatgcaaagctccactgcaataacaactacatcttcaacatcgacctgaaggattttttcccttcgattgaaatcggacgagtgcttaatcgcttatcctacccaccattcaatttcaaaaaagagaaaggaaccgaggaaattggaaattacatcgcttggctggcttgcgagaacactcttgtagaaagagagctcgacgggaacattatcaaaacggtgaagagagtactgccgcaaggctccccaacctctcccatactgtctaatattatctgcgagaggctggacagacggcttacaggtctagccaaccggttcggcttgcgctattcacgctacgctgacgatgtcacatttagttctatgcataacgtctaccagaaggacggtgaattccgtaaagagatggaaaggatcattagcgagcagtacttcacaatcaaccagtcaaaggttagactgcagaagtccatcatgaggcaggaagtgacaggtataactgttaacaaacaagtgaacgtcagccagaagtatatcaaacagctgagaatgtggctttactattgggagagctatgggaccgtcaaaggattgtccttgttcctgcaatcctacattaaggataagtcacacgtgaaaaaagtggtgcctacccccgaatttatggaagccgttatcggcggcaaactcaactatttgagtatggttaagggaacagagaacagcacctatctcaagctgaaagagaggtttgacaagttaagctccaattacgtggacattgataatattctcagcgtgtgggaggagaacggtattgacgaggcaataaacctgtattcaaaaacagtgtga

SEQ ID NO: 7448 - RNA, 1209 nt, synthetic construct
  source 1..1209: mol_type = other RNA
atggtcacgaaagagattactatcgagcagaagaaaatcattagtgacacctttcggtgggtgaaaaatgtcagcgacttttgtttagtgctcaactactgccaatcgatcgtgtatccccaaacttacttcgacatctccgaatacctcctgaaaacactggcccatcctaactcaaagaataggtataagaccttcaagatcaaaaagaagaacggaggtacacgaacaatccactcccctaagcctgagctgaaaatacttctgaggtgtattaaccttatcttgcaatgcacttacaccgtgcaccagaatgcgtacggctttgtagaaggtaagtctgttgttgataacgctaaactccattgtaacaacaactatgtgttcaacattgatctgaaagatttctttccaagcattgaaattgggcgtgttttaaatcgcctctcctttccaccctttaatctgaaaaaggagaatgggaatgagaaaataggaaactacatcgcatggctggcatgcgaaaatatcctggtggagagagaactcaatggaaagattattaagaccgtcaagcgagtgctgccccagggcagtccgatcagtcctatcttgacaaatattatctgcgagcgccttgaccgtcgccttacaggcctggccaatagatttggcgtgcgctactctcggtacgccgacgatattacattctcttccatgcacaacgtatatcagaaggatggggagttcagaaaagagatggagaggataatatcagagcagtatttcaccatcaatcagagtaaagtacggttgcaaaaatcaaccgtcaggcaggaggttactggaataacagtgaacaaacaggtgaacgtctcccagaagtatataaagcagctgagaatgtggctctacttctgtgaaacttatgggaccaataagggcttgagcctattccttaagtcatacatcaaggacaagactcatgtgaagaaagcaattcccaccccagagtttatggaggccgtaatcgtcggtaaattgaactatctatctatggttaagggcgtggaaaactctacctatttaaagctgaaggaacggttcgacaatctgagcagcacgtacgtggatgtggaaaacattctggctgtttgggaagagaatgggattgacgaagctatggatctctacagcaaaatcgtctga

SEQ ID NO: 7449 - RNA, 1254 nt, synthetic construct
  source 1..1254: mol_type = other RNA
atggtgaaaaatatatctatagagcaagccgagttcatcaagaagttcttcaagagcatgaaagacctccgtgacttttgcatgctgatcgacatttgtcaggacatcctgtacccagagttcaaagaccggactcgcattgatgagtatgttatcaaaacactggctcacccaaaaagcaagaatcgctaccatagttttgagataaagaagaagaacggaggcatgagaaccattcacgctcctcagccggagcttaaggtggtactccagtgcataaacttaatgtttcagaccgtcttcacaccccattccgcggcgtatggttttgtcaaggatgccagcgtggtagataacgccaacttacactgtgggaataactacgtgttcaatatcgacctgaaggactttttcccttcgatcgaaattggcagggtgctgaataggctgtccttccctccctttaactttaataaagagaacgggcgcgaggaactgggcaattatattgcctggttggcttgtgagaacacgatcgttgagcgactcgttgatggtaagatccaaaaggcagagaagagagtcctcccacaggggagccctttgtcacccatcttgaccaatattatttgcgaacgattagaccgtcggctgacaggccttgccaaaaggtttggcgtcaagtactctcgctatgcagatgatatcacgttcagctcaatgcagaacgtgtatcaggaggaaggggcattcagaaaagagctaggccggattgtgtcagaccagtatttcatcattaatcaggataaagtgcggttgcaaaaatccggaactcggcaggaagtgactggcattactgtcaacgagttctctaatgtaacacgcacctacgtgaaaagaatcaggctgtggctctctttctgggaaaagtttggtgcagaaaaagcctttaatctttttctcaacggatacatcaaggataaggggcatgtgaagaatctgggaaaaaccagtttctttatggaaaacgtcatcgagggaaaactgaattacctgaaaatggtcaaaggggagaacaattccacctacctcggcctgaaggaaagattcgaaaagctttccctgaggaacaagtcagttgatcagctactggatacctgggaaaagaacggaattgacgaagccatgagtaaattttatgccgatcccagcccacgagtggacaaggttgctgaccaaatagctttgctttga

SEQ ID NO: 7450 - RNA, 1206 nt, synthetic construct
  source 1..1206: mol_type = other RNA
atggaggtcaaggacattagcgccgaagagaagagtttaattgcaagattcttccgtatctgtgacagcgagaaaatgttctgccacttattgacctactgtcagcgcttgttgtaccaacagaagattgtcaatatcatcccccaaacactgaaagcactgtcccacccaaattcctctagacgcttcaagacctttgagatcagcaagaagaatggagggaagcgaacgatacatgctccaaaggcagatcttaaagtcgtgctgaaatgcctaaatctcattatgcatagtctgtatgagccccataatgccgcctatggcttcgtgcatgggaaatccgttgtggataacgccaaactgcactctaattccctctatgtctttaacctggacctgaaggattttttccccagcattgaaatcggaagaatcctcaatcggctgaaccatcccccttttaatctgaaaggcgagggcaaagacaagatagccctttacattgcatggctgagctgcgagaacatgatagtggaacgagagatagagggtaaactgcagaagaccgtacggagggtcctcccacaggggtcacctgtatcccctatttttacaaacatcatttgtgagcgactggactacctgttgagtgcagtggcgaagaggtttggagctgtgtattccaggtacgccgatgacatcaccttctcgtcgaatcacaacatatatcagaaggatggcgctttcagacaggaagttgagcgcattatcgctgatcaacactttcagatcaaccggtcaaaagtgcggttacaaaagtctaacgtccgtcaggaagttactggcatcactgtaaacaaggagccaaacgtggcccggagatatattaaacagatccgcatgtggttgtacttttgggagacttacggtaccgacaaagccttcagccttttcctgaagtcataccttaaagggaagggccacgtgaaggtgccgggaaacacgcctctatttatggaagctgttatcaggggtaaacttgactatctcaagatggttaaaggagaaagcaattctacctactctcagctcctgtcaaggtttgagaaggtgtctagtactccgaaccacattgaccacatcctcgatgtgtgggaaaatgatgggatcgaaacagcgattataaagttcgaaacagacggctga

SEQ ID NO: 7451 - RNA, 1104 nt, synthetic construct
  source 1..1104: mol_type = other RNA
atgtaccccttcgaactggtgaagatcgacgagtataaagtgagaaccctggcccagcaaaactccgttctgcgatacaagacttttgagatcaagaagaagaacggtggggtccggcacattcatgcgcctaagtccgagttgaaagtgctacttaagtgcatcaatctcattttccactgcatatatactccgcacgactctgcttacggattcgtcgacggccggtccgttgtcgataacgccaggcttcattgtagaaacaactacgtattcaatcttgacctgaaggatttctttcccagcatagaaattgggcgaatcctcaaacgcttcaattttcccccattcaatttaaacaaggaaaacggccgccaagaaatcggaaattatattgcatggctgtgttgcgagaatatgatggtcgaaagggagttaatgggcgagacaaaaaaagtgtttaagagagtgctgcctcagggcagcccagtgtctcccatcttgaccaacattatttgtgagaggctcgattacaagctgagcgcagttgctaaaaagttcggaatcaaatatacgcgttacgccgacgatatcactttctcaagtatgcacaacgtctaccataaagaaggcgattttcgcaaagaggtcgaaagaatcatcaaagagcagtacttcgtgatcaaccagtcgaaagttaggttgcagaaaaccaatgtgcggcaggaggtgactgggatcacagtaaattctgagacaaacgtgccaaggcggtatgttaagcagattcgtatgtggctctattactgggaaaactacggtgactccaaggcattgtctctgttcctgcagagctatatgaaggacaagagtcacattaaaaaggccgtacctacccttggttttatgacagccgtgataggaggaaaactcaattatctgtcaatggtgaaaagcgaagggaatagtacgtatctaaaactgaaagatcgctttgagataatagctgagaagcaaatcaagatttcaggcatttccgaaaataccaatgacgagaagctcaagaagtttgtctcaagcagttttaactacgattttctgtga

SEQ ID NO: 7452 - RNA, 1200 nt, synthetic construct
  source 1..1200: mol_type = other RNA
atgaacaagtacatttcatcagaggataaagtgaagatcaaagagaagtttgagaaaatgagcgatctgaaagagttctgtaacttgttgaaccattgttatagcatcctgttcagtgatgagagcaactttatagatgaagagaagctgaaacgttttgcaaatcagaatagtcaaaaccggtatcactactttgagattaagaagaaggacggctctacccggattatccatgccccaagctctgagctgaaggttctcctcaagtgccttaatctgatcttccatagcatctttatacctcaccatgcctcctacggttttatatacgggcgctctattctcgacaatgcgaagatccactgcaaaaacaattacgtctttaaccttgacctgcaggacttcttttcttccatagagattggacgaatcctcaagagattcaattatccacccttctcactaaataaagacaacggccgagaaattattggtaattatatcgggtggatcgcctgcgaggaaattgatctagaggaagaagtgaacggcaaactgctcaagattaagaaaaaggtgcttccccagggctctcccttatcaccgattctgaccaacatcatctgtgagcgcctggattataaactgaccggcgtggctaaaaggttcaacgtaacttattcgcgttatgccgatgacattacgttttccagtatgcacaacgtctatcaggagaaatcgattttccggaatgaggtggaaaagatcataggggaacaatactttcgcatcaaggaaaaaaagaccaggctgcagaaacggaatgtgagacagaaagtcacaggtatagttgtgaacgaaaaggttaacgtaactaagaactacatcaaactgatcagattatggttgagcatgtgggagaaatatggcgcagaaaaggcttaccaccttttcattaactcctacataaaagagaaggggttcactaagtatatcggatctacacctgtgttcatggagaatgtcatcgacggaaagctcaattacctcaagatgattaagggagagagtaatagcacataccagtccctgagggaaagatttaataggctgtccatcaagaatgctaaaatgaacaagatcttggacttatgggaattcgagtccatcgaaaaagcaattgaatattactaccgctga

SEQ ID NO: 7453 - RNA, 1242 nt, synthetic construct
  source 1..1242: mol_type = other RNA
atgaaaattaaacagtctcacatcgagcacattcggaaacaattcacagagctgcagagcaaggacgatttggtcaatctactgtccgacgcaaaaaacatactgtggggggaggaatcaactcccgtacagttaaagtcactgacatactacgcgaaccctgccctgtgcaaaaagcgctaccgaacattcacaatcaagaaaaagagcggtgctgacagaataattcacgcccccgtgaaaggtctgaagtcaattctgcgctccctcaatttcgttttccaatgcatgtacaagcctcacgaggctgccaccggtttcatccccgaaaaaagtatcgtcgataacgccaaaaaacatgtgggccatcactatgttctcaacatggacttgaaagattttttccataccttcgacctgtatagggttaagtatgggctcctgacagaagtctggggaatcaacagtataaagaagttcaaggagcataatgaggagcgatttctggagatcgataagatcgcctttttgattgcttctctgtgtactcacccatttaagatcgatggcgaagagaaaaccgttctcccgcagggatcgcccacatctcctacccttactaatatcctttgtaagaagctggactccagattgacgggcctcgcgaagagattcggggcaacttatacccgttacgccgatgatataactttttctagccctcacaatatctacaatgacgaggccttcaaccaagaactgaagcggattatcgaagaagaccagaaactcgtgattaatccaaagaaaacccgcttacagaaatccgtctataggcaggaagcaaccggactcatcgtcaacgataaggtgaacgtgaggcggaggtatgtgaaacagatacgcatgtggctatactattgggagaaatacggctatggaaaagcagaggaaaagtttaaacgggattacatcgctgacaagggccatgtgaagaacatcaatgcccacctggtaaacgtgctagacggcaaactggaatttcttaagatggtgaagggaaaggaggacgacacgtacaagaaacttaagaaaagattggacggcctcacagatagagaaagcccaattacgaagatccttaacatctgggaaaatgaggggatagaggctgctatggcaacccgtgatattaccgaggatgacttaagtactaatgggaggattattgtgattttttga

SEQ ID NO: 7454 - RNA, 1374 nt, synthetic construct
  source 1..1374: mol_type = other RNA
atgaatttgctcattaaaaacatccagaggttcatctccatccagatcgagtatcaggccggagtcttcaaggtcctaaacatctttaagatgaagatcgagcaggttcacatcgaccaaattaggaagcagtttgccggcttgcaaaccaaagaagatctagccaaactgctgtctttcgcggatatcgtgttatatggtgaggctcgtaagcctgttcgcctgaaggctctcacatactatgcaaatccagccttgtgcaaaaaacgttaccagaccttcataataaagaaaaagtccggcgcagacaggacgattcatgcacctgtgaaagggttaaagtctctcctccaatcacttaaccttgtgctgcaatgcattcatgaaccccacgaggctgccaccggttttgttctggagaagtctatcgtggataacgcgaaaaaacacgtggggcatcactacgtattaaacatcgacttgaaggactttttccattcattcgatttgtacagagtgaaatttggccttttaaacgaggtctggggtataaaaacaatcagcaagtttaggaaggaaaacggcgcaagctttcaaaagatggacgaactggctttcctgatggcttccctgtgtacccacagcttcgagatcgacggagagctgaaaactgtcctgccacaggggagccccacaagtcctactatgacaaacattctgtgtaagaagctggaccgcagactcactggccttgcaaatagattcggcgctacttatactcggtacgccgacgacattaccttctcgtctccacacaatatatacgaagaagtggagaatcccgtactaaaccagaagggcgcgtacgacgattttttgagtgagcttaaacggctgattaaagaagagaaactcactatcaatccgaagaagaccagactgcagaaggccggttatcgacaggaagccacaggactcattgttaacgacaaggtcaatgtgcgccggcgctacgtgaaacagatacggatgtatcttaacttctgggagaaatatggatatgaaaaagccgagcagatctttaagcgagattacctccatgataggggaaatgtgaagctgcttaaagaggggaagctgaaagtgaattttccaaagatgaaggatgtgctgggagggaaactagagtttctcaaaatggtgaagggggtcgaagacaacacatacctgtcactgaaagatcggctcaataacctgaataccacgattgtacagaaccctattcccaagagtgttgatttgaattccgtactggaagtcttcaccagaaagggcctcatggaggccatggaactgttcaaaaagtgcaagtga

SEQ ID NO: 7455 - RNA, 1209 nt, synthetic construct
  source 1..1209: mol_type = other RNA
atgaagatagaacagactcatatcgatcagattcggaaacagtttgcagaactacagtctaaggaggatttggtgaaattgctgtcaggagcgaagaatatcctgtacggcaaggagtgtaagcctgtgcagcttaagtccctgacatattacgccaatccgactctatgtaaaaagcgttaccagaccttcaccataaaaaagaagtctggtgcagacaggactatccacgcaccagtgaaaggtctgaaatccatccttcgaagcctgaactatgtgttacagtgcgtcaatgaaccccatgaagccgctaccggatttgttctggagaagagcattgtagacaacgccaagaaacatgtgggccaccattatgtccttaacatggacttgaaggatttcttccactccttcgatttataccgtgtcaaattcggactgctccacgaggcttggagtatcgggaatatttccaaatatcgggagacaaatgaacagcagtttcagcagaaggaagagctggcctttttactggcctgcctgtgcacgcaccccttcaagatcgatggggaggagaaaacagttctccctcagggctctccaacgtcacctaccctcactaacattttgtgtaaaaagcttgatcgaagattgactggtctggctaacagatttggcgctacttacaccagatacgccgacgatattacattttcgagcccccacaatatctacaccaatggagaattcaacaaagaactgaagaggattattgaagaggatcagaagctcgtgatcaatcccaagaaaacccggctgcaaaaagcgggctatcgccaagaggccacagggcttatagtcaacgacaaggtcaatgtgcaccggcgctatgtgaagcaaatcaggatgtggctctactactgggagaagtatggcaacgaaaaagcagagcagatctttaagagggattacattgccgataagggccatgtaaagaatatcaacgcacacctggttaacgtgctggatgggaaactcgagttcctgaaaatggttaaaggagtgaacgacagaacgtatattaaactaaagaaccgctacgacaaactcacagaaaaggacagcccaataaatcaactgcttgacatttgggacaccgacgggatcgaccaagctatgagtatctattacaaggacaaactcgagtga

SEQ ID NO: 7456 - RNA, 1191 nt, synthetic construct
  source 1..1191: mol_type = other RNA
atgaagattgaacaggcacacattaatcagatacgacaacagttcgcagagctgcagtcgaaagaggatctggtgaaactcctgtcagaggccaaaaatctcctgtatggggaaaaatgtaagcccgtgcagttgaaaagcctcacctactacgctaatccagaattgtgcaagaagcggtaccagacatttacgatcaagaaaaagtctggcgcggatcggactattaactcccctgtgaaggggcttaaatcaatcctgaggagtctgaactttgtgctccaatgtgtgtacgaacctcatgaggctgccacaggttttgtcctggaaaagagcattgtggacaatgcgaaaaaacatgtcggccaccactatgtgctcaatatggatttaaaggacttcttccatacattcgatagaaatcgtgtgaagatgggattcatctatgaaccattcaatttaagtggggacaaggaacccctcgctttcctgctcgcaagcctgtgcacccacccgtttgaaatagatggtaaagagaagacggtgctgccccaaggcagccctacctctcccaccttgacaaacattctttgcaagaagttggacagacgcctaaccggcctcgccaatcggtttggtgcaacatacactagatacgccgacgacatcactttttcttcccagcataacatctataccgacgaggtatttaacaacgaactaaaacgaatcatcgaggaggaccagaagttaatcataaatccaaagaagactcgcctccagaaggccggctatagacaagaagccaccggtctgattgtgaacgacaaggttaacgtacacaggaggtatgttaagcagattcgtatgtggctatactattgggagaaatatggatacgagaaggccgaacagattttcaagcgggactacctggtagataaagggaatgtgaagaatttgaatgctaaactggagaacgtcttggacggaaaactggagttcctgaagatggtcaaagggatcgaggatgttacatacaagggcctgaaagagaggtttgatctgcttaacggcatcaaagtcaagaaagagaacgagaaaatcgatcttgagaacgttgtcaacactatcctgaataagggacttatagaaggaattaacctttacgatcgctataaaaagtcctga

SEQ ID NO: 7457 - RNA, 1191 nt, synthetic construct
  source 1..1191: mol_type = other RNA
atgaaaatcgagcaggcccacatcgatcagatcaggaaacagtttgccgagttacagagcaaggaagagctagtgaagctgctgtcggatgccaagaatatgctttacggcgaggagtgcaagcctgtgcaactcaagtccctgacatactatgctaatcccaccctctgtaagaagagataccagacattcactataaagaagaagtcaggcgctgaccggattattcatgcaccagtgaaaggtctgaaatcaatactgagatccctcaactttgtgctgcagtgcgtatacgaatcccatgaagcagctactggatttgttttggagaagagtatcgtggacaacgccaagaaacacgttggacaccattacgtcttgaacatggacctgaaggacttctttcacacattcgaccgtaacagggttaagatgggctttatttacgaaccgttcaatttgaacggggacaaagagcccctcgcctttctgcttgcatctctctgcacccaccctttcgagatcgatggggaggtaaaaacggtgcttccccagggatcccctacgtcacccacactcacgaacatcctgtgtaagaaactcgatagacgtctgacaggcttggcaaatagatttggggcgacttatacccgatatgccgacgatatcacctttagcagcccacacaatatctataccgacgaggagttcaataaggaacttaaacgcattatcgaggaagaccagaaactcataattaacccaaagaagaccaggctgcaaaaagccggctaccggcaagaagcaactgggctcattgtgaatgacaaggtcaacgttcggcgccggtatctgaagcagattaggatgtggctatactattgggagaaatacggttacgaaaaagccgaacagatcttcaagcgagactatattgctgataagggacatgtcaaaaacataaatgcgcatctggtcaatgtgctggacgggaaacttgaattcttaaaaatggtcaagggtacagaggatggcacctacaagaggcttaaggaacgcttcgataacctgaccggcttcaaagagactaaagatcaaagcaaaatcgatttgagtagtgtgctgaatactttagtgaaccagggactaaacaaagctatgtctctgtattctcgctttaagaatcagtga

SEQ ID NO: 7458 - RNA, 1212 nt, synthetic construct
  source 1..1212: mol_type = other RNA
atgaagatcgagcagattcacatcaaacaaattaggaaacagttcgcagagcttaagagcaaggaagatttagtcatcctgctgtccgacgcaaaaaatatattgcactcagaggagtgtaaacccttccagctcaagtctctgacttactatgctaatcccaagctgtgcaaaaaaaggtaccagacttttacgattaagaaaaagagtggagccgaccggaccataaatgcacctgttaagggacttaagagcatactcaggagcctcaacttcgtgctgcaatgtgtatacgagcctcatgaggctgccacaggtttcgtcctgcagaagagcattgtggacaatgctaagaaacatataggccatcattatgtccttaacatggatttgaaagacttctttcacacttttgaccggaatagagtgaagatgggatttatctatgccccattcaacttaaatggggataaggaacccctggcctttctgcttgcgtcactctgcacccacagttttggtattgagggggaagtgaagactatcttaccacaggggtcgccaacctctccgacattgacgaacatcctctgctccaagctggacagacgcctaaatggtctggcaaatcgattcggcgccacttatacaagatatgccgatgatatcacattttcttccccccacaacatctacaacaatgaggatttcaacaaggagctgaaacgcattattgaagaggatcagaagctggtgatcaatcctaagaaaacccggctgcaaaaagctgggtttcggcaggaagttaccggactcattgtaaacgacaaagttaatgttcagcgccgatatgtcaagcagatcagaatgtggctgtacctgtgggagaagtggggctatgaaattgcccagcaaaaatttttgaacgactacattgtggacaaaggccacgtgaagaatatcaacgcccatctagtcgatgtgttggacgggaaactcgaattccttaagatggtgaaaggcatagaggacggcacctacatgggtctgaaacaaaggttcgatcgtctggtgggagtaaccgatcctattaaccagctcctagatatctgggaaaaggctgggatcgaatccgcgatgaacaactactacaagaacgagacaacaagtcttgacaaaggctcttcaaatatcgaagacctcttcaagtga

SEQ ID NO: 7459 - RNA, 1191 nt, synthetic construct
  source 1..1191: mol_type = other RNA
atgaaaatcgaacaggcccatatagagcaaatcaggaagcagttcattgagttacagtccaaggaggacctggtgaagctgctctctgatgccaaaaacatgatgtacggagaagtttgtaaaccgatccagctcaaatctctaacctattacgccaacccttcactatgtaagaagcgttgtcaaactttcactattaagaagaagagcggcgccgacaggaccatacatagccccgtgaaaggtctgaagtccatacttcgcagcctcaatttcgtcctgcagtgcgtgtacgagccccacgaagcagcaaccggattcgtccttgagaaatccattgttgacaacgcgaagaaacacgtgggtcaccattatgtgcttaacatggacctcaaagatttctttcataccttcgaccgaaacagagtaaagatgggctttatgtacgaaccttttgctctgaatggtgataaggaaccactggcgtttcttctcgcaagcttgtgcacgcaccccatcgaaatcgaaggggaaggcaagaccgtccttccacaggggagtcctacctcacccactgtgacaaacattctgtgcaaaaaactggatcgaaggctgaccgggttagccaatcgctttggcgcaacatacacaaggtatgctgacgacatcacctttagttctccgcataacatttatacggacgaggatttcatcaaagaattaaagcggatcattgaagaggaccaaaaactggtgattaaccccaagaagacgcggttgcagaaaacaggacacagacaagaggttacaggcttgatcgttaatgataaagtcaacgtgcacagatcgtacgtaaaacagatcagaatgtggctgtactattgggagaagtatggctacgagaaggccgatcagatattcaagcgcgattacattgctgacaaaggtcacgtgaaaaataagaatgcccacctggacaatgtgctggatggaaagctagagttcctcaagatggtcaagggcattgaggatcggacttttaaggggttgaagaaacggtttgacaaattgactgggatgaacgatcctatgaatcagctcctcgatctgtgggagaacaaaggaatcgaagacgctatgaagaattattacaagtccccaccagagatgactatcatattcacactgtga

SEQ ID NO: 7460 - RNA, 2157 nt, synthetic construct
  source 1..2157: mol_type = other RNA
atgaagattgagcaggcgcacattgatcaaatacggaaggaatttgccgaactccagtcaaaggaagacctggtgaagctgctgagcgatgctaagaacatgctatacggcaaagaatgcaagcccgtgcagctcaaatcgctgacctattacgccaatcctaccctgtgtaaaaagagataccagacgtttaccataaaaaagaagagcggggcggaccggactatcaacgctccagttaaaggtctgaagtccatcttaaggtccctcaactttgtgcttcaatgcgtgtgcgatcctcacgaagcagctaccggcttcgtcttgggcaaatctatcgtagacaacgcaaaaaaacatgtcgagcaccattacgtgctgaatatggacctcaaagattttttccatacgtttgataggaacagagtgaaaatgggttttatgtacgagccatttaatctcaacggcgataaagaacctctggccttccttctggcctctttatgcactcaccccttcgaaatagatggcgaggtcaagactgttcttccccagggaagtcccaccagccctaccttgacaaatattctgtgtaagaaacttgacaggcggttgaccggactggccaaccgctttggcgcaacttatacacgttacgcagatgatataacattcagctcccctcacaacatatacaccaatgaagcctttaacaaagagctgaagcgcatcattgaggaagatcagaaactcgtcatcaatccagagaagacacgtctacagaaggccggatataggcaagaagctacagggctcattgtgaatgacaaggttaacgttagacgtaggtacgtcaagcagattcgcatgtggctttattactgggagaagtacggatatgaaaaagcgcagcaaatctttatcctggactatacaacagataagggacatgtgaagaaggggaagccaaatctggccaatgtgctcgatggaaagctggagtttctgaaaatggtgaaaggggagaatgacagcacctatgagacactgaaaaaaaggttcgacaagctctatgtgatcgagaactccttctcaaaggtacttgacatttgggagaacgaagggattttgaagaatactgacaagaatacaggtcagaagacatcagaacacattatacataacccgaaacacattactaagtttctgagacagttcaaagagaatactgacttgaagtggactacccatagctgggataacatcaaatatgccagtatagacgactttatcaacgcccttaacgaaaataagaaggagttcaatcggctctataaacataaccgggacttgtataatctcatccagtatttcatctaccagccgaagtcaaatccgatcgagaatggcattcctaaatatgggtgggtgaaccttcaagcaatgaagtttggttggcagttcccagacaataagtttctgttgtggtgtaaggagaactacgataataaaagttacgacgaacggaagaaacctttccagtacttgctacccaaggaacttcgaccctccaaaaccgtaaaaggaaaggagatcaaatacttccaggatgtggtcgagatctttaagacggaaattcagtttcgagaagagtacctgtataaagagatccgcaaacgcatacacagaatttctgacttcaattttagcggcttagatgagctgaagaaactggacttctatacctatacccccggcgttttatccgcaatcgaccacatcttcgagcaaattaagcgaaatgagactgctatcgacatcaacatttcatacatcattcacaaccagaagatcatcctcagtattacacagatcaattccttcccctcgaaagagctggatattaacaacacgaagtctttcttagggggacatctgaatgccatagctgaaagcctgttcagtctcgctgatttctctattgagagcaactttaagtacaacggtaagatcatcccaggcgaattgcaaatcacctacgaaaacatgataggcaagagagtcgcttccaacattaccctaacccaggagccaattttcatcgagtctaataacaaactgcctgggttcacttacaaactgacattctacatttga

SEQ ID NO: 7461 - RNA, 1170 nt, synthetic construct
  source 1..1170: mol_type = other RNA
atgaagatcgaccagtcccatattgaccatataagaaaacagttcgcagacctccagagcaaagaggagctcgtcattttgctctctgaggctaagaacttgctgtatggcgaagaatgcaagccggtgcagctgaaaagtctgacttattacgccaatcctgaaatttgtaagaaaaggtaccagaccttcactataaagaaaaagagtggggccgacaggacaatcaacgcccccgtgaagggtttgaaatcaatcctgcgaagcctgaactttgtgctccaatgcatctacgagccacacaaggccgccaccggttttgtcagagataagtccatcgtagacaatgcaaaaaaacacgtcggacatcactacgtgttcaacctggatctgaaggacttttttcattcctttgataggaatcgggtgaaaatgggcttcatctatgaacctttcaaccttggaggtgacaaagagcccctggcctttctgctcgcatccctgtgtacacaccccttcgaggtggacggagaacttaaaaccgttcttccacagggcagccctacgagcccaacattaaccaacattctgtgcaaaaagctggaccgccggctcaatggcctagccaaccgcttcggtgcaacattcactcgctacgctgatgatatcaccttcagctcaccacataacatttataacgacgaagcattcaacaatgagctgaagcgtataatcgaggaagatcaggagctggctatcaatcctaagaagacgagactacagaaagaaggctacagacaggaggctactggcctcattgttaacgagaaagtcaatgtgaggcggaagtatgttaaacaaatccggatgtggttgtactactgggagaagtatgggtacgagaaagctgagcaaatttttaagcgtgactacatagccgataaggggcacgtaaagaataccaatgcccaccttatgaatgtgcttgatgggaagttggagtttttaaagatggtcaagggaggcaacgattcgacttatctaacactgaaaaatcgcttcgaaaagcagattggattagcggctcccatctcttctgtgctcaacatttggcaaaatgaagggatagaaaaggcgatgaaaatctttaaccagctgcagcgaaattga

SEQ ID NO: 7462 - RNA, 2154 nt, synthetic construct
  source 1..2154: mol_type = other RNA
atgaaagtggagcaggaacatattgaccagattcgaaagcaatttgctgagttacacaataaggaggaactgatcaatttgctgtcctacgccaagaacatgttttatggagaggagtgtaagccagtccaattaaagtctcttacgtactatgccaaccctgaaatctgtaagaagaggtatcagactttcacaatcaagaagaagtcaggagccgatagaactattaatgctcccgtaaacggccttaaaagcatactcagatccctgaacttcgtgctgcagtgtatgtatgaacctcatgaagtggccaccgggttcgtaatggacaagagtatcgtggacaatgcgaaaaagcacctggggcatcactatgtgctcaatctggatctcaaggacttcttccacacttttgatagaaatcgcgtgaaaatgggtttcatatatgagccattcaatcttagcggtgataaggagcctctcgctttccttttggcttccttatgcacacacccatttgaaatagacgaggagctgaaaactgtactgccccaggggagtcctacctcccctacccttactaatatactctgcaagaagctagatcgccgacttaatggcctggccaatcgattcggcgctacatttacccgttacgccgacgatatcacgttcagcagccctcataacatttataacgacgaggcgttcaataatgagctcaaaagaattatcgaggaagaccaggagctcgcaatcaatccaaaaaagacacgcttgcagaaagccggctaccggcaggaggtcactggactgatcgtgaacgagaaggtaaacgtcggccgacgttacgttaaacaaattcgcatgtggctgtactactgggaaaagtacggatacgaaaaggccgaacagatttttaccagggattacattgcagacaaagggcatgtgaagaaaggaggcgccaacatggctaatgttttagacgggaagctagagtttttgaagatggtcaaaggcgcagctgacacgacatatctgggattaaagggaagactggataaactggtcattaatcaggacaccaacaaaactgagatcgccgaactgaccaacaagggtctgaggttctccaatgagaatgaggtgttacacgacccggacttcgtggtcaagcgtctaaagcagtttacgatagaccctattatgaaatggacaacccacttttgggatatccccacagaaacggataccgatgttcactcactaagggacattgctgatcacttcgccgcagtgaacagtcggttcgacgaatttgttgcacttcagaaatacaacaacaacctgtggtggaaagtgatctatcccttcatcttccagaaaaaaccaaaaaagaacgagaacaaagacaacccttatcggtggggggagtataacctccatattggctggcagtaccccaaatttgttgcagaatggtctaaagataactacgatatcccccctcccgcgctgaagaagactccctttgagatgcccttgccaagtgagctcataacagacctcgccaatcagaagtatcgggaactatttggaaaggagattcggtatttcggtgatgcgattcaaatgttcaagagagagattgaattccgcgaagacaccaaagatctctactacgaggtcaaagtgctggcaaggcaggagctgaccgaattttcagtgaatggcttggagtcgcttaaacagttgagcttttttacctacactgctccagttctgaaagccatcagacgcatctttcggatgatccaatctcgcaccgaacagagagaagtgatcattgagtgcaaaaagctcactgacctgaggctcatcgagctgaggataatccacaaaaactctctgtcgcacagggaaagcaccgatgataagataacaaaaccatctggtgacctgcttgaagtcatcaagaatctcattagcatctgcaatttcgagatcgaatcctcttttaacgacgggattttccggatcacatatctgcgaccgaacacaaacgtgataaagctcaatcatttgcggcccctgaagcaatccctggattcactgcatggcttcacctacgtcttgaagtttccgatctga

SEQ ID NO: 7463 - RNA, 2208 nt, synthetic construct
  source 1..2208: mol_type = other RNA
atgaagatcgaccagacccacattaatcagattcagaaacagttcaatgagctggagtcaaaggaagacctggtgaaactcctaagtgatgctagaaatatgttatacggccaggaatgcaaaccctttcagttaaaggcccttacatattactctaacccgaaggtctgtaggaagcggtataagacctttaacattaagaagaagtccggagctgaccgcacaataaatgctcctgtgaaaggattaaaggccattttacgaagtttcaactttgtcctgcaatgcttgtataaacctcacgagaatgccattggattcgtgcttgacaaatctattgtggacaatgcccagaaacatgtaggccatcattacgtactcaacctagacctgaaagacttctttcattccttcgacaaaaaatgggttaagtatggcttgatgtctcccccatttaatctgcacggtgataaggagcccttagcgtttcttctggcttcactcgttacgcacccattcgaggtggaaggcgaggtaaaaaatgtcctgccacaggggtcgcccacttccccaacactgaccaatatcctgtgtcagaagttagaccgacgcctcaacggtctggcaaataggtttggggccaccttcacaaggtacgcagatgatattacgttttcaagcccccacactatttataacgacgaggcttttaacaacgagcttaagcggatcatcgaagaagaccagaagctggcaattaatcctaagaagactagattgcagaaagctgattataggcaagaagcaacaggcctcatagtgaacgataaagtgaatgttaggcgcagatacgtcaagcagattcggatgtggctgtactattgggaaaagtatggatatgaaaaggccgagcaaatatttaagcgtgattacatcgccgataaaggtcacgttaagaatatcaacgcacacctggttaacgtcctcgacgggaagctggagtttctcaaaatggtgaaaggcatagaagacggcacctataagggtctaaaggaacgttttgacaagctgactcagtcatacccttcccccaccatacttaagctgagcgatgacaatcagaatcgaatgttggagaatgaaaccgtgtccataagcaatggcacacccagtgagctgttgaacaacaacaagatcaacaacatcgaattgatcgtgcgccctctcggaaactccaccgtggaggaacttatggtcgacaaatacctcgtcaaggggctgaaattgcctcatattgaaattttcgagaaccctgacaaatacaagccatcactgccgcataacccggagcagactacgatcctgctcactgaattcaagaatgatgggagcggattcaaagaattggtgcacaagcctttcgatgagattaccccatacaaggtgctcgaggaggtgaaaaaccacccaaacttctcagagtacttcaaaaagggtaggaaatccggctttaagggtaatataaatagagaagtgcagaactcggtgattggccttatcaatagctttgaacggatcggaaatatgcattgggatcagttcaaagagtatcctttcggggagcacggctcctcagagtacaccacctatgccatgaacttcaaaaagaactaccgcttcggacccagacaagacggctacactagtctggaggaactgatccggtttaccttccttaaagagatcacacgcttcgacagtaaactgatcttccttccagatgataggcgatttaacctgagagggtctttttacacgtgggttcccagcgtgaaaaaaggactcgagttcatcgcccaaggtataaacgaacatagcaacatttgcggctctagctctttttccacgaaggaaatttactttgagctacgtcgggatacctttctgaacactatctccttgctaattaccgatagtgatagcgtcgcgaaaagacccgcggaggacatcctgaaagatctgcggctgagcgaggtcttcaagaagtatttcaggtctatatgtgactggactatctatctcaagaatgaggacggaaatttccaactccgcgtactgaagagaatccaggacacagggaaggaggatatcatctctatcgaagggacaaaggggtttacacacaaaattacattctacggcacttga

SEQ ID NO: 7464 - RNA, 1170 nt, synthetic construct
  source 1..1170: mol_type = other RNA
atgaacatcgaaccattccagaaagagcagatcagaaagaactttgccgagctgcagaataaggaagatttggtcaatatactgagcgatgctcagcgaatgctgtatggcgaaaactgtaaggacgtgcagttaaagtcactcacctactacgccaatcctgagatctgcaagatgcggtatcaaactttcaccattaaaaagaagagcggcgccgacagaacaattcatgctccagtgaagggtctgaaatccatcctgcgctctctcaattttgtgttccaatgtattagcgagcctcatgaagccgccactgggttcgttctggacaagtcaattgttgacaatgcgaagaaacacgtcggaaatcactatgtcctcaatatggatctgaaggattttttccactcttttgatcggaatcgcgttaagatggggttaatgtacgagccgttctctttgggaggcgataaagagcctctcgctttccttctggcaagtttgtgcacacaccccttcgagattgacggggaggtgaagacagttctaccccaggggagcccaacttcgcccacgatcactaacatcctgtgcaagaagctggataggcggttgaatggccttgcaaacaggtttggggccacctttacaaggtacgcagacgacataacgtttagttcccctcataacatttacaacgatgaaaccttcatcaaggaactcaaaagaataatcgaggaggaccagaacctcgtcatcaaccccaaaaagacccgattacaaaaagcaggttatagacaagaagccaccgggctgatcgtaaacgataaagtcaatgtgagacgtcgctacgtgaagcagattcgtatgtggctttactactgggaaaagtatggctacgaaaaagccgaacagatattcaagcgcgactatatggctgataaaggccatgtgaagaacgtgaatgcgcacctggtgaatgtgctagacggaaaactggagtttcttaaaatggtaaagggatccgaggatggtacataccagaggctgaaagagcggtttgacttcttggtcggttttaccgaaccaattaacgacgtactcgacatctgggagaaatatggcattgacaaggctatggatgtgtattacaaaaacaaacttggatga

SEQ ID NO: 7465 - RNA, 1197 nt, synthetic construct
  source 1..1197: mol_type = other RNA
atgaagattgaacaagctcatatcgatcagatcaggaagcagttcgcagagcttcagagcaaagatgacctggtgaaactgctgagtgacgctaagaacatgctgtactccgaagagtgtaaaccgattcagcttaagagtctgacttactacgctaatccagtgttgtgcaagaagcgataccagacctttattatcaagaagaaatctggagccgaccgtatcattcacgcgcccgccgagggccttacctccatactcagagcactgaatttcgtgttgcagtgcatgtatgtaccccacaaagctgtgaccggtttcgtcttggaaaaatccatagttgacaatgccaaaaaacatgttggccatcattacgtcctgaacatcgacttaaaggatttctttcacagcttcgataggaatagagtgaagatgggatttatgttcgaacctttcaatctgaacggagataaggaacctctggcctttctcctggcctcattgtgcacacacccatttgaaatcgacggagaagtgaaaactgtactgccacaaggttctcctacaagcccaaccattaccaatatcttgtgtaaaaagctggaccggcgtctaaccgggctcgccaatagatttggtgttacatacactaggtatgcggatgatatcactttttcgtctcctcacaacatttacaacgacgaagcattcaacaaggagctcaaaaggattatcgaggaggatcagaagctggtggtcaatcccaagaagacgcgactccagaagactgggtaccggcaagaggttacgggcctaattgtgaatgataaggtcaacgtgcggcggcgctatgtgaaacagatccgcatgtggctgtattattgggaaaaatatgggtatgccaaggcagaacagatatttaagcgcgattacgtggcagataagggccatgtcaaaaacatcaatgtccacctcgtgaacgtactggacgggaagttagagttcctcaaaatggttaagggcacaaaagacgagacatataaaaagctgaaggagagatacgagaaccttgctgaagaaataaaccccatttcacaacttctcaatgtctgggagaaggagggcatcgagaaagccatggaagtgtactatgacaaagaggagaacagcaacattttaatcgaggacctattctga

SEQ ID NO: 7466 - RNA, 2178 nt, synthetic construct
  source 1..2178: mol_type = other RNA
atgaaggttgataaggtccacattgaacagctccgaaagcagttcgcggagatgcagtcaaaggatgatttgcttaaactcctgaacaacgcaaagaagatgctgtatggagagaactccatgccattccagaaaaagagcctgacatattacgccaatcccgacctatgcaagaagcgctaccagacctttaccatcaaaaagaagagcggagaggatagaataattcactcacccgtgagcggccttaagtccatcctcagggtgctgaacttcgtgttgcagtgcatttacgagccacataaagctgccactggctttgttctgaacaagtccattgtggacaatgctaagaagcatctgggacaaaactacgtctataatatcgatctgaaggacttctttcatagcttcgatcggaacagagtgaagattggttttatgtatgaaccgttcaatcttaagggggacaaagaatcactcgcatttctgttggcctgtctctgcacgcacccactagaggtggacggagagatcaaaacagtgctgcctcaggggagtccgactagtccgacactgacaaatatcctgtgtaagaagctggataggcgtcttacaggactagctaagcggtttggcgccacgtacacccggtacgctgacgatataaccttttcctccctgcacaacatctacaaagatgacgactttatcaaggagctcaagcgcattatcgaggaagaccagaagctcgtgattaatcctaataaaacgcggctccagaaggccgggtatagacaggaagctacgggtctgatcgttaacgagaaggtaaatgtgcataggcggtacattaaacaaattcgcatgtggctctattactgggaaaagtatggttatgagaaggccgaacagatcttcaaaagggactacatcgccgacaaaggtcatgttaagaatatgaatgcacacttggtgaatgtgcttgacggcaaattagaattcttgaaaatggttaagggcttcaaagactcaacatatcagggtctgaaaaagcgctttgacagattaactaaatctgagaaccccatagaaaataacgagataattgagcagaaccgtactcaggaacatctgaatgtcctttctgaggacaaaaaggccatattccatgaccctaaacttgtcatcaacaagctggagcaattcacatctgatccaattatgaaatggctgacccacttctgggatacaagccctgatatcaattctgagagtaactccagtaccgagaactattttaaagccgttaatagccgatacgaagaattcgtcttcttacagaaatacaacgccaatttatggtggaatgtaatctatccattcgtgttccaaaagaagatttcaaccaataaagaggggaaagaaatcccctttaaatgggggaaatatggcatcaaaattgggtggcaatatcccgactcagtgattaactggatagtagagaattacgataacaagcctcacgcattaaaaaaaaccccctttgagatgtccataagcgacgatctcgtctctgcggaagcgaaccagaagtaccggctgatgtacggcaaggaaattcgtttctttggcgacataattaaccttttcaagagggagatcgcatttcgcgaagaaaccagggatttttattacgagatcaacaacttggtactacaggaactgcgagaatttaaagtgtctggcctcgagacacttaagtacgagagctttactgtgtataccgtgccagtgttgaaagctatcagaaggatcttccgcatgattcagaccagaactgagaatagagaagtcgaaatctcttgtaaccgactgtcgaatcaaaacctcatactgttgaagataatccacattgggagtcatcccctcaagaatagcgagcacagtaaattcatgaaaccttcgggagatctggaggaagtaattaagccactgatttccatctgtgacttcgaggttgccgcacactttactgacggagatttcgtgctgaagtatctgtaccctaacgtcaaaattagccacgagaattcccaattccacatcgctgagatcaaaaaggaggattgcatcgtcaaaggctttacttacatcttgaagttttacctgccctga

SEQ ID NO: 7467 - RNA, 1191 nt, synthetic construct
  source 1..1191: mol_type = other RNA
atgaagatcgaacagcagcacatcgatcacattcggcagaggttcgccgagatgcaaactaaggaggaactggtgagcttgctttctgacgctaagaatattatgtatggtaaggagtgcaaaccctttcatctcaaatctctgacctactacgccaaccccaaattatgcaagaaacgctacactaagttctccatcaaaaagaagagcggaaaagagagaattattaacgcaccagtgggaggcctgaagagcttactgcggagtctgaactttgtcctacagtgtatttacgagcctcaccacgcagccacaggctttgtcctggacaaatcaatcgtggataatgccaacctgcataccggcaaccataatgtgtataacctggacctgaaagactttttccactcattcgatcgcaatagagttaagatgggttacatctacgagcctttcaatctcgggggggatagggagcccctggcctttttgcttgctagtctctgtacacatcctttcgaaatcgagggggagatcaagacagtactcccgcagggaagccccactagccctacaatcacgaacatcctctgcaagaaactggacaggcgtttgactggtctggccaaccgctttggagctaagtactcccggtacgcggatgatataaccttctcctctccacataatatttataaggacgaagagttcctgcgcgaactgtcgcgaatcatagaggacgaccagaaactcgcaattaacccagataagaccagactgcagaaggccggctatcgacaggaagtgacagggttaatagtcaacgaaaaagctaatgtgaggaagagatatgttaagcaaatccgtatgtggttgtattactgggagaaatatgggtacgagaaagcacagcaaattttcaaacgggattatctgaccgacaaaggtcacgtaaagaaaggcgaaccaaacttcgcgaatgttcttgacggcaaactagagtttctgaaaatggtcaaagggctcgaagattcaacctataagacactaaagaagaggtttgacaagcttactgatgtgaaggaaaaaacgcagcaagaaaaagtggatctcgatgctgtcatagacaccatcattaataagggccttgaccagggaatatccttgtacgacaagtacaagagtacctga

SEQ ID NO: 7468 - RNA, 1230 nt, synthetic construct
  source 1..1230: mol_type = other RNA
atgaaaattgaacagcagcatattgatcagatccggcaaaagtttgcttcaatgcaaaacaaggcagatttggtgtcactgctgagtgaagccaagaacatactgtatgggaaagaatgcaagccattcgaacttaagtccctgacctactatgctaacccagacttatgtaagaaacgttacgcaaagttcactatcaagaaaaagagcggcggcgaaaggacaatcaacgcacctgtgagcggactgaagagtattctacgctctctaaatttcatcttacagtgcgtctacgaacctcacaatgccgccacaggattcgtcctgggcaagtccatcgtggacaacgccaaagttcacgtgggcaatcatcacgtgtacaatctggacctcaaagacttctttcatagttttgataggaaccgcgtgaaactgggatttatttatgagcccttcaacctcaatggtgaaagagagcctttagcctttttgctggcgtcgctgtgtacacacccgttcgaagtgaacggtgagataaagaatgtgctacctcaaggcagccccacctctccgactatcacaaatatcttgtgcaaaaagctcgaccggcgactcactgggctcgctaacagatttggggcaaagtacacgcgctacgcggatgatatcacattctcctctccacacaatatctataatgaagaggagttccagaaagagttggaaaggataatagctgatgacaatcttctcaagattaacggaaagcagaaagagatcggaccccagttgaacattaacaccgacaaaacccgtttgcagaaatcagtttaccggcaggaggtaaccgggctgatcgtcaacgagaaggtgaatgttcggcagagatacattaagcaaatcagaatgtggctgtactactgggagaagtatggctatgagaaggctcagcagatttttaccagggactacattactgataagggacatgtaaagaaaggcaaacccaaccttataaacgtgctcgatggtaagctggagttcctcaaaatggtcaagggggccgaggattccacgtatctgactctgaaaaaccgatttgacaaacttccacaggtaaaggagaagattcaaagcgaaaaagtcgacctggacgccgtgcttaataccctgatcaataaagggcttaatcccgccatggttctctatgatcgctataaaaatggctga

SEQ ID NO: 7469 - RNA, 1209 nt, synthetic construct
  source 1..1209: mol_type = other RNA
atgaagatcggccacgaacagactgaacgtataaggaaacagttcaagaatcttcagacacggcaggacttggtggatctcctgagtgaggcaaaggacatgatgtacgaagataagacgaaaccctttaagctaaaaacactgacctattacgcaaaccctgaaaactgtaaattccgatattccaccttcttcgtgaagaaaaaatctggcggccagcggacaatacacgccccaacaaaggggttgcgttccgtgcttcgcagcctaaactatgttctccagtgcatgcacgtcccgcatcaggctgctacaggtttcgtgcgcgatagaagcattgtggacaatgcgcaaaaacatgtcggccaccattacgtgcttaatctggacctgaaggacttctttcattcctacgatagaaacaaggtcaaactggcctttatgtactcaccatttaatttaagggggtgtaccgagaaggagaaattggccttcttcctggcttgcctctgtactcacccttttgagattgaaggagcaactaaaactctcctcccccaaggctcgcctacaagtccgactatcaccaacatactctgcgaacgcttagatagaaggctgacgggattagcgaacaggtttggggccacgtataccagatatgccgacgatattaccttcagctcaccccataatatctaccaggaggaaacaaatccctccctgaaccctaaggggagctacgagaactttcgagccgagcttgagcgactgattgaggaggagaagttgactattaacccaaagaagacccggctgcaaaaatctggctatcgccaagaagccaccggactcatagttaacgagaaggttaatgtgcggcgccggtatgtaaagcagattagaatgtggctttattactgggaaaagtatggttacgagagagctgagcagatctttaggtctgattacatgatcgacaaggggcacgtcaaaaaaggcaagcccgacctaatgaatgtcctggatggaaaactggagttcctgaagatggtgaaaggtaaggaagacggaacctacaaggggttgaaagaaaggttttacgaactcattggacacgaggacccaatcaaccgggtgctgaatgtatgggagactgaaggcatcgatcaggcaatcaatatctattacaaggacaaactggagtga

SEQ ID NO: 7470 - RNA, 1230 nt, synthetic construct
  source 1..1230: mol_type = other RNA
atgaagatcgatcctcagcacatcgcccaagtcaggaaacagtttgagaatctccagagcaaagaggacttgctccagttactgaacgctgcgaaaaaaatgatgtatggcgaaaagttcaagccactggagcttagagcactcacatactacgctgatcctaaactttgtacacgaaggtacagtaagttcagcataaagaaaaagtctggcggtgtgcggacaattcacgcccccacgaatgggcttaagtccattttgcgctcccttaactttgtgcttcagtgcattcatgaaccacacagaaccgctactgggtttgttctggacaaatctatcgtcgataacgcaaagaatcacgttggcaaccactacgtgctgaatctggacttgaaagatttctttcattcgttcgacaggaacaaggtgaagttggcattcatgttcacaccttttaatctgggcgtttctaaggaaaaagagaagattgcattcctcctcgccagtctgtgtactcatcctctagaggtggacggtataacgaaactggtgttaccccaagggtcccccaccagtccgactatcaccaacatactctgcgagcggttggacaggagattaaacggactggcaaagcggtttggtgccaactacagccgttatgccgacgatatcacattcagctcaccacataacatttaccacattgaggataacccctccctgaatcagaaaggacgttttgataatttccgcgccgaatttgggcgcctaattgaagaggagaaattgagcatcaatccaaaaaagaccagactgcagcgatccggcttcaggcaggaggctactggactgattatcaacgacaaggtgaatgtccgccggcagtacgtgaaagagctacggatgtggctttattattgggagtcttatggctatgaaaaagcggaacaaatatttaagcaggattacatggccgacaaaggccatgtgaagaatatgaatgcccacctcgtaaatgtaatcaagggaaagctggagttcctgaaaatggtcaaaggaaatgaggacgggacctacaaggggctgaaggaaagattttcaaagctcgatctggctaagggcaagcaagattttgaaaagatcgacttagaaaccgttgtcactaccattctgaacaaaggactcgacgagggtatcaacctgtatgaacgattcaagaactcatga

SEQ ID NO: 7471 - RNA, 2157 nt, synthetic construct
  source 1..2157: mol_type = other RNA
atgaagatagaatacaagtacatcaaacagatcaaggaacagtttgccaatatacagaacaagcaggaccttgctaacttactgtcgtttgccaataaaattctctacggaaataagagcaagccaattaagttaaacgccttaacctattacgccaatccctctatttgcaaaaaccggtactacagtttctcaatcaaaaagaagtccggtgataagcggattatccatgctccgtcaaaaggactcaagactatcctgcaaacactcaattttgtgttccagtgtctctattcaccaccaaaggtggctactggcttcgtaaccggcaaaagcattgtggataatgctaggaaacacgaaggacatcggtatatcctcaatttggacttgaaagacttcttctattcctttgacaggaatagggtgaaattggcgtttatgtatgagcctttcaatcttatcggcgagaaggagccactggcctttttactggcttccctgtgtacccatcctatcgaagttaacggtgaaacaaaggttgttttgccccaagggagccccgcatctcctattttaactaatatcctgtgcaagaagctggaccgacgtctaaacggattggctaaaaggtttggggcctcttactcccgttatgcggacgatatcacattcagctcgcagtacaacttctacaataacaaagagttcgtagacgagctgaatcggatcatcgagatcgaccagaaacttaacataaattccaagaagatccggattcagaagtccactttcagacaggaagtcactggactgattgtgaatgaaaaggtaaatgtgcgccgccgctatattaagctcattcgcatgtggctctattattgggagaagtacggctatgacaaagcagagcagatatttcaaaaagattacatcgcggacaagggacatgtcaaaaaaggcaatgccaagctaatcgacgtgctgaaaggcaaactggcattcgtcaaaatggtgaaggggtacgaggacactacctatcagaaattgaaaaagcgatttgacagcctcataaaaaacaagatcatccaaaacctgaacaagaataaagtcgtgggcatgaaattggagaacaacaagtcatcaaatagtatcctcagcgagagcctgctggaatatctggaaaagcatctcaaggagttcctaaataaaaagacctacccgattattcacacacctcagaaaacgattgagatcctgaagctgttcagctcaaacgacaaacacctgaaatataccacccactcttgggaagaggaaaaatacgagacgtataacaactttatgggcaagatcaaagatgaatgggaggatattgataagaaccttaaagggctgtcaaaccgccttcacgccaagataagtaacttcctgttcaacaagaagctcggccaaaagaaatctaagggcgattatataagctggggtgacaaaaggctgaagtttgggtggagttccaaagagctcatggagtttatgaaaaagaacccctctagctctccattcgattgtcccattccagagaacattaagaacctggataatgattacggaaagttcttcagagactatgtcgatgtgttcaagaatgaaattgagtttcgggaggacaccaaatacttcaaaaatatggtcatcagtctgtatgaagacatccttagacctaacggattttccattgagggtcttgaaaacctggacggctttagttgctataccgatacgcagcagatcaagaatgcaattaagagaatattcgagatgttcgtgaatggggaatacaagaactacaacaagatcatcatagaaaggagttccaatctgacagggcagtcctttcacttgataaagattactcaactgaactctttcatcaagagatctggggatgaccccaaaattaaagagcctacaggtgatttggggaatatcatcgaactgctcaaaaatcttgcagactactccattgttagcaagtttaataacaaggattgctaccgaattaactacctaagcgccgatcagaaagatcagatcgaaaagattgactgtaacgagataaatggctttacacacgagatcaagttttacctttga

SEQ ID NO: 7472 - RNA, 1203 nt, synthetic construct
  source 1..1203: mol_type = other RNA
atgactttcgagaaaacatacatagaccagatcaaggaagattttgccaatatgcaagacgtttcggacctggccgtggtgctgtctaaagctcgaaatattctgtacgataaagagtgtaaaccattcaacagcgagacactgtattattttgcctacccccagaactgcaagcatcggttcaaagagttttcaatcaagaagaagagtggcgctattcgcacgatacactcacccactcgggaacttaagtctatcttacgcgccctcaattttgtgtttcaatgtatcttcaccccgcatagtgcagctactggcttcgtccctaagaaatctatcgtcgacaacgcaaaaaagcacacaggaaaacactacgtgctcaatatggacatgaaggattttttctactccttcgatcggaatagggttaagatggggttcctggcggagcccttcaacctcaagggaaccaaggagccaattgccttcctgattgcttgcctttgcactcatcctgtcgaaataggaagcgaaatcattcacgtgctcccacagggaagcccttgctcccctattgtgaccaacatcctctgtgcccgcctggatagaaggctaaagggattggcaaacaggcatggtgtggtctacagccgctatgcagacgacattacgttttcctcactgcacaacgcctttaacagagaagcggagcccgtgatcggcgagaagggtcactataataacttcatcgccgagttcgagcgtctgattgggcaggagaagttgaatattaaccacaagaaaactcgtcttcaaaagagtggctactgtcaggaagctaccggcttgatcgtgaatgagaaagtcaacgttagacgacggtatgtaaagcagttgaggatgtggttatattactgggagaaatatggctacgaaaaagcagaacagattttcaagagggattacataaccgacaaaggccacgtgaaaaatatcaacgcgcatctggtgaatgttctggatggtaaactagagtttctgaagatggtaaagggggccgaagacggtacatataaagggctgaaggaaagatttgacatcttagtagggtttacagatccaataaatcagatccttaacgcttggcaaaccgaggggattgatcaggccatgtccatctattacaaggacaaactcgaatga

SEQ ID NO: 7473 - RNA, 1203 nt, synthetic construct
  source 1..1203: mol_type = other RNA
atgaagatcgaacaggccaacatcaatcaaatccgcaaacagttctcggagctccaaacaagagaggacttagccaaacttttgtccgacgccaagaatatgctgtacggggaaaaatgctctcctgttcagctgaaatcactcacatactacgctaacccgcttatatgcaacgatagatacactaccttttctatccggaaaaagagtggggcatcccgaacaattcacgccccagtcaaaggcctaaaatcaattctccgcgctctcaattttgtgctccagtgcatgaccgaaccccatgccgccgcaaccggatttgtacccgacaagagcattgtcgataacgctgctcgccacgtgggtcatagatacgtgtacaacttagacttgcgtgactttttccatagctttgaccggaaccgcgttaaactggcctttatgaatgagcctttcaatctacgggatggccgcgaacccctcgcattcttgctggcttctttgtgtacgcaccctatggagatagagggggaaatcaaaagtgtgctgcctcaaggatctcccactagcccaacactaactaacatcctgtgtaaaaagcttgaccgtagactgtccggtctggccaagaggttcggagcaacctatacccgatacgctgatgatatcaccttctccgctgatagaaacgtgttcaatgatgaggagttccttaatgagctgcgccgtatcatcgaggacgaccaaaagcttgctattaacccacagaagaccaggctgcagaaagccgattataggcaggaagcgacagggttggtagttaatgaaaaggtgaacgtgaggcgacggtacgtcaagcagattaggatgtggttgtattattgggaaaagtatggctatgagactgcatcacggcactttggcaagttttacagagcggacaagggccaccttaaaaagagtaatgcccagctcatcaacgtcctggatggaaagctggaattcctcaagatggtcaagggagcggacgatagcacttacaaagcactgaaaaagcggctggataagttaacaggcattaagcagaaaactgacgcagagaaggtggatctggacttagttgtggacacgatactgattaaaggtctggatgccgggatagagctgtatgagaggttcaagaataccctcaacgacggctga

SEQ ID NO: 7474 - RNA, 1170 nt, synthetic construct
  source 1..1170: mol_type = other RNA
atgcagatcgagcagaagcatatcgacacacttcgggcccactttgcagagatgcagaacaaggaggagttggctctcttactgtcagccgccaagaatatcctctatgggaaagtgtgtaagcccatttccgttaagagcctcaattattacgctaaccccgaatattgcaaacagcgctacaaaaccttcgccataaaaaaaaagagtgggggaactcgcactatacacgcacctgttgaaggactcaagactaagttgagagctctaaactttgccctgcaatgtttgtatgatccccataaggctgcaaccggattcgtcagggaaaagagcattgtggacaacgctaagtgccacgtggggcacaattacgtgttcaacatcgacctgaaagatttcttccattctttcgaccgcaacagagttaaaattggctttatgtctgaacctttcaacctgaatggcgaaaaagagccacttgcgtttctcttggcctccctgtgtactcacccttttgagatcgacggtatccaacagatcgtgctgccccaaggttctccaacctcacctaccataacgaatattctgtgccggaagctggatcataggctgagcggactagccaaacggttcggtgcgacatatactaggtatgccgatgacatgaccttttcgtccgaccacaacatttatgggaatgaagacttccggaacgagcttgtgcgaataattgaggaggaccagaagctgaagattaatccagataaaacacgtctccagaagacaggctatcgccaggagacaacaggtttagtcgtcaatgataaggtgaatgtaacccgtcgatacgttaagcaaatcagaatgtacatctactactgggaaaaatacggatacgagaaggccgagcaggtctttaaaaaggattacaccttagacaaagggtcaactaaaaagaaaaccccaagccttatcaatgtgattgatggcaaactgaacttcctgaaaatggtcaagggaagtgaagatggcacgtataagggcttgagggggagattcgattccctcgcaggcgtatttgacccgattaacgaggtgcttgacgcgtgggaaaagaacggcatcgatgaagcagtgagtctgtactttaaactgaatgctgactga

SEQ ID NO: 7475 - RNA, 1275 nt, synthetic construct
  source 1..1275: mol_type = other RNA
atgaaaatagaacaacagcacattgactttgtgaaagaggagttcgccaagatccagacgaaagaggatctgctgtgtctcctgaacaatgctaagaagatcatttataagggtaagtgcactcccatctccctgagacagctaacctacttcgctaatcctaacttttgcaaagaacggtataggagcttcacaattaaaaagaagagtggcgccgaccgtctcattcatgcgccagagaagggactaaagtccatcctgcggcctcttaacttcattttgcagtgtatagacgacccccacaagagcgcaacaggcttcgtgctggacaagtcaatcgttgataatgcaaaaaagcatatcgacaagccttacgtctacaacatcgacatcaaggactttttccattcgtttaccaaatcttgggttaaatatgggttcatgacggctccatttaacctgggtaaggaaaaagaagatctcgcctttttgctggcctctctgtgtacccacccatttgaaattgacggcaagatacagaacgtacttccgcaggggtcacccactagcccgacaatcactaacatattatgcaaaaggctggatcgccgcttgtccggattggctaaaaggtttggcgctacctacacaagatatgcggatgatatcacattctctgccatgtacaacatcttcaaggaggaggaaaatcctcaacttaatgaaaagggtcgttacgacaacttcattgcagaattagagaggctcattacccaggaaaatctcatcataaaggaagagaaggtcagactgcagaataaagacgcacggcaggaggtgactggactcgttgtcaacgataaagtcaatgtgagacgccggtacgtgaaacaattgcgaatgtggctgtactattgggagaagtacgggtataacaaggcaagtgaaatcttttcccgagactataaggccgacaaaggacacgtaaagaaagggaccccaaatttcgctaatgtcctggatggcaaactgcagtttttaaaaatggtgaaaggggagcaggatgcgacctataaaaaacttaaagagaggttcgatgtgcttaaggccgagattgaccctattaacgaggttctcgatatttgggaggaggaaggaatcgagaaggccatggatttttacagcaagcgcaaaaaaacacaacccaagaagaagaagaatcccgtggtgcggactatgaccatggaaaaactgatggccctattcggcaagtga

SEQ ID NO: 7476 - RNA, 1179 nt, synthetic construct
  source 1..1179: mol_type = other RNA
atgaatattgagcaggccaaggtcgacgagatcaagaagctctttgccgagatgcagaccaaggaggacctcgtttccttgctgaactttgccaataacttgctgtacgacaatgagtgtctgctgataaatcccaagacgctttcttactacgcaaaccctctgatatccaaaaaccgttacagggagtttaccatcaagaagaaatcaggctctaataggactatacatgccccggtgaaggaacttaaacatattctgagaagcttgaacctcgtattacagtgcgtcagcgatcctcacccgagcgcaacagggttcgtactgaacaagagtattatcgacaacgccaaaaaacacgtgggtcaccgctatgtgtataatctggacctgaaggactttttctattcctttgatggaaattccctaaaactagctttcatgtacaagccttttaatctcaatggagaacgggagtacctcgctttcttgctggcctcactgtgcactcaccctatcgaaattgatggcgagatcaagttcgtgcttccccaggggagtccaacctcaccaacactcactaacattttatgccgaaggctggacaggcggctttccggtctggctaaaagattcggcgcagtgtacactagatatgcggatgatattacgttctcgagctatcacaacatttttaagaaggatgagaaccctcagctcaatgacagagggtgttacgataattttatcgcggaactggaaagactcctgcaggaggagggcctcaaaataaatccacaaaaaactcgcttgcagaagtctggctggcatcaagaagctacagggctagtggtcaacgaaaaggttaacgtcaaacggcgatatgtgaaacaattaaggatgtggttgtactattgggaaaagtatgggtacaaaaaggcagagcagatcttcatccaagactatatctctgatcgaggacatgtcaaaaaacgcaagcccaatcttgccaacgtgatcaagggtaagattgaattccttaaaatggtgaaaggctgtgaagacagtacataccagggactgcgcgagcggtttgataaactggttctgaaccagccacccaagaagaccgaaaaaaagaccatcacaaccaatgttttccgtcccagcaacgagtga

SEQ ID NO: 7477 - RNA, 1200 nt, synthetic construct
  source 1..1200: mol_type = other RNA
atgaaaccggaaccgcaccaaaatcagcaaatcagagaggcctttgcagctttgcgaacgaaaaaggatctcgcagagttgctgaacctggctaatcaatttctctatggggaagaggccgctcccctttacctaaaaactctgacctattatgccgatccacgcaaggcaaaggaccggtatcagacgtttactatacaaaagaagtcaggtgctgaaaggctaatacacgctcccgtgaagggactgaagacaatccttcgcgccttaaatttcatcctgcagtgcattcactcccctcatcaagctgccacgggttttgtcactgataagagtatcgtcgacaacgcgaggcagcatattggatctccatacgtttacaatctcgacctcaaggacttttttcacagcttcgacagaaaccgggtgaagctggggctcatgtatgcccccttccatcttaacggccctcgggagccccttgccttccttctagcaagcttgtgcacccaccctctggactgtgacggagaggtgcgcacagtactgccacagggttctcctacctcgccaaccctcacaaatattctgtgccagaaactggaccatcgtctcaacggtctggcgaaaagattcggcctcgtgtacacaagatacgccgatgatattactttttcatccgggtacgattgtttccgaaatcccgagttccagtccgaactgcgtcggataatcgaggaggaccagcagctgcgcatccaccctgacaaaactcgtttgcagcgccttggctatcgacaggaagcaacaggcctgattgttaacgaaaaggttaacgtccgcagaaggtacgtgaagcagctgagaatgtggatttacttttgggagcggtacggatacgctaaagcccaacagatcttcctcagggattatttaagggacaaagggcatctgaaggatgtgagtaccagctctcttcagcaagtctgtagtgggaagctcgaattcttgaagatggtgaagggaccagaggatagcacataccagcagttagcttcccggtttcacgccctgaccaccaaagagaaagcgtctgcctcaggagcaactaatctggaaagggtagtggatacaatcttaggccagggcctggagcagggcctgagattgtatgacagcttcaaaaccaacaaaaggtga

SEQ ID NO: 7478 - RNA, 1173 nt, synthetic construct
  source 1..1173: mol_type = other RNA
atgaacattacgcccgagcaagtcaagcagattacaacccagctggctgccgtggaaacaaagactgatcttgctgcccttttatccgaggctcagaatattttacatggtaagacatgcaagccgatcacagccacagctttcgcctaccacatgaatccctacatgaacaaaaatcgatataggaacttcaccatcaaaaagaagagcggaggagcaagagtgatatatgccccaactaacgacttgaaggcaatcttgagagccctaaacctgattctgcaatgcatgtatacgccagctcgcgtagttacgggtttcgttccagggcgctctatagtggacaatgccaaatgccacatcggacacaggtatgtgtacaatattgacgtcaaggacttctttcactcctttgacagaaatcgggtgaaattggccttcatgtatgctccctttaaccttagagacaaacgggaaccgttggcgttctttctagcaagtctctgtactcaggcgttccgctttcccggcgaggtggtaaaggccatcctggttcagggctctccaaccagccctaccctcactaacatcatctgtgctaccttggacaggcgcttaaccgggctcgctagaaggttcggggtcacctatagtagatacgcagatgatattacattcagctccgaacattgtccttacaaccgagaggacttccagcgggagcttctccgaatcattgaggggcagggcctgacactgaaccctgataaaacccgactgcaaaatcttgcacaccggcaggaagtgaccggcctgatcgtcaacgagaaggttaatgtgcggcggcgttacgtgaagcagctgcgcatgtatctgtattacctggaaaagtacgggttttacaaagccgaggccatttttctcagagattacctcgcagacaggaagcataacgtgaaaggcaatcctcaaatgctcaatgtactagggggcaagctggactttctgaggatggtcaaaggtcaggaggattcaacttacatatcgctcctgcagcgttttcagaggtttgatttccgccccactaaaatatcaaaaaccctggatgcgtgggaaatgggaggaatcaaggagggtatgaagatctactatggccaagataaggaaaaatga

SEQ ID NO: 7479 - RNA, 1332 nt, synthetic construct
  source 1..1332: mol_type = other RNA
atgaaagcaacggaagcacagcgcgaggagatcaaatcactggtggcggagctgtcctctaaaaagggccttgttaaccttctgtctaaggccaggacgatgctatacgggcaggaaactaagccagtcaaactcaaactgctgacatactatgccaatccaactatttgtcctcgaagatacagaaagagtacaatccctaagaagtccggcggtgtccgcacaatacacgccccagtgaaagggctcaaagcgatcttacagcccctgaatttcgtactacagtgcatgcacacaccccactgtgctgctaccggtttcgtccaggggcgcagcatcgtcgataatgccaggaaacatgttggacaaaactacgtactcaatttggacctaaaagacttcttccactccttcaaccggaatcgagtgaagctggggtttatgtttggtcctttgcagctcaacggcagcaaggagccactggcctttctgctcgcatcgctgtgcacacagcctctgtacgaaaacggagatattaaggttggtcatcgccccccgagccggtttgtgggagagtcaatttttatgtccgaagacgatcctaattacgagcttatcatgcagattctgcaggagaacgaggtcataaactccaaacgtagagtgaagcttaggattgctagaggcgctgtgaagactgtcctgccacaaggaagtccgacctcaccaaccatcaccaatatgttgtgcgagaaattagatcgaagattaactggcctgggcaaccggtttggagcaacgtattctcgctatgctgacgacatcaccttcagttctctccataacatttataaccaggacgaattcaacgatgagttagtgaggatcatcgaagaggaccaggggttcaaaatcaatcccaaaaagacccggctgcagcgcaggggatactgtcaagaagtgaccgggttgagcgtcagtgagaaggtgaatgtgaggcggaggtatgttaagcaacttcgtatgtggctttattattgggagaaatacgggatcgagaaggcagaagatatatttgctcgggattatgtgggagacaaaggccatgttaagatgcacgtgcccgaaatgagcagagtgataggagggaagctggaattcttgcgtatggtaaagggcgaaacagatagcacctatctgggcctgaaggacagatacgaaaagttgatgctccccctcgaccctctcactaagattctcgatctgtgggaagagaaaggtattgacgccgccatgaatgcctactacggcgaggaggtaactgaggagtga

SEQ ID NO: 7480 - RNA, 1191 nt, synthetic construct
  source 1..1191: mol_type = other RNA
atgccaatcaaccaggaggataaggcatacattcgagacaaattcgcggcgatgcagaccaaagaggaccttgttaatctcctgtcggaagccaaggatatgcgttatagagagaggaccaagcctttcaaactgaactactttacatactatgctaacccgaagctgtgcaagcaacggtacaagacttttacgatatcaaaaaagtccggcggacaaagggtcattcatgccccagtaatgggccttaattttctgcttcagagtgtcaatttcgtgctcaattgtatgtacgagccccacaaagctgccacaggttttgtgcctgaaaaatcaatcgtggataatgccagaggacatgccgagaaaccttttgtgtataacattgatctgcaggacttctttcacagctttggcaaaccacgggtgaagtacggcttcatgcgctccccgttcaacctcaacggcgacagggagtatctggcattcttgctcgccagcctatgcacacatcctttcgaagtgaacggggaggtgaagcgagtgctccctatgggatctcccacctctccaaccattacgaatattctctgtcacactctggacaggcgcttaaacgggctcgcaaagcgcttcggcgcaacatactcccggtatgctgatgatataaccttcagtagcatccacaacatctatcgcaaaaaggacttccaaaaggaactttacagaatcgtggaggctaaccaagggttgaagatcaaacccgaaaaaactcgtttgcagaaagagggttacagaaaggaagctaccggattggttgttaacgagaaagttaatgtgaaacggaggtacgtcaaggatttacgaaagtggctgtacctgtgggagaagtatgggaatgagaaggcccagcagctgtttaccaaagactacgtagccgataagggacacgtcaagaaaggagaacccaaccttgaaaatgtcttggacggcaaactggactttatgaagatggtgaagggcgtgcaagacgggacatatctaaagctgcgggaccgctttgataaactaactcagcagtcctcaacatctaatagtaagaaggtaagcttagacgatgtcctggatactatactcaatcagggtctgatccaggggattgacctgtatcagaagctgagaaaaccctga

SEQ ID NO: 7481 - RNA, 1176 nt, synthetic construct
  source 1..1176: mol_type = other RNA
atgaagctggaaaagcagcatactgagcagctgattaaacaattccgcagcctcaaaacaaaggatgatctgctggttctgatcaacaaggtaaatcttctgttgtacggtgatgactttaaaagtcttacactgaagggcctcaactactacacaaatccaaactatagtgataagcgttactcgtcattctctatcaaaaagaagtctggcggtgagagaataatcaactctcctgtgaatggactgaagcatatactcaagcccctcaacgttattttaaattgcattgccaccccacacccaaaggctactggcttcgtcttaggcaagtctattgtggacaacgctaaacaacacgtgggcaaccattatgtgtacaacattgatctgaaagactttttccacagctttgaccgcaaccgggtcaagctgggcttcatgtaccccccttttaatctcagtggagacttggagcccctggcttttctgttggcctccctgtgcactcaccccttcgaagtagagggtaaattgaaaacagtacttcctcaaggagccccgacctcccctaccatcactaacatcttatgtgtcaaactagacagaagactcaatgggcttgctaaacggttcaaggtgaattatagcaggtatgcagacgatatcactttttccagccatgtgaatgttttcaagaatgaggtcttcctgaaagaactgaatcgaatcatcgtggaggaccagaatctaattctcaacgataagaagaccaggcttcagcagactggtacgaggcaggaggtcacaggcctgactgtcaatacgaaagttaacgtgaattccaagtacattaagcagctgcgcatgtggctttattattgggaaaaatacgggttcaacaaagcggagtcaatatttctgagggactacgcaaaggataaagggcacataaagacagggaaaccaaattttcagaacgtgctaatgggaaaactcgaatacctgaagatggtgaaggggcacggagactcaacctatgtgaagttaaatgcaagatttacccgattgacccggacagaaagcatgctcgaaaaaaccttgatggcctgggaagagaacggaatcgagaaagccatggagatctataagttcaacaacacgaccatgttttga

SEQ ID NO: 7482 - RNA, 1170 nt, synthetic construct
  source 1..1170: mol_type = other RNA
atgaagctcgagaaacaacacacggagcagatcatcaaacagtttaaagcgctgcgcactaaggacgatttggttgtcctcattaataaagtcaacctaatcctgtatggcgataagtttatcagtcttacagtgaagggacttaattattacgccaaccccgaatattctgataagaggtactcatctttcagcataaagaaaaagagtgggggtgaaagaatcatcaacgccccagtgaatggacttaaacatatcttgcggccactgaatattattctcaactcaatagccatgcctcatgctaaggcaactgggttcgttctggggaaatctatagtcgacaacgcccaggcacatgtggggtataactacgtatataacatagacctcaaggacttcttccactcgttcgatcgcaaccgtgtgaagctcggctttatctgtgcaccctttaatttaaatggcttgctcgagccaattgctttccttctggcctccttgtgcacacacccgtttgaaattgatggcgtcattaataccgtcctccctcaaggagctcccacatcccctaccataactaatattctctgcgtgaagctggataggcggctgaatggcctagcaaaaagatttaaagccaactacacacggtatgcggacgatattaccttcagctgtaacgtgaacatctttaagaacgacgagtttttaaaggagctgaacagaattatcgctgaggaccagaatctgattctgaatgacaaaaagaccaggctgcaacagactggtaatcgacaggccgttactggactaaccgtaaacacgaaggtgaacgtgaatagcaagtacattaaacagctgcgcatgtggctgtactattgggagaagtacggttttaataaagcagaaagtatcttcctccgagattacgccgtggagaaggggcagttgaagaaaggaaagcccaacttcaagtcagttctgggtgggaaactggagtatctgaaaatggtgaagggcttcaatgactccacctacttaaagttgaacaccaggttcacaaaactgtccaaaacagaaagcaaacttgagcagaccctgaaagcttgggaaaacaacggcatcgaaaaggctatggaaatctacaagcttgccaagatcaattga

SEQ ID NO: 7483 - RNA, 1188 nt, synthetic construct
  source 1..1188: mol_type = other RNA
atgggctttaagtcctttataaacctcatcatgaagacaaccaaagaggacatcgccctgatccgagaaaagtttaattccttgtctaccaaagaagacctggtgaatttgcttaatgtggccaatgtattgctgtatggtgaggacgcgttcactctgaaagagtcgacactggcctattatgctaatcccgctttctgcacggaacgatataccagcttcgaaataaataagaagtctggtggaacacgcacaataaacgctcccgtgaagggccttaaaagcattctcaaaactctgaactttgttctgcagtgtatcagcgaacctcatcacaaagcaacggggttcgtcatcaataagtccgtagtgacaaacgcaaagtttcatgtggggaaccattacgtctataatatcgacctaaaggattttttccacagcttcgatcgcaatagagttaaactcgggtttatgcaaaaaccttttaacctcaacaaggatagagagcctattgccttcctattgtcatgtctctgcactcacccgttcaaagtcgacgataatctcaagatagtgctaccccagggagcaccaactagccccaccatttccaacatcctgtgctctaccctggacaggcggttaaatggacttgccaaaaagtttaagatcaactacagtcgttacgccgatgacataacattcagctcacaggtgagtgtgtttaaacgtaaagattttcagaaggagcttctcagaattatcactgaggatcagggcctcgttctgaatgaaaaaaaaaccaggctgcaacagtctggctacaggcaggaggtaactggtttgatcgtcaacgagaaggtgaatgtgtcccggcgctacatcaagaaccttcggatgtggttatactactgggaaaaatatggcttcaagcgggcggagattattttcaagaagaattacatcctggacagaggacacattaaaaagtccgaaccaaacttcattaacgtcatcaccgggaaactggagtatctgaaaatggtgaagggcccattcgactcaaccttcattaagttaaacagtaggtttgaactgctgcttcagaatgagtcaatgctggagcagatcctcaaggtttgggagaaccaaggaattgaaaaggctatggagttgtacaacaagtga

SEQ ID NO: 7484 - RNA, 1395 nt, synthetic construct
  source 1..1395: mol_type = other RNA
atgaataacgacaacaaggattaccaggttagtattctcaaagagttcataaagatcgacaaaatggagattcagcagaagcacatagagaaaatgaagtcactgttttctaagatggagaacaaacaagatttggttaacctgctgaacggcgtctataacctcctatataagaagaacgaaacgaccgacaattcctatgatcctttcaagattgtatctgacaccaagaccgtgtattttaatttgatgttctcagaggaggagttcaatctgaaatccaagaccaagaagaacacttatattcagctgtccagtcttagctactatgccaattatagcctgtgcaagaaaagatactcccagttcaaaattaagaagaaaagtggggcagagcggattatcaatgctcccgtggaagggcttaagatcatcttgaaactgctcaattttgttctgcagcacgtgtacaaaccgcataaatccgccaccggattcgtgctcaataaatcaatcgtcgacaacgccaaaaaacacatagactcgaattacgtttacaacatcgacctgaaagattttttccacagctttgatatcaagcgcgtaaagctcggtttcatggaagagctgttcaatagcaaaaccgacagagaacccctcgcctttctgttagcttgtctctgcacacatccattcgaggtcgctggagaaattaagaacgtgctaccacagggctctcctacatcccccactatcaccaacattctctgtaaaactctggataatcgactgactgggctggcaaatcgatttggcttgaggtacacacggtatgccgacgatataaccttttcttctcagcataatgtgtacaacaaggaagattttcagaaggaactcaagcgcatcatcgagaataaccaaaatcttctgatcaaccacaaaaaaacgagactgcagaagagggggtacaagcaggaggtaacaggattagtggtgaatgacaaagtcaatgtgaggaaacggtacgtgaaacaagtcgacaagtatctttacttgtgggagaaatatagtttcgagaaggccaaacagatcttcatccgtgaatatccacaggagaaagcgcatttaagaaactacaagcccaatctcacaaacgtcctgcgcggcaaattagactttcttaaaatggtgaagggagcggaagatagcacatacctaaagctgaagaagcggtttgataagcttactggtaagcagaaccctatcaacgagattctggacatctgggagaaagaaggcattgagcaagctattaaggcatttgaaattgccactgaagtgaatcaaaacagcatagatttgtcaaagttcttcaagaacgaaagggattga

SEQ ID NO: 7485 - RNA, 1554 nt, synthetic construct
  source 1..1554: mol_type = other RNA
atgaaaattgaacagcagcatattgagttgattcgcacaactttctctacactgcagacgaaagaagatctgcttagcctgttgaacctggccaacacactgctctatccaaagaactcattcaaattcgagttgaaacagctcacctactttgcaaatcctaagctggttaaaaacaggtacgccgagttcaccataaaaaaaaaaagtggcgccaatcgaatcattaatgctcccacccaggggcttaaatccatcctaaagacattgaatttcgttttgcagtgcatgtgtgaaccgcacaaggccgctaccgggtttgtaagaggtaagtccattaccgataatgcgaaaaagcacatcgacagcaactatgtctacaacatcgatctgaaggactttttccattccttcgatcttaacagagtcaaactgggatttatgcagaccccctttaatttacgcaatgagtcgtttccaatagcatttattctggcctgcctgtctacttatacattcaagattgacggtgaaatcaagcaggtgctacctcagggatcccctacctcaccaacgataactaatattctttgtaggaggctggacaaacgcttaactggcctagccaatcggtttgggcttaggtacacacgttatgctgatgatatcaccttctcctcacagcacaacgtatacaacaaggaggatttccagaatgaactgcacaaaatcatagtgaccgacgagaagttcgcttttaatacaaagaagaccagactgcagaagcatggctaccagcaagaggttacgggcctcatcgtgaatgaaaaagtgaacgtgcggtcccgttacgtaaaacaagtgagaatgtggctctactattgggagaaatatggatacaacaaggcagaacaagtcttccggaaagattacatcaaggataaaggacatgtcaagaaaacccttcccaacctggacaatgtcttagaggggaaactcctctttttgaaaatggtgaaaggcgagtacgacggcacttacatgaaactccaaaacagattcgagaagctcaataggaagcaaaatcatattgacgagattctggcgttatgggactctaagggaatcgatctcgccaagaacaaattctataacaacgacgatgacgatgaaaatagccacaacactatagtgactgacacagagaagctgagtaagatcaacgaaacagataagcaatatgacattgccaatttttgctttcggaacattacagggttcaagaagctatacctgaagaaagtgattatcgaccacgatatcctgtataagtattgggagaactcatctcgcacgatgatcctggtttcggaagaagcttttaaggtgctcagtgaagcaagcaattttgacagcaaaaatatcgtccagagcatcgaaaagtacaacatcagtgagaataagaagaccaaaaagactgagaagggtgactacaaccagcgatctttctttgtgaaaaagaagagcatagagaagtataagctgatgttctga

SEQ ID NO: 7486 - RNA, 1212 nt, synthetic construct
  source 1..1212: mol_type = other RNA
atgaagactaacccagatcagaaaacctacatacgaaagaagtttgctgccatgacctgtaagagggaccttctggttttacttaatgaggcccaggggatgatgtacggagagaaaggtaggcacttcaggctgaaagacctgacttactacgcgaaccccgatttgtgtaaaaaacgctattccacgttcattatagccaaaaagaacgggggagagcgtacaattaacgcacctgttaaaggactgagaattattcttcggagcctaaatttcattctgcaggctattagtgaaccccatgcagcagctactgggtttgtccctgatagatccatcgttgacaatgcgcgcgcccacgtggggaagcactatgtgtacaatctagatattaaggacttcttccactcttttgaccgcaatagggtgaaaatgggcttcatgagaaagccgtttaatttgaaggcaaatgagaataaggagaagctcgcattctttctttcgtgcctctgtacacacccttttgaggtcgaaggagaaatgaaaaccgtgctcccccaaggatctccaaccagcccaacgatcacaaatattctctgcaagaacttggatagaaggctcaacggcctggctaagaagtacaacctgtcctttacccgttatgccgatgatataactttctcatctagccataacatctttaaggatgaagagttccagaaagagttacaacggatcatcgaggaggaccagcaattagttatcaacccgacgaagactagattgcagaagacctgctaccgccaggaggccactggcctcatcgtgaacgaaaaagtcaatgtgaaacgggactatgtgaaacagctcaggatgtggctgtattattgggaaaagtacggtgaagtacgcgctgaacagatcttccagcggaactacaatctggacaagggtcatgtgaagccagagcatcccgggatggctaacgtaattgccggcaaactggagttcctgaaaatggtgaagggcgacgaggaccctacctacaagaaactccgggagcgatttttgaagctgcaccctggcagtccctttgtcgaaaaactgctgcaaacctgggaaacaagaggcatagatgaagccatcaagatccatacactacgaatcaaaacatcaaaggtcatccttaataccaacatgtatacactgtga

SEQ ID NO: 7487 - RNA, 1209 nt, synthetic construct
  source 1..1209: mol_type = other RNA
atgaaggccagcccagatcagcagacatacataaggaaaaagttcgcactgctggaatccaaagaggatctgctggtgttactgaatgaagctaaacgaatgatgtatggagacgagtgtaaggtattcagacttaaggcactgaactattacgccaatcctgacttctgcaaaaaaaggtatacatccttcgacattccgaagaaaaatggagccaaacgcatcattaacgctcccgtcaaggggctccgtagcatcttgagagtcttgaactttatcctgcaggcggtctacgaggctcatccagccgccaccggattcgtgcaggagaagtcaatcgtcgataatgcacagcctcacgtggacaagcactatgtttacaatcttgacctgcaagactttttccactcctttgataggaatcgcgtgaaactgggattcatgaagaagccattcaatctcaggaaggaccggaacaaagaacaactggcattttttctaagttgcctgtgcacgcacccttttaagattgacggcaacattaagactgtcctgccccaaggctctcctaccagccccaccatctctaacatcctgtgtcgggacttggaccgacgcttgaaggggctggctaagcgttttaacctaaattttacacggtacgctgacgatataacttttagctcttcccataacgtgtataacaaaaacgagttccagtctgagctcactagaatcattgaggaagatcagctactcaaaattaatccgtcaaagacaagacttcagaagaccggctttagacaggaggccacggggttagtggtgaacgagaaaataaacgtgcccaagaattataccaagcagctccgcatgtggttatactactgggagaaatatggcaccaagaaggcggaacaaatcttcacccaggattaccttaaagataaaggtcatgttaagcccgatcacccagagatggaaaacgttttggcaggtaaactcgaattccttaagatggtaaagggtacagacgatcctacttataaaaaacttcagggcaggttcctgaagttgagtatggggtcgccattagtggatcgggtgctcaaggtttgggacgaagagggcctgaataaagccatggaactctactacgaaaaaaaggagagttcagaggccctgactacaaccattctgactctctga

SEQ ID NO: 7488 - RNA, 2010 nt, synthetic construct
  source 1..2010: mol_type = other RNA
atgaagatcaaacaaacagagatcaatctgttaagggcacagtttgcagccattcaaagtaaggaggatcttgtgaaaatcctcacaaaggcaaaaaagcttctttacggagagaaggcaaccaaaatccatctcaagtccctgacctactatgccaatcccgccatatgtaaatcccgctataccccatttcacgttaagaagaagagtggggataacagagtcatccatgctccagttaggggcctgagaattgttctcagttccttaaatttcctgctgcagtgcctgcacgaacctcataagacggcgacaggcttcgtgccaggcaagtctatagtcgacaacgcacggatccacaccaattctaactacgtctacaacatcgacctcaaggacttttttcattcattcaaccggaacaaggtgaagatggcctttatgtaccaacctttcgggctgaaaaagtctcaggagcctcttgcctttttgctggctagcctctgcacacacccaatcgagattgacggaaaaacccagatgatcctgccacagggaagcccgacctctcccactctcagcaatatattgtgtatcaaattggatcgtcggctgaatggattagcaaaacgatttggtgctaaatatacacgctatgccgatgatatcactttcagcagctcagataatatttatacccaagccgactttcaggccgagctacaacgaattatcgtggacgatcagaaactgacaattaatgcgcagaaaacgcggttgcagactaaatatgaaaggcagcaagtgaccggcctggtcgtaaacgataagaacgtgaatgtacacagggcctatgtcaagcagattagaatgtggctttattattgggaaacgtacggcaaaattaaggctgagcgcctttttcagcaggactaccagaaatcggccgtgaacgctcagaaaaaggccccccccctgcagagaattctcgaaggcaaactaaacttcttgaagatggtgaagggtaagaagaataacacctacagacgactgaaacaacgctttgacgagttggcatctgttgcagggaataacgacactaagcccaaaaagcctaagaggaagtcatcaaaacccctgccaagacctcaggagacaaaagggttcctttccctgttcaacaactctaaggggctaaaataccttacccacaagttcaatgacatcacccctccagactacactgaatttatggccctctgcaaggaagaattcgaccagggacagaaaaagtatcccaatgtcccgactgctttactggagcgcattcagcagtacacctttgcctccgctcccgagtggtttactcggaagggcgaagaaaagaactaccaccatatgggttggagcgagcctaaattcgtggaatggtatcagaagtcaagtctccaccctgccagtaatgctaaatggaatcaggagatgattctccccttcaaacacactatagaggtgcgggccggctatctgccggcaatcatagatgaggcaattaccctggctctcggggactctcgttcctcatttgatattcagatctcgaatgacacaataaaggtggctgaattctacaccgatgtagataggttccaattagccctataccatatcttcagcactatcaagactcatggcgaggcgaacttttgttacggcctgacaattgatttcattaaggagaaaagcggaagcacacacatcaaaaagctgatcatcacccacgtggactccgaagcgactaagccagctaacgacgaaggattcataaaaggggacctgaacacaattaagacgctcttgtggggattgtgcaactataacatcgaggcgaaatttcccgatgggttccaaagtaagacaatcctggccgataagcagaatctgggtaaatcctccgaggaagaagagaagcatattaaaggtttcacccacatactgaaattttactga

SEQ ID NO: 7489 - RNA, 1281 nt, synthetic construct
  source 1..1281: mol_type = other RNA
atgaaaaacaagatcaccgcactgcaaataagcgagatcaaggcggattttcttaaaattgaatctttggacgacctctgtaatgtcctcaaccttatcaacgagcttacccagttcaaaaacaagattgagataaaccagctagttaagctgtcaaatccctccctggccaagaatcgctacaaagagttcacaattaagaagaaatcggggacaaatagaacaattaacgccccaattagggagctgaataccatactcaagtctctgaataacctcttcaatctgatttacaatccgcacaccaatgcatttgggttcgtgaccgggaaatccatcgtggataacgctaaaatacacaccaacaaaaagtacgtgtacaatatagacttgaaggatttcttccatagctttgaccggaatcgggtcaaaatgggtatttggtatcagctgttcggcggagataagtccaaggaaaagattagcttcatcctcgcatgcttgactactcatccacttatgatcgacggcgtctcaggaatcgtgctcccccaagggagtcctacaagcccttttctcacaaacctgctatgctacaaactggatagacaactgaaaggactcgcgaaacggtttcgattgatgtactctcgctacgccgacgacattacattctcttcgaattacgacgtttattccaatcctacttttacactagagctgaacaggataattaccacgcagaatctggtgattaaccccactaaaacgcgtctgcaaggcaacgggtaccgaaaagaagtcaccggcgtgatcgtgaacgagcagattaacgtttctcagaactatatcaagcagctgagaatgtggatctattacatcgagaaatatggaattgagaaggccaccgaaatcttcaagaaagattatgccaaggaaaagggtcacatcaagagtatgcaggccagtatgcagaatgtgattgaaggtaagctgttgtatctcgagatggtaaggggcaaagacgacaagaagtttctgacgttgaaaagacggttttataagtccatcggaaaggtgtccaagatcgacaaagtattaattgcttgggatgagaaaggcataagcaaggccatggacatctactataactacaaccgcatctcattagctgccttcctggataatgatgcaactaatgtcatcttagatgaacttcgttttgaagctaaggatagtaataacaacaggaagaaaagcaacatcatctttactctttga

SEQ ID NO: 7490 - RNA, 1278 nt, synthetic construct
  source 1..1278: mol_type = other RNA
atgaaaaattccctgactgtggcgcagattactgagattaaagagaacttcctgaagattgaaagcctcaacgatctgtgcatcgtgctcaaccagactaacgagctgactcagattaaacataccattgaggtggagcagcttgctaagctgagtaatcctgcactagccaaaaatcgatatagagagttcaccattaagaaaaagtctggtgccgataggaaaataaacgcacccatctcagagttgaacctgattctgaaatcactgaatcagctcttcaactttatttacactcctcacacaaatgcctttggatttgttagcggaaagtccatagtagacaatgctaagatgcacactaataagaagtacgtgtataacatcgaccttaaggatttctttcacagtttcgaccgcaatagagtgaagatgggcatatggtatcagttgtttgagggtgataaaagcaaagagaagatcagctttatcttagcttgccttacaacgcatcctctgatgatcgaaggcgagacaaagatcgtgctcccacaagggtcccccacctctccatcgttgaccaacctgctctgttacaagctggatcgacaattaaaagggttggccaagcggtttaagctgacctattcacggtatgccgacgatatcacgttttcttctaactatgatgtgtatagcaaccccatatttacactcgagctgaatcgcatcatcaccgctcaaaatctgatgataaacccggcaaagacccggcttcagggaaatggctataggaaagaagttacagggattacagtcaatgaatacgccaatgttagtcagaagtacgtcaaacagcttaggatgtggatcttctttattgagaaatacggcatagaaaaggccacagaaatcttcaaaaaagactactccaaggaaaaaggacatgtcaagtcgatgaatgcctctatgctgaacgtgatcgaaggcaaactgttgtacctaggaatggtcagagggaaggatgatgaaaaattcctcaccctcaaaaaccgtttctacaaatcaatcggcaaagtcagtaagatagacaaggtactgaacgcatgggaggaagcagggatttctaaggcgatggatatctactttaacaataagcgcatttccctagccgacttccttgacaacgatgctatcaattccattctcgacatcatgggtttcgacgctgacgacagcaataacaagaagaacagcaacattatcttcaccttatga

SEQ ID NO: 7491 - RNA, 1224 nt, synthetic construct
  source 1..1224: mol_type = other RNA
atgaggacccgcttaacggaagaacaaaaggaggtgatcaaggatcaaaccgctcttctacaatcaaagtctgacttcgtcgccctcctgaacgatgtcgcggtaatgatctatggcgacgatgggaagaaagcctttcacctaaaacacctcacctactacggaaacccgaaaatcagctccaagagatatgcaacattcgaaatcaagaaaaagagcggcaaaacccgcattatacatagcccatccagtggcctgaaatccatcttgaaatgctttcgctacgtgctggaatctgtctatgagccccatcctgccgcaatgggattcgctcccggaaggtctgttgtggataatgcccagaagcacgtgcaaatgctgtacgtctacaacatagacttacaggatttctttcacaactttgacagaaatagggtcaaaatgggactgtggcggaacctgttcaatgttgagaagaacaaggaagaactgtcatttttcctcgccgccctgtgcacacatccaatagagattaatggggaggttaaaatcgtactgccgcaaggttcacctgtatctcctgtgttgaccaatatgctctgtgtgtcgctggatcgcagacttcagggtttggctaaaagatatcggatccgatattcacggtatgcagatgacatcacattcagttccaataggaatgtgtttgtggagactgagttccagcttgagcttcacaggataattgaggaagaccagaagctcaagattaacccagacaaaactagactccagaagcgtggctaccgccaggaggtcacgggagtgattgttaatgaaaagctaaatgtgcatcggaagtacgttaagcaggtgcgtatgtggctttactacatggagaagtacgggcccgaaaaggctgagcagttgtttcgagcggactacattagggagaaaagccacgtgaaaaacattaccaaccctatgctgagcgtactcattgggaaattgcagtatctgaagatggtgaaaggccagcatgatcccacttatctgtccctgctgaaccgattcacaaaattattggacaagagcaactttccactccggcagaaaagtactgacctcgctgacaagagtgccatgctgaagaacaagaacatcattgatctgatcatcgaactgggcgtcgagaaagcacttcagaattatgtgatcaatgaatga

SEQ ID NO: 7492 - RNA, 1272 nt, synthetic construct
  source 1..1272: mol_type = other RNA
atggaacaacaggtgaaacaactgaaagaggggtttttgcagatgcagaccaagcaggagcttgctgacgttcttaatttggcaaagaaggtcctgtaccccaacgacgaccaaaagatagagctaaagaatatcacctatcatggcaacagtaagttcagcaagaatcgatacaaaactttcgtggtgaagaagaagtcgggaggtgagaggattatccaggcaccaaagaaagaattcaagtccattctgaagcctctgaatctggtattccaaaccgtgtttgagccccacaaaaacgcatttggctttgtcccacagaaatccatcgtggataatgccaaccgacacgttagcaagaatttcgtgtacaatctggacctgaaagacttttttcacagcttcgaccggaacgcagtgaaaatgggaatctggttctatggttttaagatggacaaaacgaaagagtctctggcatatttactggcgtgtctgtgcactcatgagacagaaataggaggaaaatctgaatttgtcctacctcagggcaatccctgtagtcctacgctcaccaacctcctttgcaccaaactggatcggaggcttaatgggctcgcccgccgcttcggagccgaatatagcagatatgctgacgacattacatttagcgccaataagaacgccttcaaaaacgaggacttccaaaaggagttgaaaaggataatcgaggatgatcagcagctcgaaatccagcccaagaaaactcgtctacaagggcggaactacagacaggacgctacaggcttaaccgtaaacgaaaaagtcaacgtgcagccaagatacactaagcagatcaggcactacctgtacctctggaagaagtacggctataacaaggctgccactattttcaccgccgggtattcagataatcgcggccatgttaaatctccgaatgcaaagttagaaaatgttctgtcaggtaagctggaatatctcaagatggtgaaaggcgaggacgattccacgtaccagacacttaagaaacggtttgatattctcgccaatagagatgtcgagatagagaagattgtggccatttgggagaaggaagggatcgaggcggctgccaaagctaacgagaagcgtaagcagtcaaaaactgcgaacaagctgaacaacaaaaagttcagtaccttcacagacatcaatgagttgtttgatttctccgatgatttggctgccgaaaaagtagaaacatacggtaaatga

SEQ ID NO: 7493 - RNA, 1188 nt, synthetic construct
  source 1..1188: mol_type = other RNA
atgtctctggatcaagaacaaatcgaagagctcaaacaagagtttctcgccataaagagcaaggaggacctactgattatcctgaacaaaacgagcgctcttttggccaaggacaatccagattttaacccaagccctatcgaactaaagacgttaacctattatgccaatcccaaactgtgtaaacagcgctactctagtttcaagattaaaaagaaggctggcgacgaccgcacaatttatgcgccatgccctgggttaaaacgcattctgaggactctaaactaccttctgcaaatcaccttcgaaagtcacgatttcgcaatgggtttcgttcagggcaaatcaatcgtcgataatgcaatcctgcatgtaaacaagaactttgtgtataacgtggacctcgaggatttcttttactcattcgatttctacaaggtcaagttcgcattcgagggcgccccttttaattttaataaagagaaggagcccctggctttttttctggcgtgtctttgcacccatcccttggagctcgaaaaagggactaaagttacactcccccagggcgctcctacttcaccgtttatcacaaacatactctgctaccgaatggatcggaagttgcggggactcgccaaacgctttgacctggtctacagccgatatgcagacgatattacattttctggtcggttcaacttctctctgagcaaggacttcactaatgaactggagcgtataatcaccaaggaaaagttaaagctgaaaccgtccaagactagaatgcagtcaagcttttataggcagagtgtcaccggtattgtggtgaacgaaaaggtaaacaactataagtcctacatcaaggatcttaggatgtggattttctatcttgagcggcacggactggagaaaacccagaccatatacagacagcgtgtgcaggatgacaaaaataagggcagagacattctgaatgtcatttccggaaaactcctttacatgaagatggtgaaagggcagacaaatccagcttacatcaagctggtggacaggatggaggccttcttgatcgggtccggcaccaagaaagaagactccaagcctaaacccgataaatttgagagagttgtgaattcgctcttgaaagatggagacatcgaaaaggccatgaagctgttcaggtga

SEQ ID NO: 7494 - RNA, 1197 nt, synthetic construct
  source 1..1197: mol_type = other RNA
atgaagctggaacaagaacaagtaatcgagcttcgccgactctttctgaaagccaatactaaggaggatttgctcaaggtcataaacaaatccatcaaataccagaacaacggtacaaaggagtttaagtatatttcgctcaaaacgctaacttattacgccaatgcgaacgtctgtaaggatcgctatacaagctttgaaatcctgaaaaagagtggcagtaagaggaccatccacagcccccatctgattcttaacaagattctgaaggctttgaatctcatactccaatgtagcttcgagccgcaccaggcagccatgggatttgttaagaataggtcgatcgttgataacgccaaataccatctgaaccactcatacgtgtacaacatcgatctgaaggattatttctactgcttcgatcttaaacgtgttaagtttgggttctttaatgtgccattcgatttctctaagaaccaggagtctctggcgtttttcattgcctgcttgtgcacgcatccactggacattaacggcgaacttaagaccgtactgcctcagggtgctgccacatcacccaccttaaccaatatcctttcttacagattggaccgcaaactgactggtttggctaaacggtttaacctgctgtactctagatatgccgatgacataaccttcagtggggacttcgacttcagcaaaaataaagacttcattgctgagctcgaccggattatcacaaaggaagggttcgagattaataaggataaaacacggatgcagtccaaggccttccgacagcagatcactgggctggtggtgaatgagaaggtgaacgtccacaaaggcttcataaagcaattaaggatgtggatccactacattgaaaagtatggcctagaaaaggcacagtccatttttgacaagtcagagatcaaacctctcaatgcaaagtacgaccttgcaaacgtgctcaagggaaaaatagaatttctgaaacatgtgaagggccaggaggatcccacctatatcaaactgaatcagagattgagggcttgtctgataaaagcaggacggattgaagagaacctcactgagaaaaagtcctccgaagacattaaatttgagaaggccatcagcctgttaatcaaacagggagacatcgagagcgctatgaatctatttttcaaatga

SEQ ID NO: 7495 - RNA, 1236 nt, synthetic construct
  source 1..1236: mol_type = other RNA
atgaaaaagctgactaaggagcagaagctctatattaagaactctttcgagaatctgcagtccttagatgacctggtatcgatcatcaactacactttaacagaagtgttcagctttgtgggaatcacaaagaagaacatcctcttcaataccaacccctcaaatcagagataccggtctttcaccattaaaaaaaagaccgggggggagcgggtgattaatgcccccaagctcctgctggtgaggactcaaaaggctctgtctgtgatttttaccatatgcatggagatccaccctaaggcaatgggattcaccgaggggaagagcgttgttaccaatgcccagctgcatattggcaaaaattacgtgtacaacattgaccttaaggatttcttccacagcttcaaaaaatggcagattaagaggatcttcactcaaacatcttttcagtttagtgaggaaatcgccaactgcctgacaaacctgtgcgtctatgctcttgccattgatgacaaaaaagaatttgtcctaccccagggagcaccaacatccccgatactgaccaacattttgtgtagaaagatggatattgcccttgataagctggcaaaaaagtacaaagccacatacagcagatatgcggacgacatcaccttctcaagcaacaaagctgtgttcaataaccctaatttccttcaggaactcgaagctatcatccataagaataaactgcagatcaatcctaagaaaacgaggttacaaaaaaagtcagaacgccaggaggtcaccggtattactgtgaatgaaaaattgaacacgacacggaaatatgtgaagcaaatccgtatgtggctctatctgattgagaaatacggagtggaaaaggcggagacgatctttcgcaaggattatataaaggagaaaggccacatcaagtataatcagaacccaatgttttcagtaatcggcggcaaactgttgtacttgaaaatggtgaagtcccaggaagatagcacttaccagaaactagctcagcgattcgataaaatatgtggctttaacgtcgacaccatacttgacgtatgggagaaggaagggaaagaaaaggcaatggaggtctttgaggccactaagagtgaaaagtggaaaaagtcccaaaacattggtgtttccgtttttgagtttagtgacgatgacgagttgagtgagatgatcctcgacaaggacatactctga

SEQ ID NO: 7496 - RNA, 1320 nt, synthetic construct
  source 1..1320: mol_type = other RNA
atgaagacgctgaccacggaggaaaagcaggaattgaagaaccggtttgaaaacattctcagtatcgatgacctggtcgaggtcattaactacgtgtatcaggagttattggccggcaatgagataagtaaggacgacgtgctctcaaatgcagacttgtctaataaacgataccacacctttagcatacgtaagaaaactggtggggaaagaatcatcaatgcccccgagagttcattggaaaaaatccaaaaggcgcttaacaccatcctgaatgagtgcgtgactgtacatccaaaggccatgggattcgccaaaggtaagtctgttgtgaccaacgcaaggctacatcttggcaagaactatgtttataacatagacctgaaggatttcttccactccttcaaaaagtggcaggtgaaaagagtcttcgcccagtccccgttccagtttcccgaagaagttgccaattgtctgacaaatctttgcgtgtacgatctggagatcgatgacaaaaaggcatttgtcctgcctcaaggagctcccactagcccaattttgactaacattctttgccgcaagatggacattgccctggataaactcgctaaaaaatacaaagccacatattctcggtacgccgatgatatttccttctctagcaatgtgtcagtgtttaacaattccgtctttctggaggagctggaggccataatttccaggaacaagctcgagattaaccctaagaagactcgcctccagaaaaaaaatacaaggcaggaggtgaccggcatcaccgtgaatgaaaagctcaacacaacacgcaaatatgtgaagcaaatccggatgtggctatacttaattgaaaagtacggggccaagaaagcagaaaccatctttagaaaggattatgctaaagagaaggggcacacaaaacccgaaaagaatcctatgctgtcagtaatcgggggtaaactgttatatctcaagatggtcaagggggccgaggacagcacgtacctgaagctcgcacagcgttttgacaaagtatgtggattcgatgctgacaagatcctggacacctggcaacaaaagggagaaaaagaagcgcagaagctattcgaggagactaagaataacaaatggaaaaacctggcggctggccgacctaaaccaaaacgccagaaacttggcaagcatctgatggagaagagcaggtcgatggaggagcaggctgagtacgttgctcagattcggaaaaacatcgcagaaaggcaggcgaagagaaaggctgcaatgaagaaaatcagaggcgaatga

SEQ ID NO: 7497 - RNA, 1182 nt, synthetic construct
  source 1..1182: mol_type = other RNA
atgaaaacccttaccacagaagaaaaacaggagctgaagaacaggtttgagaatatactgagtatagatgacctggtcgaggtaataaactatgtctatcaggagctcttagctggtaatgagatctcaaaagatgacgtgctgagcaacgctgacttgtcaaacaagcggtaccatactttttctattcggaaaaagacagggggggagagagttattaaccgacccatgggagcactgggtatgatgcagaaggcactgtccgtaatcttcaccatttgcatgaaaattcaccctaaggcaatgggctttactgagggcaagagcgtggtcacaaacgctcaactacatatcgggaagaattacgtgtacaacatcgatctcaaagacttctttcactccttcaagaagtggcaaatcaagaggatattcacccagactccctttcagctgcctgaggaaatcgccaattatttagcctccctttgtgttcacacaatcgatattgacggtaaaaaagagcaggtccttccacaaggagcgccgacatccccaattctcaccaatatcctgtgtaagaagatggacatcgccttggataagctggccaagaagtacaaggctacctatagtcgttacgccgatgacatcaccttctcttcgaacaagagcgtgtttaataatcctatcttcctgcaagagcttgaggccattatccacaaaaacaagttgcagattaacccaaagaaaacacggctgcagaaaaagactaatagacaggaggtgacggggatcacagtgaatgagaaactcaatacgaccagaaaatatgtgaaacagattcgcatgtggttgtacctcattgaaaaatatggcgccaagaaagccgaaaccatatttcgaaaggactacataaaggagaaaggccatattaaatacaaccagaaccccatgttctctgttattggcggcaagttactatacctcaaaatggtgaagtctcaggaagactcaacttatcagaaactggctcaacgctttgataagatttgcggatttaacgtggatgcaatcctggacgtttgggaaaaggaaggaaaagagaaggcgatggaagtcttcgaagcaactaagagtgaaaaatggaaaaagatccagaatatcaggagcttctacttctga

SEQ ID NO: 7498 - RNA, 1302 nt, synthetic construct
  source 1..1302: mol_type = other RNA
atgaccacatttaccaatgaagaactgaaggatattgccgaaaaaggcgacgagctcataatcgagaagtttgcatccttgaacagctacaaagatatactggaaatgttcaacatcgcccaagtcattttatatggtgagaaggctacacttttcaagctggaagatctgatcttctatgcgtcattgaatttttcagagaaagaccggtacttcaccttcaccattaaaaaaaaatccggtggagaacggatcataaacgcgccctgcgaagagcttaaagggctgctccagtgcttcaattacatcttgcaggtgctatttacaccccatatcaaggccatgggttttgttagagaaagaagtgtcgtcagcaatgcacaactgcatactaataagaactacgtgtacaacattgacctgaaggatttttttcactccttcggccggcagtgggttaaatgggtgctgatgcaggaaccattcaacctctctggcgaaagagaaccactggccttttggttggcatctctctgtacacattcacttgagattgagggcagcacaaagatcgttcttcctcagggggcaccgacttctcctaccttaacgaatatactctgttatcccctagacaagaaactgaatggactcgctaagaggtttggtgccacctactccaggtatgctgatgacattacgttcagctcgaataagtctatcttcaaaaacgaggtattcctcaaggagctcgaacgcattgtgaagagccagaagttaactatcaatgagaagaagacccggctgcagaaaaaggaatatcgtcaggaggtgaccggactaattgtgaacgagaaagtcaacacataccgacactatgtgaaacaactgcgtatgtggctgtattacatcgagaagtacggaatggagaaggcagaggcgttttttcgcagagactacattaaagagaaaggccacatcaaatggaaagagaacccaatgaagaacgtgctgcaggggaaattgctttatttgaagatggtcaagggcgccgaagatgctacttatctgaacctcgtgcagcgctttgatagggccttcggcttcgacgtagaggccatcctcaagatttgggaggaaaaagggattgctgccgctgaaggactgtactacaatagtaagcccaaccgattaatcaaatataagaaggctgacttccactacatactgagtgaggaagagatcgccgagcttaggactaattatcctgaactgtttatggaggaggggttcctgcaatga

SEQ ID NO: 7499 - RNA, 1374 nt, synthetic construct
  source 1..1374: mol_type = other RNA
atgaagaccctgaccaccgagcagatctcatatattcaaactactttcgcatccctgaagaggaaagaaagctttctcgatctcttaaacgaggtaaagaagtttatggagggtgaaaatgccactcctttctcgctgagcttctttacacaatatgccaatcccaaattctgcgaatatgaccgctactacatcttcaagattaagaagaagtctggcggagagaggacgattatggctccatacgacacattcggagagttgctgcgatattttaacgtggtgctccagaccctttttacgccccataccaatgccatggggtttgtaccaggtaagagcatcgcaaccggtgctcagatgcacatcgggaagaattacgtctacaacatagacctgaaggatttcttccattcctttgaaagaaagagggtcaaatggatgttcacacaggcaccatttaatctatctggggagcgtgaaccgctggcattcttcctagctagtctctgtacacaccccatcgagatcgagggacagactagaataattcttcctcagggagcccctacctcacccaccctcacaaatattctgtgttacggcctggacaaaaaattatcaggtcttgctaaacggtttggcgcaacatacagtcgttacgccgatgatatcaccttctcctctaacaagagcatcttcaagaaagaggccttcctttccgaactccagagaatcataacatcccagggcctgacaataaacgagaagaagacaaggctgcaacagaaggagtatcgccaggaggtgaccggactaattgtcaatgagaaagttaacacgtacagacggtacgtgaagcagttgcggatgtggctgcactacatcgagacttatgggtataagaaggcggagatcttgttcaagaaagattacgtgaaagacaaaggccatataaaagaggccagttcgatgaagctggttttagagggcaagctcctgtacttgaaaatggtgaaaggcgagcaagatagcacctatctgaagttgcaggacaggtttaacaaagcttttgggctggacattgaaaagcttctgcaggtgtgggagacttatggcattgaaaaagccgaacaagtttatcgcgaaatgggaatcgagaactttaaaatctgcagtggcgccactgagaaggaggctgcgagctttataactttgcttgaggaaaacgggatgaaaaattctctgctgaacatccgaatttcacgcaatagaattgggaagctcctctctccatccgaaatgatcgaaattttcgataaggaagaccctaaagaaattatggaaagcatgaaaggacggatcattaaatga

SEQ ID NO: 7500 - RNA, 1230 nt, synthetic construct
  source 1..1230: mol_type = other RNA
atggagattatccagcagcataaggactacatcaaggagaagtttaagctcataaagtccggcagcgacttagtgcagatcctgatattcgtctctaaggaagtgcttaagtctaaacaagacctcaacctggaccttttcaaaaaatgtctggatacagaagctaaagaccgctaccagacttttaagatcaaaaagaaatccggcggttttaggaccattaatgcccctaatatccacctcaagcatatcctatcttgcgtgaatatcgtgattcagtgcgttgacgagccccacagagcggctacaggatttgtccgggggaagtccgtgatagagaacgccaagatgcatattgggaagaactacgtgctgaacatcgatttgaaggattttttccattcattcgacaaagaaaaggttaaggaatgtttcatgaggaagcctttcaacttcaatggagaaaaggagatactggcaatctttttggccgagctgtgcactcatccctttgaaatcgattgcgtcaagaaagctgtacttccacaaggagctcctagctctcccacaattaccaacgtaatttgtaaatccatggactgggatctaacagaactcgccaaccgatatggcgccacttataccagatacgccgatgacatgaccttcagttcgaatcacgatctgtactcagacgcattctacgaggaacttttccagatcattaactcacacgagttaactgtaaacagtaagaaaactaggttgcagaagaaaggttacaaacaggaagtgaccggtctggtggtgaacgagaaggttaatgtcccccggagatatgttaaacaactgcgcatgtggatttatttgtgggagaaatatgggtatgagaaagcggaaagtctttttgctaaagactatcggaaagataagggccacgttaaaaaggacaagaatacgatgctcagcgtgattaagggcaagttaaattacctgaagatggtcaaaggagagacggatccaacctacaaaaagctgtacttgcgatatttccacctcaccaattacctattcattgatgaaatactcggggtgtgggagacagagggcctgaacgccgcaatcagcgtgtatgaaaaacacaaacgtaaggagatgaactacccagagccgatcgatgtcaataaactgctggaactgtttgccaaagcagggatcaagtttgagtga

SEQ ID NO: 7501 - RNA, 1197 nt, synthetic construct
  source 1..1197: mol_type = other RNA
atggataagtttcgggaggaatttaatcccgaaatacatcccattcagaaaattaagggtaagagcgattttgtaaggctcatcaactacctgagactcaccaacatttccggcaatatcaaacccattcctcttaagcactttacattctatgccaatcacctgctatcaccaaaccgcttcgagtccttcgaaatcgtcaaaaaaaatggaggcaatcgaacaatccatgcccctaagcgaggtctaaagtctatcctcactgggctgaaccttttcttcaagcagcattacaaaacacacccaaacgtcacaggttttgccgagggcaagtcaatcgtggacaatgcgaagccacacatcgggaagaagtatgtgctgaacatcgatttgaaggacttcttccacgcttttgagaggaagcacgtaaaatgggccatgatgaacgcaccatttttcattaaagaggaaaaggaacccctggcgtttttcatcgctagtttatgtacgcatcccatagaaattaacggggagacgaaatttattctccctcaaggctctccgtgctcacctatcctgaccaatctgttgtgcaggagactggataaacagctcaaaaacctggcacaagaataccaggctaaatataccagatatgcagatgacatcaccttcagctccaatcaccacaagatatctgagaaggacttctacaacaagctggagtatgtcatctccaaccacaatcaccagataaatactaaaaaggtgcgtcttcagaaagagggatacaagcaggaggttaccggaattatcgttaacgaaaagcccaacctgcctaagcgctacataaagcaactaagaatgtggctggcatattgggaaaaatacggatacctgaaggccgacaagctgtttaaaaatgactacttaaaggagcgggggcataggattgagggaactcctcatctgttgagtgtgatggacggcaaactccagttcctgaaaatggtgaagggcgataaagacccgacctataagaaattagaatcgcggtttcataagctcaatggggataaaaaactcactcaggctcatcttgagcttatgaaaattaaccccttcaagccaagcctcaagaatcaacagagcttggaggaagtgctgattaaattggcccgcaagaaaatcttgtga

SEQ ID NO: 7502 - RNA, 1248 nt, synthetic construct
  source 1..1248: mol_type = other RNA
atgaaggacaatgtcgacatccaagctatcatcagggatgagttcccaaagatggagacacaagaggacctcttagttcttatgaacaaagtcaaacgctacctagagaagggcagtaaggaggagtttattccgctcataatgcagtctttgaactactacaagaacattaaggtgtctggcgagcggcgatacaagacattctccattaagaagaagtccggggcatttcgaacaatcaacgctccatgcaccggattgaaagtgtttcagtattgtctgaactacatgctccagaccctgtatcagagcaaccccaatgcctgcggttttgtgcccggccgcagcatagctgacggtgcaaaaaaacacgtgggcaaaaacttcgtactgaatattgacctcaaggatttcttcgatacgatcgaattgcaccgtgttaaagctatcttcactctgcccccctttaaccttaaggatgacaaagagaacagcaacagtctgccatacatcttagccaatctgtgttgccatcctaaagaagttacgaggattgataaagatgggaatccttatcagtgtgttaggaatgtcactccacagggggcccctacatcccctattatcacaaatctaatctgtcgccaactggaccggaggctccttgggctggcaaaaagatttcgcgtgagttattcaaggtatgcagacgatattaccttttcatcgaacaacaaggatgtctttgaagaaggctctgcgttccgtgtcgagctgaagcggataatcgaagaggatcagaagttccgaatcaatgaggaaaagactagagtgcagtcaagagcctatcggcaagaagtgaccggtcttgtagtaaacaacaaagtgaacgtcactaaacggtatgtgaagcagataagaatgtggctgtacctctgggagaggtacggctataataaggcctccgaacacttccagaaagattataatcgctacaagggacaggccgaacatgggaccagaatggagaatgtgattggcggaaaactgaattacatgaagatgatcgtgggagctgacaatgccgcatacagaaaacttgcggagcggttcgaaaagttggtgctggacattatcggagaaaataagaccctaaacaccgacgttaagatcgagactagcatatgcaaagaagacttgaacgccattctgaatgagctgaaggagctcgataagttactgaaatga

SEQ ID NO: 7503 - RNA, 1239 nt, synthetic construct
  source 1..1239: mol_type = other RNA
atggacaataacgcagacatcaagacaacgattcttgacgaattcccgaagatgaagacacaggaggatctgctcgcgcttttaaacaaagttaaacgcgtaatcgactcaaaccatcaacgggattttacccctattaatgagaagagcttcaactactacaaaaacatcaaggcctcaaagaataagcggtacaagacttttagcattaagaaaaagagcggtaaactacgaaccattaatgctccatgcgccggcttgaaaataatccaaacctgcctaaattacatcctgcaggtgttttatcagccgaacaattacgcttgcggcttcgtacccggccgctctatagccgatggcgctaaaaagcacgtgcataagcagtatgtgctgaatattgacctcaaggatttttttgacacaattgagcaccacagagtgaagagtctgttcaccctccctccctttaacctgaaggatgataaagaaaatcctaattcagtcccctacatcctcgctaacctctgttgtcacccaaaggacgtgacaaggtttgacaaagacggcaatacattcgtgtgcaaacgcaatgtcacccctcaaggggccccaactagtcccataattaccaacttgatttgtgcacagctggatagacgattagccgggctggcaaaacggttcaaactgtcgtattcccgttatgccgatgacataactttctcctccaactacaaaaatatcttcaaagagggttccgcctttcgcctggagcttacaaggattatcgaaagcgatcagaaattcaggatcaatgaggagaagacgaggatccagtctaatgcttttcggcaggaggtgactgggttgattgtgaacgaaaaggtcaacgtcacgcatagatatgtgaagcaaatcagaatgtggctctatctgtgggagcattatggatatgacaaggcatttaagtgtttctctaaggattactccctgagtaaaggtagcgccgcgcacggaaccaatatggataacgtcattgctggcaagctgaactacatgaaaatgatcgttggagcggaaaacccaacttataaaaaccttagcaagcgtttcaagaagctgatcaacattcaggagaacggaatcaacgttactgcaatcttggacgtttgggaaaatgaggggatagaatctgccttagaaacctacaagaggttcaaagactacaacaataaatga

SEQ ID NO: 7504 - RNA, 1260 nt, synthetic construct
  source 1..1260: mol_type = other RNA
atgaataactctgccgaggacatacatcgtttgattctggacgaattccctagagttagaactcaagaagacctgctggcattactgaacaagatcaaacagctccttgtagggtgtgctgacgaggagacttgcaaatccctgaccatgtcgtcactgaattactacaaaaatgtcaaggtgtccctacggcaccgctaccatttgttcaatatcaagaagaagtccggaaaactccgtcaaatttgcgctccggtagagggcctgaaaatcctgcaatcctgtttgcgcgaaattttcaacgcattttatgagcccacaccaaacgtctgcggcttcgtgaatgctaggagcatcgctgacggggccaaacggcatatcggcaagaactacgttctgaacatagacttaaaagacttcttcgattccattgagtaccatcgggttaaggcgatgctctgctgtgccccctttaatctgcgagataaccgagactctacccagagtctcccattcgtcattgccaacctctgctgtacacctaaggaagtgatcagatttgacaaagacggaaaagaatatcgctgcaggagatctgtgctcccacagggtgcgcccacctcacctatcctcacaaatctgatttgtcggcagatggacaggaagctctatctgttggctaagaaataccattgtgcctatagtagatacgccgatgatattacctttagcgcaaataagaacatctttaaggtggatagcgatttctatagtgagctacgacacatcatcgaagtggagtgcaaactaaagatcaatgaggaaaaaaccaggattcagtctaggaaatataggcaggaagtcactgggctggtggtaaacaagaaggtcaatgtggcaaagcgctacatcaaacagattcgcatgtggctgtacctttgggagacatacggctataagaaggcccagaatctctttatccacgattatttgcacgataagggacacgtcaagcctgaaacggtgcaccttgaaaacgttcttcgggggaaattggattatctgaaaatgattgtgggcgaagaaaaccacacttacagtagcctgtgcgaaagatacgagaagctgatagagtgcgagaacaaaccaaatcccagcgttgtgaagcaagagaagacgggtaaaaagaataacttacaggagttaaccgaggactgttcaatcgtggagctgcttgagatgcttatagataagatatga

SEQ ID NO: 7505 - RNA, 1347 nt, synthetic construct
  source 1..1347: mol_type = other RNA
atgaatcagcaaaaagccaatattcagcagatcatccgcaaagagtttcccaagattactactgaagccgacctgctccagctcttaaatcgaattaatagcgagctgcacaaggaatttttcgcagcaaaagataagaaggtacctcctatcaagctggctactctgaaatactacaagaactacaaggtgtccggcgctaaacggtataaaacgttcaccattaagaagaagagcggtaaagataggttcatcaatgctccggcgaaggggctcaagttgatccagcagtgtctgaatgagatcctgcagacttactaccagattaacgataacgcctgtggctttatccctgatcgcagtatcgtttatggcgcgaaacttcataccgacaagccatatgtgcttaacattgacctaaaagacttctttgacacaatcacatttcctagagtgaagaaagtgctcgctctgcccccttttaatcttacagggtcaaaggagcccgtcgcctatatcataacatccctgtgctgccatcccaaggcagtcgcaaaggtggacgagaacggagaaaagatcaccgagattaaacaagttctgccacaaggggccccaacctccccaatactaaccaacattgtatgccgtaacctggatcgccatcttgccgggctggctaagcgattcaaagccaactattctcgctatgccgacgacattactttcagtgctcataagaacatattccagcaggattccgtattcatgttagaactcaagaggatcattgaggacgagcagggtctgaccatcaacccagagaaaaccagggtgcagtccaagcgtcagcggcaggaagtcacaggcctagtggttaacaaaaaagttaatgtccctcagagatacgtgaagcagctcaggttgtggatccactactgggagaaattcgacatcgagaaggctcagcattttttccttcagcagtacattactcaacggggaaatgtgaaaagccacaaatcacacatagagaatgtgatcggaggcaaactggattatatgaggatggtcgtgggtgaatcgaacccggcctacaagaagttaagaagacggctggataatcttattcagatcgaggaacacaagaaaagcacaagcgcgccccagcagacgtctagctacaaacaaaagcaatgtgccaaaaccaacaaggaatatatagcagatgggaatggcatacaatctctgagttcagagcagctgccctttacccacaaagatgacttggaagtcttgttggatggactcattaatgacctctctaaggaaaaccaatcactgtga

SEQ ID NO: 7506 - RNA, 1425 nt, synthetic construct
  source 1..1425: mol_type = other RNA
atgatccttacggtcgaacacataaaagctattcgcgatcaatttcagctcttgcggaccaaagaagatctcctagccttgcttaattttatcgcctatccacaactgtatgccaccggctatgtgcctgatgacattgattttagcaaaattgagctgcccgacgacgctaccaccgcggaaaagttgggcctggtgttcaacagtagctccaaaaagagaaggaagcagataactgctaaacagctgacttacttctctaccagtttctctgatgcagagaagaaaaggaaaagatactaccggttccatatcttgaaaaagtctgggaaaaagagggagattcatgcccccgtgtctaaactcaagcagatccagtcatgcatttaccacatgttacagtcggtctacgaaactcaacctcaggcatatggcttcgttgccggcaagtcgattgcagataacgcaagtcttcacaccggtaaggcattcgtgctgaacgtggacctgaaggactttttccctagtgtacattttagaagggttaaagctatgctggaaaagcctcccttttacctcagcggagaaaaagagcctcttgcctacctgatctctaacctgtgtactgagaatggtgtgcttccccaaggcgccccaaccagccctttctttaccaacgtgatttgccagcggttggatcagaaactggagcgattggccaaaaagttccagaccacatacagccggtatgctgatgacttaacattctccgctaatgcctacgttttcagcaagcgcttcatgctggagctcgaacagatcgtgaaaggggaacgctttcagatcaacgaggaaaaaacacgcgtgcaggggtcagcctacaggcaggaggttacggggctgactgttaatgagaaggtgaatgtcaacaagcattatctcagatcctatcgaaccctcctgcacctgtacaagaccaaaggaccgctagtcgcttatgagtatcattacaaacgtatgccagagtcagtgcgggtaataaaacagcaacgtacagtgacatccgcaacttcccacatacagaacgtcatttggggaaagtatctctttcttaaaatgatcaagggagactcagtccccatgccgccctttaccagaaataagtatgccaagatggtgatcgagaagtctatctccttaattaagccagaaccagaaaacatcacaggtgacgacgacactaagaccgagacaaagaagtaccaccaaccagtggtacagacaattctcctggaggcgagcgtacccaatgagcctgtcgaaccgaatacaaaaaaagagacggtggttgaacagctgttaactgcgtgggagaaggagggcctggagaaggccatcgaactactgaagacaaagacgacttga

SEQ ID NO: 7507 - RNA, 2016 nt, synthetic construct
  source 1..2016: mol_type = other RNA
atgaataacccgttcaacgacttaaagccggagcaagttgagggaattaatgagcggtttcacgggttaaattcttccaaggatttttaccttctgttagtagacctcctagatatcctgaacgtcaaagacgaggaaaaggaaatatttaaggcctggataactcagttcatcaggctccgatttcctagacgctacacatatttcactatcagaaaagcctcaggaaaggacagaattatccactcacccaacgatattctgaagttcatccagcgcctttttaacctggtcctaaacacagtttttgtgccacatcccaactcatttggcttctcaaaaagtcaatccatccgagacaatgctgctgttcacgtcaattataactacgtgttcaacatcgacctcattgatttcttcactacgatcgatgctgagcgcataaaaagcgcgtttaaggagtccccctttaacctgtctggagagaagcgtgagttgataaaccacctggtgtatctcacctgtattccgattaaactgggccaggataaagagaatgatacatcaatcggaacactcaaagtcctgccacagggggcaccaacgagcccaattatctcgaatattgtgtgctatgcaatggatcatcagttggctgaactcgctgacaaattcaagattaactatacccggtacgcagacgacattaccttctcttctaataggaacctttatcaggaaggaagcaaattcaggcatatgctggagtctatcgtgataagccagggttttgctctcaatgggaacaaaacccgcttacaaaaaaaacactcccggcaggtggtaacaggtctggtggtcaacgagaggaccaatgtaaaccgggattatataagatccctgaggatgtaccttcactactgggagaaatatgggtaccaaaaagccgaacagctctataataaagacgttgacactgaactgttcttcggagagcccaaaagtctgttcgaccttctcaagggtagaatcgactttctgaagatggtcaagggcgcagacgataacgtgtacaagaacctgaagaagagatggcttcggcttacaaatcctgactcacggaccattgaatttcgggatgagtacttcaatacccataagccaaaggacgtggcgaatttcctgcgcctctttcaggatagtgcaggcttgaagtacttgacacacgattttgatacccctggcgccaaattttcctacgagaagattatggacactgccaatacggaattttcaactggctttacaaaatacgctatcacacgagccttgtatgcaagaataaagcagttcgccttcactgagcggccatcttggtggcgttgggtgaatggggaaaagtccacatacaacctagggtggaagagcaccaagctgaaaaactggatcaatgaaaaccccggcgtgcaccctattaggttcaagatcttccgcgacgagttaataactcccttcaaagactctattcaaatcagggcccctaagtttaaggagctgattgagaactccattaaggagaagtttcaggactacaagagtgagttcaatatcagcttcaagtatctggaaacggcggagttctacaccgatgtggatattataatgggtgggatccgccatcttttcgacggtatcatcgaaaggctaagtctgtcgaacgaaatcatcattagctttaaacgtaccgaaatcaatggccgattgatcaaagtggtcgaaatcacccacgttaattccagttgcttcaaggaagctaaaatcaatgatctgctcagtggcaactttattgaagccaagcgagcctttcagggactctgtaactggagcataaccgccagcttcgcagacgggaattataaactgaacatgctgaatgatagcgatccttacatcgagagagaacccattgcctctgacgagattctgggcttcactcattccttgtatttttactga

SEQ ID NO: 7508 - RNA, 2016 nt, synthetic construct
  source 1..2016: mol_type = other RNA
atgaatagtccatttagcgatctcaaacctgagataattaccgatattcggggacgtttcgaagccttgcggactaaagatgacctgtatgacctgttccagtcggtcattagagagcttccagccggcgaaaccaaaagagaacactttgagcaggaaattgcttggttgtacaagaacggctacccccgcgactaccatttctttaaaatcaagaagacgagtgggaaggatcggcagatcgccagtccacaaggccccctaaaaacagtccagcgaataatagccgttatcctgagcagtgttttccagcctcacccacattcctttgggtttagaaaaggaagctcagttgtcgacaacgcaagaatgcatgtggggtttcactacgtgtttaacatagaccttgcagacttctttacatccatttccctcaaacgtgttaaaaggagcctggaaggatcaccctttggactggatctttccagagagcctatcgccgcccaactcgccagaatttgctgtatcgaacttatcgtgccgggcgctaattccaggcgggctttcctacctcagggtgccccatcctccccggttctgtctaacattgtgtgtcaaaagatggacgagcgacttaatggtctggccaagagattccacctgaacttctcgagatatgccgatgacatcacgttcagcgctaaccacaatgtgtttcgagaagggtcagaattccgattggagcttgccgatatagtgacagcctctggcttccaaatcaatccgataaaaaccaggctgcagcgccagaagaatcgccaggaggtcacaggactcacggtgaatcagaaggtgaatatctgcagaaaatacgtgaaggagctgaggaggtacctatattactgggagcgttatggccttactaaggcctatgagttatatctgaaggatcagcacgaattcctgctcagcggctctggtgttcctatggccgctataatcaaaggcaaattggacttcctgcacatggtgaaaggggacaccggcgactacttaaagcttctggcaaggtttcacaaaatggacaagggtggtccccggaaggtggtcaagggcgagaacgccacccaccatcaggaagctgagcagttccaacaacatcaaccacataacgtcgctattttcttgcgtctgtttcaggattccgctgggttgaaatacctgacacacgagttcgatatcggagatgaagtattcaacctcgaacagaccgtagaactggcaggcagggaatttcaggccgcctatcagaaacaccctatcactcgcgcgttgtacgcacggattaagcagttcgcgttcgaaaagaatcctaagtggtggaggtggcaggacggaaagatgcgggaaatcaacttggggtggtctgctccaagcgtccgcacctgggcacagaaatttcccggtactcatcccatgctgctgttaccctaccgagaggagatgatactaccctttaaagaatcaatccggatcagggcccccaagctcaaggagctgatcaacgctaacatcaaagccaaatttcgcgaggcagcggcagactgggatgtggaattgaatgacctggagcgcgcagacatctacaccgacgtggatatgctgctgggaggaattaggcatctgctcgacggcatcttagagcggggcgaggtgagcagaaagctcctcattacttatcggaagacagtagtgtcagggcgcgagatgaagatgatcgagattattcacactgctagtatctgctacaaggatgccgcgatttctgagctcctcaatgggaatttcttagaggctaagaacgcattttatggcctgtgtaactggtctgtcaccgcaattttcaacgatggagcttatcgccttaatattctgaaggatgacgtcgatatgcctgagcgagaggcggtaatggtgaaagtgctcgggtttacacatcacctgtacttctattga

SEQ ID NO: 7509 - RNA, 2010 nt, synthetic construct
  source 1..2010: mol_type = other RNA
atggccgaagaacacagatccgaattaaaagccaaatttcaggaggtggctaccaaaaaagactttttcgacctcctgatgcgggccattgagtgtcttccaatcagcaattcagaaacacatcgatttaaggagcgtctgaagaatttccatatcacagacagccgggagaattatcacagttttacagtgcgcaagtcctcgggcaaagacaggttgatcaacgcccctgtggcacccctcaagttctttcagcgactagtaaatgtagtgctgtcatgcgtcttcgaagctcatccaaacgcttttggcttcagaaagaatggctcaattgtccagaacgccagcttgcacgttaatcagcactacgtgttcaacattgatctgaaggactttttcacaagcatagacgacgtaatgctgataagtgctcttgagaacgccccatttggtttcaaggggaaaaaatccctgctggggcaggaaatcgtgagactttgtaccatgaaaatggacttggcaatgccgggtcaaggaacccagagctctaaggaggttagagtgctcccccagggagccccaactagtcctctgctctccaacgtggtgtgcctgaacctggacatcaagctcaccggcctcgctaagcggtttggcatcacttacagccgctatgctgatgatattaccttcagctctaacagaatggtcttcggacagtcatcctcattccttcaagagctgaagaagattatcatcgagcagaaattttccatcaacgagagcaaaacccggctgcaacatatgtctcagaggcaggaagtcactggactggtcgtcaataagaagatcaatgtggaacagaagttcatcaaggcagtgcgcatgtacttatactactgggagaagtatggatatcctaacgcccaggggaagtattacgcagatcaagggattgattattactacccggagtcaaaatctttgctggatacgttggatggtaggctcaatttcctgaaaatggttaagggagaagacgattctacctacgtcaagctagcacaacggttcaagaaactgtctggcagtctgtctactaggaagcacgctaatctgaatcccacgtccagcgaggttttcgaagagcaccggccagtggacgtggcgacttttttacgtctgtttcagcatggggagggcctgaagtatttgactcacgattacgatctccccgggcgcgagttccagtatgacaaaattatggatcttgcgggcagggaatttaatggcgcgtttcggtcctattctatcacaaggtctttatacgcacgagccaaacatttttgcttcgaaaggcgtcctaagtggtggagatgggaaaacggaaagaaaatcgatatcaacgtgggctggggaagtcctgagctaaaggaatggatcgcagacaacccgggtgtccacccaattagaatgaaggtcttccgcgaccagtttattaggccctttaaagagagcatacaatttcgggcgcctatgctccatcaagccgttgtgcagacccttgaagagaaatttggcgaagagtttcagaacttcgagatagagcttatcaatttggagtcagccgaatttttcacagacgttgacattttcttagggggtgtacgacacatcctcgacggtattctggagagagtggatgtaagcaaacgcattaggattgaattcaaacggcagatcttcgggaatcacaacatgaagatactagagataacgcacattagatctaagtgccaccgcgatgctaacatagttgatcttatgaacggcaatttccgcgaggtggcccgagcttttaaaggactgtgtaactggagtatcacctcctccttctcggacggcaactatactctgaaagtcctcgatgacaatcccggaagtccctcgaagatgtccgtggacgaggatgccgtgtacgggttcacacataccctcagcttttactga

SEQ ID NO: 7510 - RNA, 2067 nt, synthetic construct
  source 1..2067: mol_type = other RNA
atgacctactacatagagttcgccagcccacatccattcactaatttgaaagacccactgaaacagattacacaggaacagagacaggaagttgcatctaaatttcacgcatgcgcttcacaacaggagttctatcaaatcctggtgcaccttgtgagcctgttagacatcaatgatttgggccagacctattgctgccaaattcttagccagttcgaaataggtgaagatagtcccacttattctaacttctcgatcaagaagcgatctggtcgctataggcacatttctgccccgtccgaagagctgatgcttattcaccgcctcattaacttccttctgagctgcgtgtttcagggccatcagtgttcccacgggttcaagaaaggttctagtgtggttagcaacgcagtggtgcatgtaggtaagaagtacgtgttcaacatagatctaaaggactttttcccgtccatcgattctgaaatggtgaaagaggccttgatgaggccgcccttcaatctgtcaggtgaaaggaaatctatcgcggagcacctcagcggactctgtacaatgcgggcccccctgaagaaggggatccggaatagttcaaggaaatttattcttcctcagggcgctcctacatcccctctgctgtccaatgccgtgtgtcagaatctggacaacttgttggagagcctcgcgaaagcgaatcagttagtctatacgagatacgccgacgatattacctttagtggcaataacaacgttttcgaagaaggatccgccttcttgattgagctcgtcagaatcattagcgaacagggcttccagatcaatgagtcaaagacgcgcttgctgggcaagtccgctcgccaagaagtcacaggaatcgttgtgaacgaaaagactaacgtaaaacgggaatacctgaaaccattacggatgtacatctactattgggagaaatacggatatcacgaggcagagattaagttctttaacgacaggagtctgatttcggataaggagatggagtccacattacattctacccttgacgggcgcttgaattacatgaaaatggtcaccggcgaaaaccaccccacatatctcaagctctcaaaacgttttaagaaacttgctaacaagcggtttgcggaaaaaaagcagaaatcgtctagcacacacaaaggagactttagcgaacatcgtcctaaggacctggcccgatttctccgctttttccaggattccgacgggctaaaatatctgacccatgatttcgatatggtggacgccgtctttgactacgaccgaattatgatgtatgctgttcgagacttcttcagaggagtcaaggagaactacatcactaagcaactgtatgctcgcgtgtaccagtttgcattcgaagaggagcccaactggtggaaatacgaggatggcaaaaggattgagattaacataggatggagtagcaagcaaataaaagagtgggttcggctaaatcctggcactcaccctatcaggagcaagctgatcagagataacctgatcagaccctttaaagagtcaatacagtttcggccaccagcactcagaaacagaatcgagtccactgtgcgtgagaagttcggcgaagattatgatgagcttcagatcgactactccaatctagaggccgccgagttttacaccgatgtcgaactggtactgtctggggtgaggcatctgctcgacgggattctcgagagaattggaatcagtaaaaccatacatatcgctttctctaagcaagaggtcaatggcagccttatgaaggtgctcgagatcacgcacgtagggtcccggtgctacaaaaatgctctgcctaaggaactgctcaacgggaacttttcagatgctctaaagttattccatggcctgtgtaattgggccgtgcgggcctcatttgcagacggagacttcgaggtggacatgctgagtgataaggaaaagctgagccagaagaggcccgtcaataaggagttgatcagtgggtttacccacctcctgcgattttattga

SEQ ID NO: 7511 - RNA, 1281 nt, synthetic construct
  source 1..1281: mol_type = other RNA
atggcaaagaaaatcgaaaacaccgacctgatcatccagcggtttgccgcgatgcagagtattaccgacctgctcgagttgctgaacctcgtgaaaaaggaactgtacggcgagaaggctaatccattttctctacgacagcttaactactattcattatcgaagctgcaggctcagcactacaggcaatggagcatccccaagaagaacggaggggagcgaactattcatgcccctgtgaacggcttaaagcatgtgcaggcttgcctaaatgccattttgcaagtgctgtttgagcctcattatgccgcaatgggtttcttacctggaaaaagcatagtggataacgctaaaaaacacgctagcaagggattcgtgtataacctcgatctaaaggacttctttcccagtatacccagggaaagagtatgggcctgtctgctgcttcccccatttaatctgggatccagtacggagcggagacaactggctaataggatatctttcctttgcacagcgagcatcgagattaccgatgcagagagggggaaaatactgaacacttttctgccgcagggagcaccaacatctcctacgataaccaacatcatcgctagaaagcttgataggcgtttgcagggcgtggccaataaatatcacctcacatattcccggtatgccgacgatattactttctccgggaatagtaatgtcttcaaaaagtctggcgaggtggttttagagatccgccggatcatcgaagaccagaaatttcaggtgaatgacaagaaagtccggctccagcaacagggatataggcaggaagtgactgggctgatcgttaacgagaaagtcaacgttcctagacgttactaccgtcagcttagaaactggctgtacctttgggaaacctatggtaaagagaaggcatccaaactgtttctcaaggattaccgggccgataaaggttacaagagagacggcctgccggacatggactgtgtaattggcggcaaactggattacttgaagatggtcaagggccaagatgacccactcttcgccaagctcaatgcccgctacctgcgcttgagcaatattgaaagccaacagggggagtcccgctcatatattaagacctctcaggagtcaagcaagaaggaaaagaagaaaaacgttgaggaagggaaggaaccccgcaaactcatcgagacagtcctggaaatgattaatcgagactccttcgagaaagcaatggaatacttcttgtcaaaaaagtga

SEQ ID NO: 7512 - RNA, 1272 nt, synthetic construct
  source 1..1272: mol_type = other RNA
atgaaggctgacccagagaaaattcctgaaatcagagctagttttgcccgaatggaaaccaaggatgacttagtgaaagccttgaacctagccaaggagatcttgtatggtaaaggagtcaacgaattttctctaaagaacatcacctattacgcagacacgaggttccaacgtaaacgatacagtgaatttcagatcccaaaaaagcagggcgggactcgcactatacatgcccctgttccaggcctcaaagcaattctgcgatgcctcaaccttttacttctgtccgtgtacgaggacgggtatgagaacgaggccatgggatttatcccagggaagtctataaagaataacgctgagtggcacacagggaagtcgttcgtcttcaacattgacctgaaagatttcttcccctccatcgacctctatagggtgaagaccatctttcagctccctccctttaatttgaagggcgagaaagaacccctggcttatcttatggcccgcctgtgttgtgaaaaaatggaggtggtgcgcaaagacaatctgggagccgaaataaagaaagtagcgactgttttgccgcaaggggctcctacaagcccagcgatcaccaatttcattgcacggaaaatggatcggcggctgaaaggagtggctaagagattcggtgttgcatacacaagatacgccgatgacataaccttttcaagcaatcacaacgtctataagaagggtggcgatttcctgctggaggtggagaagattattagcgagcagggcttctgcattaatgaaagtaaggtaaggctgcagcaaagggagtacagacaggaagtgactggccttattgtgaacgaacaccctaatgtcccgcgcaaatttgtgaaacagatgaggcagtggatctatctgtgggagcattacggctatgaaaaggcaaatctctttttccggagagactactctcaaaaggccggaagggtcctggcctttatacctcccctcgacctggtgctggacgggaagctgaagtacatgaagatggtggttggtcccgaacacactacctggatgaaattgaattcccggtactcactgttaacacaggatcgcgtcatctccgaccccgacctccttgatattaataaggctctcgagagcctattcgtagagatgcgtaaaaacattgatgagttcatcgccgaggttaattaccatcaggagacaaaccaggcgatcaacatcgatgataacgaagcaacggattga

SEQ ID NO: 7513 - RNA, 1215 nt, synthetic construct
  source 1..1215: mol_type = other RNA
atgaaggctgaccagaaacagattcaagagattcgagatcgcttcgctaaaatgcaaaataagacagatctgctggatctacttaactttgccaaaggtatcttgtttctacagaagtctaatagcaaatctctgagactgagcacactgaattggtatgccgacccgagacttagtgctggcaagcggtatatcgagttctcaatccctaagaagaacggtggacagagaaagatacattctcctgctcgttccttaaaaactatacagcggtgcctgaatctcatccttcagtgtatctatgatccccatccggctgccatggggtttaggcccgggttttcagttgtagataacgccactaaacacacaggaaagaacttcgtgtataatctggacctcaaagagtttttcccctctatagaacttcaccgcgttaaggcatgcttcaagaacccccctttcaacttaactggcgacagggagcctctggcctttttcctggcaaatctgtgttgtcacgagcaagaagtggagcgcgagggtaaaccattggtgctgtcggttctaccccagggagccccaacgtccccaacgattaccaatatagtagcaaacaagctggaccggaagctcagtgggctggcaaatcggttcggggcctgctactccagatatgctgatgatattaccttcagcagcattcattacatatacggacgtaacggcgactttatcaacgaacttaagaagatcattgcgaatcagaagttcaagattaacagcttgaagacacgactccagaccaaatcaaaaaggcaagaagtcactggcctcatcgtgaatgagcacgtgaatgtgaacaacatctacttgaagaacattaggcagacactgcacatttggaaaaaatttggcatcgataacgcctggaaatactacaccgaaaacgaagacaccagaactaccaataaagagaattcatccctgttggtccagatcatgaacggcaagctccagtacgcactcactgtgcgcggcaaagaagactttctcatcaataagtacttcaccattctcaaagaccttatggcggataaaaggtccattccagaccagaatctggaattaatcttgcaagtcctgctgaccgagggattagacgaggccatggagaagtatacaaacaatatcagtcagggtaacgggaagtga

SEQ ID NO: 7514 - RNA, 1206 nt, synthetic construct
  source 1..1206: mol_type = other RNA
atgaagcttaccaaagaaaatatcgaggaaatcggcaaggacttctttgagatgaagtcccgtgaggatctcctgaatctactcaataagaccaagttttacctgtttggtgacaagtcaaagccaattcaactaaaaatcctcacatactatgcaaatcctaacattgctggaaaacggtacgtcgagtttaccatcccaaagaagtccgggtccattaggcgtataaacgcgccagtgaaaagcttaaaatacatccagatgtgcttgaatgtcatactgaacattgtcttcaaaccctctcctttcgccatgggatttgtgccgggccggagtatagttaccaatgcgatgattcatcaaaactgtcggtacgtatataatatcgacttaagcgatttcttccactccatcgagctccacagggtgaaagcagtattgaagctgaaaccctttaatctttgttcggaaagggaaccgctggccttcctgatcgccaacctgtgctgtacggagctcgacgtgaatcggcttgaaaacggcaatcagattgccgtggtgcggtctgtccttccccagggtgcacctactagccccgttttgaccaatattgttgctcaaagactggatcgccgactgtatggcttggccaagaggttcaacatcaactactctcgatatgcagacgatatcaccttttcagccagtatgaacattttcaagcagaaaggagaatttaaccatgagcttacaaggatcatcgccaacgaggggttctctatcaacaaagacaagatcagactgcaggatagatgctttcgccaggaggtaacagggctcatagtgaacgagaaggtcaatatacggagacgctatatcaagaacatcagattgtggctctactattgggagcgctatggttatgaaaaagctgctcagtactatgaacagtattaccgaaaggataagatgtacatcaaaattgtgcctagtctggaaaagagcattctggggaagctaactttcataaagatggttaaaggagacaaagacccagtgtttagaggcctgtggactcgctttgagacactggtgaagaggttcaaagagtccaaaagcgctatgttagattacaacattatcctggagattctcttcaatcagggcattactgccgcaatggaagcttactcaaaagtgaagtga

SEQ ID NO: 7515 - RNA, 2226 nt, synthetic construct
  source 1..2226: mol_type = other RNA
atgacaacttacgaagaacagcacatacgcaaacaagtggccctcagcttttccgagatggagagcacaaacgacctggtgcggctaatcaacaaagtgtggtctttttttagcggagaaaactatcagcctattccagccaaggttatctatcacttcagtaaccatcagcattcacaagacgcatatagaagcttcgagatccctaagaaaaatggaaagatgcggacaatccagagcccatgtcacgcgctgaaacgaattcaattctgcctcaactttatcttgtcgtccgtttatgatgacccccatcccgctgctaaagggtttgtccggggacgtagcattttggacgccgccaggccccacgttaaaatgccatatatttaccacgtagacctcaaagatttcttcccttctattagtttcttccgcattaaggcatgtctagaaattccccccttcaatttatctgggtccaaaaagaatatcgcgttttgcattgccaatttgtgttgcttgtatgacggcgaacagtcccgactaccccaaggggcgcctacaagtcctatcctctctaatatcgtctgtcaacggctcgataaaaaactgacaggcctcgccaagaggtttaatgctcggtatacccgatatgcagacgatctgaccttctcgtcatatattaatcttgccggcgagaaagatttccaggaagagctcgcccggatcattgacgggcagcagttctgcgtgcaggaagataagacacatcaggaaaaccgccaataccgccagcgcgtcctagggctgaccgtcaacgagaaactgaacatttctaaggagtacgtaaagtcaataaagatgtacctgtacctctgggagtcgtacggttacggcagagcttgccggctgttcgaagctgactgggataagtccgctaaaaacacacggagtatcccgagtcttagaaattatctgtccgggaagctggagtacatgcgcctggttaagggcagcgatgacccaacttttcagagtctataccagaggttcaccgacgtatgtatggagaatgacatacccgattggaaacagttcaagaaggaaatggaactgttttgtcaaaaagcttacaacccaacatatgacgccaaggagctcctgagatggtaccaggagaggctcgtggacattgatgtccgtctgctgaaggagtccaacctgtacttttcaatcaccaaggcattcacgtacctgagtaagaagctttatgcaaatcagcctcttatgaccaaggtggcagttcacgacgcccgcagattgccgtttttcctgtatacacacttctcaaaacaagagccattaaagtttttgactcatacttgggaccagtatgcggaatctacctcttttactgactacgaggatttcatccaaaagactaacgaggccttcaaaagaatcacccctgagtttaaggagcttgatcgacagctgtacgcttgcttttacgccttcctcaacaatgacggtaatggcagaggatgggggcagtaccacttaaaaacctcctggaagagcgattggataaaagcatggtgcaataagcatacggacagctccccctgggactgccctatcccagaagcctacaagcagatcaatgataacttgcgagtgaactactttagcgacatcatcgagttatttaaagaggagtttcagatcaggaccgaaaatcagcagctgaaaaggatggtccggagactcgtgaataagcatcttaatcctggcttcaacgtgcgtattaacgtgccacccaccaaactgtataccaacgtgtcactgttgtctcacgcactggacactctgttatataatctgtcccagaggaaggaatttactgatatagagataaccacgattgaccagagcgattacatcgatttgtctgtgtgtcagattggttcaatctattacgctgatagggaacagctcctgcaggagacagagtctggagattttgaagagattagaaagaagcttacgaaccgctgtgattggatggtccagaccacttgcaaggacggaggcaactatcaaatcgcctacctgaattcccttgctccgaacggtagcaccaaagagcttgacaaagtgaagggcttcactcacatactcaggttctataagccccaagcctacgaaaaaaacacagattactga

SEQ ID NO: 7516 - RNA, 2076 nt, synthetic construct
  source 1..2076: mol_type = other RNA
atgacgtacttttccaattataaactggccaaggatgcatattacaagttcctgatccccaagaagaacgggaaaacccgggagatacaggctccagtgaaagacctgaagagacttcagatttgcctgaacttcattctctcatccctgtatcatccgcacccagccgccaagggatttatcctgggtcagaatattagcgacgccgctaaacctcatgtaagaatgccctacgtcttccaccttgacttaaaggatttcttcactagcatttccctctatcgcgtcaaggcctgcctcagtctgccacctttcaaccttaatggtgataaagagcggatagcttactgcattgcgaacatttgttgtaccaatgacggatccagaacctttctgcctcagggcgctccgacaagtcctatcctgtctaacatcgtgtcacttagactggatcgtaaattaaccggcctagcgaagaggttttcagcaagatacacaagatacgccgacgacattactttctcttcttatcaggatatcgctagcgatactgagtttcagcaagaactggcacgaattatttcgggtcagaacttccaaatccagccttcaaagacacgagccgagggaagaggataccgccaaaccgtttgcggactcacaattaatgagaaggtgaacgttagcaagtcttatgtgaaggagatcaggctgtacctgtatctgtgggagcgatatggctatgaaagggctcagatgtacttggattcagatatcaaaaagaccaaggaaaaccacagtgacatccctcaattgtcccactacctcaacggtaaaatacaatacatgcggatgattaagggcaactccgatgacacatataagactctccgcaacaaatttatctacctgtacatccctcagtggaaggagtgggaaaaaaatattcttgacttctgtgatgccgtccaaaattccaaactaagtatagaggaactgaataagtggtacaagacgatatccaccaatatcaacatccatctcttgaaagacacaccactttacacttctctgaccaaagctctgtcctgcttgacactgaaagccagtgacattccgacccagacagtgtttaaagaacccatacataatgccacactgttgcctagcttcctctatgagaacttctcgaaaaatgacccacttaagtttatcacccatatatgggacgggaatgcagacaactgcaaattcgagggatatgaagacttcattcgaaaagaacagatggcattcaaagaaatcactgggagatttaagaccatcgacaagaatctcttttactgtttctatggctttctacacaaccccttgaataatcgtgggtggggacagtataagatcaaatctgggtggagctcatcttggcttaaagcatggtgcagtgagcaccctgagcgcagcccctttgattgccccatcccagaaaacaagcgtgagattgccaataatgtcaagctcaactatttcagcgacatcgtggagttatttaagagcgaattccaacttcgccccgagacgaggcaattaaagaaactcctgcgggaactggttcggcagtacctcaactttgattttcacgtgactttcgaactaactgacgtcaagctgtatacaaacgtatatatgatcaggaacatcttgagcgacatactgcacgacatggcccagcggaagcagtttcccgatattctagtgagggtggaggatctgggctcagattacgtggatatcatattatgtcagaaagacagtgactactatgctacccacctgcagttgatccaggaaactgaatccggcgatttttgtgagctgaaacgcaaaatggcaaatctctgcgactggtacgttgagacgcagtgtaaggatggcgctttcaggattaactatctggacagcattcagccagatcggacaatcgcggagcccttgctctctgatggcgtaaaggggttcacccatcggattcgcatctacaagcattacgcctacgagaatccaaactacaggtga

SEQ ID NO: 7517 - RNA, 1185 nt, synthetic construct
  source 1..1185: mol_type = other RNA
atgttggttgatcaacctcagattgatcatcttcgccagcaatttgcttcacttcagtctaaagcagatttactggcgctgttaaatgaagcaaaagccatgctctttgaaaagggagatcagtacccgctgcagctcaccagtctcacctggtatgctaataccagcttaggtgtcaagagatacacagctttcgaaattcctaagaagaggggtggacaccgactcatattcgctcctaaagaccccctcaaagtcatacagcggtgtctaaacctggtcctccaatgcgtttttagtccacataaagccgcaactgggttcgtgcctgggaagagcatcacagacaacgcacggccccatgtgggaaagcactatgtttataatctcgacctgaaggacttcttcaccagcgtggatctgcaccgagtgaaggcttgtctgaaactgcctccattcaacctgacgggcgatcgggagcctcttgcctttctgattgctaacctgtgctgcattcgtcaggtcggagagccaagcagagcctttctaccacagggtgcaccaacctcccccctcttgaccaatgtggtgtgccagcagttagacagaaggctgacaggccttgcgaagcgcttcggcgcaacttacactaggtacgcggacgacatgactttttcctcgttcgtaaatatctatcagcccgattctgctttctgtgtagagctgaaccgcataatcaccgaccaaaggtttgtcatcaaccccgccaagacaagacttcaacgccccgggtataggcaggaagtgacgggcctggtggtcaatgagcgggtgaacgtgccgagacgattttggagggagatccgggctttgttgcacaattgggagacattggattacgacgaggccaatactcggttccagaagctgtatgccctgaacaaggcacgtccctctcaaaaagccccagccctagccaacgtactctccggcaaactcttgtttatgaaaatggtgcgtggcgccaatgacgaactttaccagcactacgcgcgccagctggatgccctgactaaccagacaaccgatgagatctcagtggacgttgaaagaattcttgacatctgggaaaaacaggggctggagaaggctatgacggccttcgagcagtacaaggatctgtga

SEQ ID NO: 7518 - RNA, 1185 nt, synthetic construct
  source 1..1185: mol_type = other RNA
atgtccctggaccagcagcaaattgactctattcgccagcagtttgcctccatgcagaacaaggaagaactactcgtcctgctgaatcttgcgaaaagcctcctgttcgagaagggtacggagaagtctattaaattgcacagtttgacttggtactccaacacctctctcaacgcggtgaggtaccagtcttttacaatcaggaagaaatcaggaggcgagcgcacaatccatgcacctgtgggccccctaaagaccatccagcaatgccttaacttcgttctgcagtgtgtgtttgtcccacacccggctgccacagggtttgtaatagcaaaaagtatcgccgacaacgcaagaccccatgttgggcacccctatgtctacaatttggaccttaaagacttcttcccttcagtcaacttccaaagagtgaaggcctgtctgaagctgccaccatttaatctcaacgaaacccgagaaccgcttgcatttttgatagccaatctgtgttgcgtgcggaaccctattgaccctaaacaggcatttttgcctcagggcgcccccacaagtcctgtgttaaccaatattgtttgccaacagttagacaggcgactcaccgggctagctaagcgattcggggcttcctacactcggtatgccgatgatatgacattcagcagcttcacgaacgtttaccagcccggtagcgagttttgccaggagctgaatcggatcatctcggggcagcgcttcgtgattaatccatcaaagactcggctgcagaggaccggctatcggcaggaggtgactggcctggttgtgaacaacaaggtaaatgtcaacaggcgttatctgagaaccctccgcgccatgctgcataattgggaaacactgggatacgatgaagcagatcgtagattcaaacaggcctatgctcttgaccgcgcttatactggaaagaaggctccagctctcctgaatgtgctgatgggcaaattagagtttactaagatggtgaggggacaagaggatgtgctgtacagccactataagcaggtcttcgagacactccttgccgaaacgaccgatcagaaacccgtagaattggagcaaattttagatatctgggaggaacaaggtatcgagaaagcgatgatactgtttgagagatacaaagccctctga

SEQ ID NO: 7519 - RNA, 1188 nt, synthetic construct
  source 1..1188: mol_type = other RNA
atgcagctcaccgaagaacagaaggagacgattaaaatttgtttctccactatggaaagcatcgacgatctcgtggttttactcaacttcgtcaatcccctgttatacccagaaaattacgaggggaagattaatgctatccagaaaaaatccgtgaccttctatgctaaccctaagctgagcggcgacaagcgctatgcagagttctctatcagaaaaaaatcagggggagacagaaagattgctgccccacacaaatcattaaaactgattcagagcgccctcaactttattttctccgtgatatacgagcccaaggagtatgtcactggatttgtaccagaaaagtcgatagttgacaatgccaaggtgcatgtcggccgcaactatgtatataacatcgatttggagaacttcttcccgtctatcgaactgaatcgggtgaaagctgtgctgaagctcccaccttttagtctggagggcacagaaagggagaagatagcctacctcatcgcctgcttggcgtgcaaagacggacgactaccccaggggtcccccacaagtcctgttctttccaacatcgtgtgccaaaagatggacagaaggctgcgtggcttcgcaaaggcatttcactgtcgatttacaagatacgccgacgatatcacattcagcgctaacaaagacgtcttcaaccagacttttaaaaccgaactgaagcggattattgaggatcaaaatttcaccatcaacgagaagaaagtgaggcttcagggtaggggctacaaacaggaagtcacgggactgatcgtcaatgaaaagctcaacgtgtctaagaagtatgttcgggaggtacgcgcaatgctgaataactgggataagttggggtacgagaaagcaagtgagaagtttaagaagcactactacgaggataaggggcatgttaaaaaaggagaagcgtctatgcagaatgtggtatggggcaaactacagtttcttaagatggtgaaaggcgaggaagatgccgtggtgctgaaatacgaagctcaatacaaaaagttgaacccgcaaccccttcaggtcaatctggataaccctaccttgtcagatatcctggccatctgggagaatgacattaatggtaagggtatagaggacgccatggagctgtattatagcaagtttaagtga

SEQ ID NO: 7520 - RNA, 1146 nt, synthetic construct
  source 1..1146: mol_type = other RNA
atgattcggcttaagtttaacacattgaattcgattgaggacatagcgactctaatcaatgaagtttacgcccttcttttccccaacgccaagccacttcccaaaacgaaaaagccttttcacatctcactgacttccctcaattacctggcttacagcgagcacttccgtcaaaaaaggtataaaacattccggattcccaaaaagaagaagggcgaatttcgtgagatttcagcacccacttacaccttaaaagcagtgcagcggtgcttgaatgcagtctttttctgcttattcgaaccttacaaggctaacgaactgccagagaatcagcagcatctgaccggcaagaaaattttcccgcacaaggctgccaagggatttctgcctaaccgatctatcgtcgataatgccaagctgcatgtggggaagagattcgtgtataacatagacctggaagggttttttccaaacacctctttcgctagagttcgccaagtactgaagctcgcaccctttaacctgaaaaatgaacgcgatgacctgggaaaactcatcacagccctatgttgtcaggatgattgcctgccacagggtgcaccaacctcccctaccctaactaatatggtgtgtcaacgactggatcggaagttgtacaagctggccaaagaaaatcacgctaactacacgaggtatgccgatgacattacattcagcagcgacaaaacaattttcaatgagcaccttaaagaggctatcgagaaaactatcaacgaggaagggtacaagatcaacaaggcgaaagagagactccaggggaagggaatccatcaagaggtcacaggcatagtggtgaataagaagctcaacgtcaccagaaggtatatcagggacctgtacttttggttttcccattgggaaaaagacggatatgcctctaccaaagcctattttgacttgaaatatgtgaaccagaagggttacctgcgctataagggcaagatccccccgatggagaacgtcttatggggcaagatccagttcctcggcatggtgcgcggtaaaaatgatgagctctaccagaaattcttggagaagtggaaggtttgcagtcagagtaaagacgtacctataattgaaaactga

SEQ ID NO: 7521 - RNA, 1191 nt, synthetic construct
  source 1..1191: mol_type = other RNA
atgagcaacgacaacctgttccaggaaaacatcaaaagcattttctatagcatcgactccattgaggatttttgcaatctgctgaatcagatttaccagcacatttttccttcccgtgacactaagctgaacgtggttattagcgtgaaggacctaaactattacgccttcgacagatctaggaacaagtacaagacatttgccataaggaaaaaagacggcggctctcgcatcatcaaagcaccgaattacaagttgaaaaccatcctgaagtgcctgaactggctttttaatacgctattcattccccataacaatgcatatgggtttgtgaggaacaaaaatgtggcaaacaatgcggtgccacatgtcgggaaattatttgtctacaatatcgatctcctcaatttttttccaagcaccagtttccggcgagtgaaatccgtattcgaactcccccccttttatctgaacggcgacaaatcaaagctggctaatagggagaaactggggttcttgatcgctaatctgtgttgcgatgccgggttcttgcctcagggagccccaacatcacctgtgctgacaaatatagtgtgtcgcagaatggataagaaactttacaagttcagcaaacagaacaattgtacttacactcgctatgccgatgatattacttttagttcctataagcaggtcttcgatgagtctttcaagaagggaattaagtccatcatagagaacgaggagaactataagataaatgacaaaaaggagcggcttcaatcttatggtgaaaggcaaatagtgacaggtttagttgtgaatcagaaactcaacgtcacccgcgattacaacaaggatatccgtttctggctttggagttggaagaagtggggctacgaacaaacgcaattacggtttgctgaagagttcgtatataagaaatcttaccagaagtacaacggaaaggctccctcctttgtgaattatctctcaggaaaaatcagatatctcagcatgatccgaggcagagatgacgaacgggtaaagagatacatcgacaacttcaacaagatggtcagtgataccgttaagacctttaccactgttgatttgctgcagatcttccggaaaattgacacacacggtaaagactcgatcgactactcattcaagaaaaatattgcctga

SEQ ID NO: 7522 - RNA, 1278 nt, synthetic construct
  source 1..1278: mol_type = other RNA
atgcgtttaacaccggagaacatcgaagaaattaaagtcagattcgcgaaaacggagactgttgaggagctggctcagcttctgagctgggtctacgctctgaagttccctaagaggagcgagaaaacaactattattatcgaagccaagcacctcaattactatgcttttaaacccgtcaaccggtacaagcagttcacaatcaagaaaaaaagtggtggagagaggacaatatctgccccacgctacaaacttaaaactattcagaagtgcatccacgaaatcctcaacgcagtgttcacccctcatttcaccgccactgggtttgtgccccgcaaatccatcgttgataacgcaaaagtgcatattgggaaacagtttgtgtttaatacagacctcaaggactttttcccctctaccgagttcaggcgtattaaggccgtactgggactagctccttttaacctgaccgatgctaacgagatcaactcaaacaaggacaaaaagaagacctcagatgagaagggtaaaggatacctgggctatcttatcgccaatttgtgttgcgacaatgggtgtctgccgcaaggcgcacctaccagcccaaccttaacgaaccttatatgccagcgattagacaaaaaactctacaagtatgccaaatcgattaacgcaacatactcccgctacgcagacgatattactttcagtgccaataagcccgtctttgacgaaacctttaagaagatcctgattgacttgatcgaagtgcaggagaagttcaagatcaattttgaaaaggagcgattgcaagggggtggagagcggcaatccgtcaccggaatcattgtgaatagaaagtccaacgtggatagaaagtaccttaaagatgtgcggttctggctaatgtgttggaagaaatttggcaccaatgccactcaacagaaattcctggttcagtttccagagaaaaaagggttcctcagatataacggcacaactccacagttttataattacctcaacggcaagatcctgttcctgggtatggtaaggggcgcgaaggacgaaatcttcttgaagcagaaaatgaacttcgatgagttgtattctgaagttacagggaagaataataagacggaaattggcactgtgatacagcgggacagtaattatgagagctcagatctgtctaagggcatactggagatactgaatgaactggatcgcaatggatataccaatgctaacaacaagctcaaaacaatctttaagtga

SEQ ID NO: 7523 - RNA, 948 nt, synthetic construct
  source 1..948: mol_type = other RNA
atgaagctgtcggagacaattcaacaggagatcaaccagaagtttcaaacgattaaatcagtggaggacttggtgatcctcatgacttttgtttacggacatctctatcctaacatccagactaagattgagattaacaagcgaaagctccacttcatcgccttttccaaaaaggagagatacaaatctttcaccatcccgaagaaaagtggcggggaaaggaaaatttttgcccccatctacacactaaaggtttatcagaagattctgaacgaaattctgcagatagtttttacaccccacaagagctcccatggattcctcccaggcaagtcaatagtgagtaatgctaaccttcactacggcaagcagcatgtgtacaacatagatctaaaagacttcttccctagtacttcttttcgtcgggtgaaaaccgtcctccaattgtccccatttaacctgaatcaggatagagagtcattaggattcctgatagcaaatctttgctgtaacgacaatgggttaccacagggagcacctacaagccccatccttaccaatatagtatgccaacggctggacaggaaactgttgcgattcgctgcgcagtacaagtcttcttataccaggtatgctgatgatattacgtatagcagcaaccagaataagttctccgccgagtttgaaagcaaattgcaggaaattatccatgaagagggttttgaaatcaactcaaataagactaggctgcaggacttcaaaagacgccaagaggtaaccgggctgatcgtgaatcgcaaagtcaatctgaacatcgaattcatcaaacaggtccggttctggctttacgtgtgggaaaagtttggctacgccagcttccacgagagactgtcctccgattatatcaagagtggcaatacctctaagcgcaaagggggtattcactga

SEQ ID NO: 7524 - RNA, 1773 nt, synthetic construct
  source 1..1773: mol_type = other RNA
atgagtggcgtcttcttggataagctactgatcgaaaatacgaagaaacgttttgatcagatgaccaatctcacagacttcgtgagcctcctcaactacatcgagcagagagtgttcaaaaacaagaaaaaacccctcacagttccacacctctattatttgagcaagactaagaatacccgctacgaagaatttgaaatccccaagaagaacgggaagcctaggaagataaagagtccagagaacagactgaagcgggtccaatcccttatcaacatcctgcttcagatcattttcgaagatcattctcactactcagcaaatggctttctgttcggcaaggatattcgcagaaacgctctgccccacataaataagaactatctgctgaacattgacatcaagaacttctttccgtccatcccttttcgaagggtaaaagtggttctggagtttgccccattcaatctcattgatgatagagaacgcatagggtttcttatagccaacctaggaactttcaaaaatgcactgccacagggtgctcctactagtccgatcttgtccaatattgtgacccaaaatctggatcgcaacatcttaaagtactgcctgaacaagaaaattaagtatacgagatacgcagacgatttaagcttttcttccaattggaacatctttgaccagcaggtcatcaaagaaatagaggcgattattatcgccgaaaatttcatcctgaaccccaaaaagactagagtgaggaatttcatgcaacgacaggaagtaactggccttatcgtgaatacaaaattgaacgtcaagcgcgaatatctccagaaggtgcgggccatgattaataattgggagaaaggagggctaagttttgctatctcacagtttaggaagcatcagccccctgagaaggtcaattataactttaaggaagtactgctgggtcacatatctttcctcaagctgataaagggggacacaaatagcgtcgttcagaacctgcaaataaggtacaatttcctcgtaaatctgttggactattcgttcatcgaggaggacaatgtgaggctgaaattggaggaggatgatcagaaaatggaaaagattgcttttgagaatgaccaaacaaaaaaggagacgttcatttcattctgcacctccgccttccaccagattgagaacctgctcaattactacttttggaagaaattccctgaaattgacgacttaaaagactacatgtggcataataaccctctttttcaggatcggtggaagaaacttaagaagttagacaagaaagagcggctcaaccgattgaacaactttaagactgtgagggacttcgacattaacaccctggtttatctgttcgagaaggagttttatttcgatcaacatctctcatacggaaaaaagttaacccacctgcgtgagattcgtaacgacgaaagccatcggtgtaccgtgctcgataccaacgaacaggttattattaatcagttcgaggagatcaagaaagagcggaaagccaaaaaagagaaaggcaaacagttcatccttagccccaaacaaaaaaaggaggagatgaactacttgacactgaagtacatcgaagagaagaattataagaacgtgagaaacatcctgcgcgaagtgaaaaacaacatcaaaaacaccctaccaaatatcgaaccacttcagataaccggaaaagtggagcagaaagagattctggaaacatctgaggtctttaattga

SEQ ID NO: 7525 - RNA, 1632 nt, synthetic construct
  source 1..1632: mol_type = other RNA
atgaagaacttgactgattttgtcgcattgctcaactacttagaattccggatttataagacaaacttgaaaccgctaaacatcaagtacctgtactatttgagcaaaacaaaagatgaccggtatgtggtattcgagatacccaaaaaaaatggcaagactcgaaagatcaaatctcccgataagttaatcaagcgcgctcagtctcttatcaatctcctgcttcagatcatctttgaaaatcattcccactatagtaccaatggcttcctgctcggcaaggacattcggaggaacgctgtccctcacattaacaagaactatctactgaacattgacattaagaactacttccccagtattaactttagaagggtgaaagtcgtgcttgaactggctccttttaacctccgtaatgagagggaaaccattgggtttctgattgcgaatctgtgtacgcacgggaacagtttgccacaaggagcacccaccagccctatcctgtctaatatagtcacacagaacctcgaccgtaaactgtcaaagttctcaaacgagaatcggattaaatacacccggtatgccgacgatctgtccttctcaagcaattggaatatttttaagccaaccttcatcaaagagattgagaagatagttaactccgaaaactttagcctgaattccaaaaaaaccagagttcgtagcttcatgcagaggcaggaggtaacaggcctcatagtgaacacaaagctcaatgttaaacgcgaatacctgcagaaagtgagggcaatgttaaataactgggagaaaggaggtctgtatttcgccacctcaaggtttaaggcccaccagaccaaatctaagaagaacctggattttaaagaggtgctcctgggccatctgtcttttttgaaactcattaagggagaagacaatcaactcattaagcgactgctcgagaagtacaacaacttgtacaatcagatagagtatgggtacatcgatatcgaaaatgtcgagaagaagctgatcgaagacaatctaaagatggagaaaatctttctggaccaggaattaccagataaagataagttcatctccttctgcactatcgcctttcaccagattgagaacttgcttaactattactactaccggaaatttgagaatttcgaggatctactgaatgagcttattatcaacaacccgaaattcaaaaagcgctatagaactactgagaaagctaaccaatccttcaagaaaattagcgatctgaacatcaatgttctggtgttcatctacgagaaggagttcttctttgacaagaagataagttatgacaagcacataacgatgctgagagaaatccgcaatgacgactctcatagatgctccgtgatagattttgacaaagaagagatcatcaaggaataccaaaaaatcgagaaggaaaggaaggggaaagaaagccgcggtaagaattttgaatattccaatcagcaggccagaatcaagctgaattacgatacactgaaattccttgacagaaagaactataagagcgtgcgctacaatcttaagaacattagctcaaacatccgaaatactctccataagaaagagctttcgtga

SEQ ID NO: 7526 - RNA, 1701 nt, synthetic construct
  source 1..1701: mol_type = other RNA
atgtcctctatcttcctggacaaaaaaatcaaggacaacatcaagcagaaattctataaggtgaaagatctcgaagaattcgctacactgctaaactttgttgagcgtcagtttttcaagaattttaaggccgagaaacttattgatgtggactacttatactacctttcgaaaaccaagtcatccaggtacactcagttcgagatcccaaaaaaaaatggcagtgtgcgcgtgatcaatagccctgacaccacattgaagcggatccagaaactgataaacataatcctccaaatcatctttgaggattatagccattacaattccaacgggtttatcctgggtaaggatataagaagaaatgctattccgcacattaacaaaaactacgtgcttaatatcgacataaagaatttcttccccagcatcaattttaggagaattaaagttgtgctcgagttaagcccatttaagctgaacaataaccgagagaaaatcagctttttgattgcaaatctcgctacaaccgatgggactttgcctcaaggaagtccaatcagcccaattattagtaacattgtcacgcagaaactcgatagaaagttgtccaagttttgcctgaagtcaaagatcaaatactcgagatatgccgatgatctcactttttcttccaacaagaaggtttttaactcagagttcatcgagaagatcgaaggcatcttaaatcaggagaatttcctgatcaacaatcaaaagaccaggattaagtcttctatggaaagacaggaagtgaccggattagtagtcaacaagaagctcaatatcaagcgggagtttctgcagaaaacacgagccatgctgaataattgggaaaaaggtggactgaactatgcgaaaaaagagttcaagaagcaccagcctgagtcaaaaaagaattatgagttcaaggacgtactgctgggccaaattagcttcattcggctggtgaaaggcattgaatccccgatagtgaacaagatatctctaaagttcaactacctgaacaaccttattgactacaccttcattagtaacgaaaacgtcaagaaaaagctgattaacgacaacataaagatggagaaacttttgttcgataagaatgaaagcgaagaggatatctttattcccttttgcacgtccgcatttcaccagattgagaatctgctgaactactattactggaggaaatttcctgtatttctggatttactgaagacattgctggaaaataatcccaatttcaaacggcgttatcgcaacctaaagaatgccaataaccacttcaagaaaatcagtgacttgaacatcaatgtgctggtgtatctctacgaaaaagagtttttcttcgacaaaaacaggtattacgacaaaaggataactcatctccgcgaggtccgaaatgacgacagccatcgctgtcagatcattgacatcgataaggattcacttaagaaagactatgagctgctgcaggataaaattaaaatccaggacaagaaagggaaacagttcgactacaaaaaggaagataagaagctaatacggtcttatgagactctcaagttcattgaaaagaaggacttcaagaaggtccggaattccctccgcataatgtcttaccaaatcaaaaacacccttcccaacaacgttcacaagaaatga

SEQ ID NO: 7527 - RNA, 1689 nt, synthetic construct
  source 1..1689: mol_type = other RNA
atggccggcgtattcttgaatgacctcttcaaaagtgaaattaaggttcgcttcgagcgcattcgaaacgtccgggagtttgtcagtctgttaaactatatcgaatcccagatctccacatccaccgaagaaatttttgaattgaccttcagtcacttgtactacctgtctaaaagtaaggatagccgctatacagaattcgcgatcttaaagaaaagcggcaaactgcggcagatcaactctcctgataaactcctaaagagagtccaaagcctcatcaacatcttgcttcaaataatcttcgagagtcagtcccattattgctcaaatgggttcctcctgggacgcgatattaagaggaacgctataccacatacaaataagaagttcgtgctgaatgtcgatatcgaagatttcttcccttctatcaacttccgcagggtgaaggtggtgcttggattatctcccttcaatcttatagatgagagagagaagatcgccttcattattgcaaatttgggtacttacaagaactatttaccccagggaagccctctgtcccccttgctatcgaacatcgtgactcaaaagctggaccggaagataagcaagttttgtctgactcaccggattaaatattcaaggtacgctgatgaccttagcttttcgactaacagaaatatactggacgaatcatttgtgaagtcaatcaagaatatcgttgaggatgagaattttaggataaacgacgagaaaactcggctgaggacatccagagaaagtcaggaggtgaccggcctcgtggtgaacgaaaaagttaacataaagagagagtacctgcagaaagtaagagcaatgctgaataactgggagaaggggggtctgaggtctgccgaagaaacatttaaaaagcaccagccgccaaataaactcaactacgactttcgaagcgtgctgctgggccatctgtcttttcttaaactcattaggggggatgacgatcagactgtaaagcgccttcgactgaaattcagcttcctcaataatcttatcgactactcctttattgacaacgaaaaagtgaaagtgagactggagaaagacaataagacgatggagaaaatcttttttgacattgacatgtccgaggacaagtttatctccttttgcaccagcgccttccaccagatcgaaaacctaatgaactacttctattggaagaagtttgagcatgatgagctgctaaatgagctcctgattaataatgctcgattcaaaaagcggtacaaaacactggagaaagcacaggaggaaatcaagaccattaggaacctcgatatcaacgttctggtctacctatatgaaaaggagttcttctttgacaagaaggtgtattacaataagcacattaccatgttgcgtgagatccggaatgatggatcacaccggtgttctatttttggcctcgacgttcaaaaactgaaagacgattatgtcctgattgaaaacgagcgtaacgataaaaagaaacgtgggaagaatttcgagttatcactcgaccaggctaaaaaggaactcaacttccttacctattcttttctggagcgccagaactacaaggaggtcagagagaatttgcgaaatataacgaagaccattaacggtgcccttaaactgaaaatcaagtga

SEQ ID NO: 7528 - RNA, 1698 nt, synthetic construct
  source 1..1698: mol_type = other RNA
atgcctgggatctttctggatgatgtaagccgcgagaaggtcattcagaaattcaacaagatctccagcattaatgagtttgcttctctattgaacttcatcgaaaagaacaacacacacctattagacaagaaaaaattcacccccattaacagcaagtacttatatcatctgtctattaccaaggacaaacgatacaaggaattttccatttccaaaaagtcaggcaatctaaggaaaattgaaactcctgatgagttactcaaacgggtgcagaaactcataaatttcctgcttcaggtgatctttgaaccatactcacactattcatccaatggattcctgtttggaaaaggcattttgaggaacgcgaagccccacgttaataaaaattacgtactcaacctcgacatcaaggattttttcccaagcattaatttccggagagttaaagtggtgctggaattgaaccccttcaatctgaaagatgaaagagagcgaatatcctttctaattgccaatatttgcacctataagaaccatctgcctcagggcgtgccaacgagccccattcttagtaatatcgtaacacagagacttgatagaaaactgacaaaagagtgcctggacctaaacattaaatacactcggtatgccgatgatctgacgtttagttctaaccagaacatccttaatcctaacttcgtcaaaaaggtggaacaaataatccaatcagagaacttcgaactgaacaataacaaaactagactgcaaacaagcatgcagcgccagcaagtcaccgggttgatagtgaacgagaagctcaacataaaaagggaatacctgcaaaaagtccgcgcaatgctgaataactgggagaaaggcggactggactatgctgaacagatctttcggaatcatcagccaatagagaaaaaggagtatcctttcaagaatgtgttattgggttacataagcttcataaagcagattaagggctctgataatgggatctcactgaagctggtggagaagtatactcttctcaataacctcattgactactctttcataaagaattccgcagtgaaagagaagcttatctctgacaattataagatggaacagattccacttttcaacaaccagccggagaatgacaagttcatcagcttttgtacctccgcctttcatcagatcgagaacctgctgaattactattactggtcaaagttttcggactttatcaacctgctcgaacatctgctcctgcacaacccctcctttaagaagcgttataagaatttggacaaggccaaatctcactttaaaaaaatcagtgacctcaacatcaacctgatcgtgtacctctatgagaaggagtttttcttcgacaagaagatttactacaagcaggagattacaaaacttcgtgaaatccgcaacgacgatagtcacaggtgtagcgtcatcggggttaataaggatgagatcaacaatgagtacgctaaattggaagccaagaaaaatgacttcaaaaaaaggggtaagaacttaatctactcgaataaggagaagaagttcatcctgaagtacgaaacctttctcttcctcgaagataagaactataaagaggttcgacggatcctgaagcacatcactctgaatattaagaataccttgccgaaaacaagttga

SEQ ID NO: 7529 - RNA, 1266 nt, synthetic construct
  source 1..1266: mol_type = other RNA
atgtctggaatcttccttgatgagaattctcgtgagaaggtgatcaagaagttcaacaagattaattccgtgaacgagtttgtttctctactcaatttcattgagaagaacaatgacaacctgaaagataagaatgcattcaagccaataaactccaaacagttataccacatcagtaaaaccaaagacaagagatacttggaattctcaatccctaagaaaaatggaggaaagcggaaaattaaaacgcctgatgagatactgaagcgggtgcagaaactcataaactatctgctccaactcgtcttcgaaccatatgcccactactcatccaatggttttttgtttgggaaaggcatcattcgcaatgccactccacatatcggcaaggagtatgtgctgaatctcgatatcaaggacttttttccctccattaatttcaggagagttaaggtcgtcctggaacttaatccgttcaatttgaagaacgagcgcgagcccattagtttcatcattgccaatctttgtacccacaaggaccagctgccacaaggggcccctactagccccatcctctcaaacatagttactcagaaacttgatcgaaaactgacaaagatctcactcagtaagaacatcaaatacacccggtacgctgatgatgtgacctttagcaagaagaacattctgaaacacatctttatcaacaaggtgtccaagataattcaggaagagaatttcatcgtaaacgaagacaagactcgattacaaaaaagtacggaaagacagcaggtcacaggcctgatcgtgaataagaaactcaatgtcaaaagggagtatcttcagaaggtgagggcgatgttgaacaattgggaaaagggcgggctagaatatgcaatcaacgtattcaaaaagcatcaacccaccgaaaaagtagattaccctttcaaggaagtcttgctgggccatatatctttcatccgtcagattaaaggtattgacaataacgtgagcattaagttaacagagaaatttagcctgctgaacaacttgatcgattacaacttcattaagaacgacattgtgaagaaacgcctgatagatgacaatcacaaaatggagaggtttctgctggtggagaatctgaccgacaacgacaaatttatttcgttttgcacaagcgcttttcatcagatcgagaaccttgttaactactattattggagcaaattcgacaacatcgaactgctgctcaattacctatga

SEQ ID NO: 7530 - RNA, 1686 nt, synthetic construct
  source 1..1686: mol_type = other RNA
atgactcatgaggaaattaccattgagtttgagaagctcaaaacaacatcgcagctcgcaacactgcttaacaaggtggagaaaaatagggcgctgcagacagaaaaactccagaagctgaaagctaaagatctcaactttttggccatttctaaagactctcgctacagggagttcaagatttttaaaaagagcggcaaagaacgcatcatcgatgccccagacaattacctgaagagagttcaaaccttaataaacgacctcctgcagatcatttttgaacctaaggtgcataacgccacgaatggctttctgcttaatagggatatagtgcgtaatgctcgcgtccacgtgaataaacgttacctcctaaatctggacatagaagatttctttccgaccatcagttttagacgggtgaagtcagtcctcgaactggctccctttaacttaaacaccgaaaaggaaaatctggcttttatcatagccaacatctgcagcctgaaaggcaagctgccccagggtgcccccacttctccaattctgagcaatattgttacgcagcagctggatcggcggatcacaaagtattgtctgaagaagaacgtgaaatattccaggtatgcggatgacctttcatttagctctaacttggatgtattcgacaaggcctttatcaaggggttgactatcattgtgaagaaggaaggcttcaaaatcaacaaagagaagactagaatgaactctaatatggagaggcagcaagtaaccggaatcatcgttaacgagaaactgaacgtgaagagggactatatccaaaaagtccgcgccatgctgaacaattgggagaaaggaggactggactacgcaaaagcacagttcataaaacactacgggaagtcgaaatacaaacctgactttagaaaggccttgaaggggcacatcaattttataggacttgttcgaggtaaagaagatccactcttcagtagactgctcctaaagtacaattatctgaactaccagattgattgcaactatatctcaaataaggtcgtgcaggaggtcctagagcgtgacaataaagaaatggaatccattccccttaggagcgtacggattaacgaagacaatttcatcgctttctgtaccagtgccttccaccagatagagaatctcttgaactacttttactggagaaaattccctgaaatcgaagatctgcttcagtatattatggactataacgaagcattccactggaagagtatcgagaaatgcaagaaacgattcccgaagatctctaaaattcaaatctgggctaaagtctacatattcgagaaagagttctatttcgataagaaaatcccctacaataaggacatcactattttgcgagaaattcggaatgatgatagccatcgctgtgcagttatttcctataaccgcgacggtatcaaaatggactacaaggagttgaagattaagtgcatgcagtacaaggaggagcataagaagaatatggagaagtccagcggcgagaacattcttgagcaaaaatacaaggtgatcaagttcttagaggagagaaattataactccgtgcggcgaattctgaagggggtgtcagacaacataaagaactatccattcgtgaagcctgtcgagttagaggaatccaattga

SEQ ID NO: 7531 - RNA, 2538 nt, synthetic construct
  source 1..2538: mol_type = other RNA
atgaaaatagagttcaaaaaggtgatcctcataaaacaatacttcgacactaccgaaaacatagatggcctcgccgatctgctgaatttcgtggggaatacactctacgaaaaaaccttttctaagaagcagctctcaaaaaagctgcttaccttttttgcctttaaaaaagaggacaagtaccagagattcaccatcaagaaaaaaagcggggaaaaccgcttcattctggcaccacatagatacttgaaactcatccaaaaatgccttaatgtggtattgaacgtggttttcgaacctcattgggctagtcatggcttcgtcctggataaaaacattgtcactaacgctagaaagcatatcgggaaaaattacgtactcaacgtcgatctcgaagatttcttcccttcaatttctttccggcgcgtgaaaacggtgctgcagctgccccctttcaacctaaacgatgaactcgcctttttaatcgccaatctgtgttgctatgaaaattcactcccgcagggagcaccaacttcccctactctaagcaacatcgtttgtcagaaactggataggaagctggccagatttgccaaagaaaatagggttagttatagccgctatgccgacgatatcacttttagcgctcggacggatctcttcgacgaggactttctgaaccgactgaaagagatcatactgtcggagaattttaaagtgaatgagaacaagacgcgtatccaatcatttgcccaaaggcagatagtgacaggacttaccgtcaaccaaaaggtaaatgttagtcagcagtacatcaaagagattcgtgcaatactgaataactgggagaagaaagggtttgaacaagcacagtatgtcttcatcaagaactatatcaaggacaaccccaacataaaaaacccatcgatgattgaagttcttcgcggcaagctgaatttcctagggatggtccgcaaaaaagataacctgtaccagaagtactttaaccaattcaataagctgctggattcctataatcagaaggaagagggcgacattatctacatcaaaaacgtgcttagcaagtataagaccgagactaacacatctaagacaaatagggatgtccgcaaatcttgcaaacataatccaattagggtgaccgaatttctgagagtatttagcgaagacagaaatttcggtttaaatatgctggtgcacgaggctgaagacattgatcttgaggaaaagctgaaagagatcaatttagaattcgcgaaatacggtaagcaatttgaagaggaaaagtatcagattcccatctggttatatacccacattaagaaggacctcatagacctctataatgggaaggggcttagtatttaccgtgagcttggcaaacacccgtttcagaatgaccgagagttcacaaagaccatctttgattttaagaagacctaccggtttggacaggacaagggcgaagagacatccctcagagatacaatcattaggtgtctgtccaaggtgcggtacggcgacagggatatcctttccaagtttcaaattgcagtgtttgagcctataaaccagctggatttcgatttaattgctgctattaagaccgatgttatccgcgtggaattggccatacgaatcattctgtcctcttacctgaagcacagcaacggttcaggaaggctgaaatttgagcttcaggagatccagaaccagattattctgaacattatagacctcgactctatatgcacaaagaactatgagaacctgcagggtggcgacttcaatgagattattcagaagctgtggtccctgtgtgatgtcaacgtgatcagtaagtttaaggacggtaaaactcggatcgtgccaatccttcccgagaataaagacagcaaattgtacgacaaagaagtcgagggattcactttccagttggtcttttataacctccctcgggtgctcctcctggacaataaaggccgggttaaagaggtgaataacgaatacaaaccatacatagccattgagagtgatattagcgagaacgacctgttaagatacaacgctctcattatccacaagagcattcccaattatgttaacttgttcaagcgagctataaaggagaatatccctgttgtgagtagcggaggtggctcaggcggagaggaagggatcgtggagaacgtcggaaacatttctatcgcattcgacttgatgcagaagaacctgcccttgttcctgaagaaaatcaaggaagattacgtcgtggacatcaatatcttcttgttcgcgaataagatcaactataaaaaggccgtgaagatcaaggaggagatcatcaacattattgagaatcacaacctgctattcccggagttgtcccttgaggtaatcaataagatcaaggtattagccaagtcaaatgacattccctccttcgagaataagaaatctttgtccaagtttctacaggaaaagctaaaactgatcgagtatgaaacagcgaattga

SEQ ID NO: 7532 - RNA, 1656 nt, synthetic construct
  source 1..1656: mol_type = other RNA
atggagcctatagatatcaagtcggagaacattcttaagcaatttaacagcatctctgggatccacgacttcgtggaagtgttaaacgagatttacaagctgtattttcctgagggtgagaagaagctgtttagagtcggtagtattaattactatgcctttcacgctcagaaaaggtattacacttttgacataccgaagaagaatgggtcaacgagaagaattaacgcccccgtgtaccaactgaagctgctccagcaatgcatcaatcagctcctgcatttaatctttaagccccaccataccgctcatggctttttgctgggcaggaatgtcgtaacaaacgcggggattcatgcgggaaagcaggaagtcttgaacgtcgacctgcaggactttttcagtagcattaaattccgcagagtgaaagccgtcctggaactgcctccgtttaacctgaccggcaaaaaagagaaagtggccttcctgatatctaatctctgttgcaataacggcgtgcttccacaaggcgcccccacttcacccctactgactaacatcgtttgtcaacgacttgatcgaaagcttttccagcttgcaaaaacatccaaggctcgttactctcgctacgcagatgacatcaccttttcttccaacaatgcaatcttcaatgatgagttcatcaaggaactcaattaccagatcgagaatgaaggatttttgctcaacgaagccaagactaggatacaagaccggcgtcagcggcaggaagttaccgggctggtagttaacaagaaagtgaacattaatcgcgattttatccgcaaaattcgggccatattccataattatcaaaagggcggacagaaattcgcccagaagcagttcgccaaacactggagtaaaccaatcacaccacctgactttcggagcagcttgaaaggtcagattgaatacctgggcatggttagggggaaatccgatagcatctacctaaagtataagcagacttacctgcgcttattctcctccaactttatcgattactcattcattagccacaagggagtccgcgctcagctggagctggactacaaacgaatggaagctgcacggatcaggctaactatgagtgacgaggaaagattcaccgagtactgcctcacagcagcttttcagcttgaggagctggtgaattattatttggcacagaagatggactttgataaacttgtaaacgaactcgtcacccacacgtgggctacaaccagtgggttgaatggaaaaaataatgtgagcgagattccagccgtttataagtactttctgttcgagaagtacttctattacaaacccggagtgttctatgattcagtgattaccaaattgcgtaacataagaaatcagaagctgcaccgggccacagtggtgcagaggtccgaggagcagattttaatggaatataaggccctcatggcgaaagcatctaatcacaaaatcaactcagacggccgagtttaccaaatgagcaagtccgaagcaagactcaacaacgaagccaaggctgtctatttcttcagggagaaaaactataaggctgtattcgaggcggtgaaggatgtgtctgataagatccggatggacctcgccaactga

SEQ ID NO: 7533 - RNA, 1134 nt, synthetic construct
  source 1..1134: mol_type = other RNA
atgtccattccgccctcctccagcaatactaatggtaacgagcagccagctagcgttcctgctactaaagtggaccttactgccagctttcaaaaggtgacagacgtccatcagctggctcgggtactcaacgtggctttgaccctcgagctagcggaaaacccagagcacaaagataaacctatctcagcaaagctgcttaattactatgcataccacaagaaggaaacccggtacagaactttcaggatccccaagcgaaccaggggcgaggtccgcataatcaaggcgcccgacagaggcctgctgaggctacagcggctgctgctcagttgtcttactgcaactttcaccaccagccatcctgccagtcacggattcgtcctgggccggtcggtgctgaccaatgctcaaccacacgcagggcatagatttgtgctcaacctggacttacgcgatttcttccccagcacgtctatcggaagagtggttgccgtgttgcagctcccacctttctctctgtctaaggagggcgcctatcttattgccaatttgtgctgtgatcaaggctgcttacctcaaggagcacccacctccccgctgcttacgaacgccgtatgccagcgtctggaccgtcgcttgcaacagctggccactcaccatcggtgcacctatacaagatatgccgatgacctgacatttagttgtaaccgcccagtgtttcgggataggtttcaccaggaactcaacaccattattacagcagaggggtatcagcagaatgaacagaaacagagactgcagaccccagaaatccggcaggaggttacggggatcgtcgtcaacgagaggcccaatgttccccgcgagtacgtgaggcagattagggcaatgttacataactgggagacaagaggttacgaagctgccacatccaccctgcagcaacattatgccacatctaaggctcacgctcgacacaggggcaatgttcctaaattggaacgcgtactcgccggaaaaatagcgtactggggtatggtgagagggtgggaggatgtgaactacatctcatcactccttaagctacgaaaactgactgacaagcagaaacgacacgaacgttacacatga

SEQ ID NO: 7534 - RNA, 1119 nt, synthetic construct
  source 1..1119: mol_type = other RNA
atgttcgtgcatgtccccagctccaccaacaacggcgccgtacaaccagcttcgggtcctgtgacggaagccgtcttggcaacaaatttccgtctgatcaccgatgtccatcagctggcccaggtactcaatagcgccctgctgctcgatttggccgaaaaccccacgcaccaggacaaacctatctcagctaaacttctgaactactacgcataccacaagaaggaaacacgctatcgtaccttccagattcccaaacgaactcgcggggaggtgaggaccattaaagcacctgaccgcgggttgcttcgcctacaacggctgctccttagttgtttgacggctgccttcaccggcaatcaccccgcatctcacggatttgttcccggaagaagcattctgacaaatgcgcaacctcatgcgggacatagattcgtgctgaacctcgacctcagggatttcttcccaagtacttctattgggcgagtgatcgcagtcttacagcttcctccatttggtctggtcaaggaggtggcctatttgatagctaatctgtgttgcgatcagggctgtctgccacagggggcacccacaagccctctcctaaccaacgttgtctgccagcggcttgacagacgtctccagcaactggcgatccggcacaggtgcacctacactaggtacgccgatgatctcactttttcttccaatcggccggtttttagagacagattccaccaggagctgaacactataattgcagaagagggctaccagcaaaatcagcagaagcagagattacagactcccgaatttcgccaggaagttaccggcgtggtgatcaacgagaggccaaacgtgccgagagagtacgtgaggcaaatccgagctatgttacataattgggagacaaaaggatatgaaacagctgctgccaccctgcgcgagaagtatacaatttcaaaagcgaaggctaggcacaagggccaggtgccaaagatagagcgggtactagccgggaagatcgcctatctcggtatgatccggggaaaaaacgacgccctgtttcttgagctgtccatgaaattgatgcaagtgatgaaaaagcagaagctgtga

SEQ ID NO: 7535 - RNA, 1002 nt, synthetic construct
  source 1..1002: mol_type = other RNA
atggctttcgctctgaacgccgcactgcaacaggatctcgacgagaatccgcagcacaagcccaaactgatcaccccaaagctcttgaactattacgcttatcacaaaaaggaaaccaggtaccggaccttccaaattgccaaacgcacgcgcggtgagttccggacaattaaagcacctgaccacggcctgcttcggctgcagagactcctgctccggtgtctgactgccgcgtttacaacatctcatccagcgtctcatgggttcgtgcctggaaggtcagtgctgactaatgctcttccgcacgttgggcacaggttcgtgctgaaccttgacctcaggaatttctttccctctactagcgttgggcgtgttatggcagtgttacaactgccacctttttcgttggccaaggagagcgcctacctagtggccaatctctgctgtgatcagggtagtctgccacagggcgcacccacctcacctctgttaaccaatgctgtgtgtcagcgtctagaccgaagactccagcagctggccactcgccaccgatgcacctatacacgctacgccgacgatttaactttttcctgcaataggcccgtctttagagcagccttccatcaggagcttaacgccaccttggcggctgaggggtatcagcagaacgagcaaaaacagcgcctacagacacctgaaacacggcaggaggtcacgggcatcgtcgtcaatgaccggcccaacgtaccaagggaatatgtcagacaaatcagagccatgttgcacaactgggaaaccaagggatacgaggctgctagtgcaacgctgagacagcactaccctactagcaaggcccatgcacgccataacggaaaagtgcccaagctggaaagggtgctcgccggtaagattgcgtacctgggcatggtaagaggccagaatgattccgcattcttgaacctgatcaagtcctttcttcgaataaaagatgctggacaatga

SEQ ID NO: 7536 - RNA, 1377 nt, synthetic construct
  source 1..1377: mol_type = other RNA
atgtccgaacaggaccctccagaacagccgacagacgaacccggacctggccaggaggagtttgaaggggctttcgaggagtcacaaagggagcactccgaggaggaggcggagctcttggcagaaatcaaagccgagcttcaggcggaactgtatgctgatctggaagcagacctgaggagtgagatgcagaatgagctagccagcgaatcactgttcgggacatatagtgctaacaaatctctgagcgatgatgtgatcgaagaaatcaagcgatggggcgcatttatggccgtgttaactgccgcaacaacactcaacgatctcgccgagccctttaggcgtgcaaccaatgccaagtatctcgctgcggtactcaatgcggtgctcagactcaatttgctagagaaccccagccggaaggctaaaccagtctcatttaagctcctgaactactatgcatttcacaaaggtgagcggcggtaccgcacctttctgatttcgaagagaactcccggggaacagcgcgaaattaaggcacctgactacggacttatgcgactgcagagactcctactgggctgcttgaccgccgctttcagcacttgtgatgacgccgcacatgggttcgtctccgggaggtccgtgctgactaatgccttgccccacgccggtcgcaggtacgttctcaacctggacctagagaactttttcccaaatacacccgttcaacgcgtcgtaaaagtgctgcaactgcagccgtttggacttgtgaaacccgtggcccatttaatcgcttctttgtgctgcgaccaagggtctttgccacaaggcgctccaaccagtccgttgctgaccaatgccgtctgtcagcggttagatcgacggctgaggcagttagcctttcgtcatagatgtacgtataccaggtacgctgacgatctgacgttcagcagcaatagacctgcattccaagaactcttccacaaggagcttaacgccattctgacactggagggttataagcagaatcccaacaagcagcgcttgcagacccctaaccagaggcaagaagtaaccggagtggtggtgaaccagcgtcctaacgttacccgagagtacgctagacagatacgggccatgcttcataattgggagactaagggctatgctgtcgcctcaacaacgctgcgccagttctacccacagactaaggctcacgccagacatgagggcaaggttcctaagcttgaaaaggtcttagcgggtaaaatagcctacctgggcatgcttcggggaaaagcagatgtgatgttcctggacttcaaaagtaaactgtccactctctctgcagccgctctgccacacgacaactga

SEQ ID NO: 7537 - RNA, 1281 nt, synthetic construct
  source 1..1281: mol_type = other RNA
atggctgagacaccagatcagcttcccacccccccgcacgataacgaaccagctgccggtgggcctgcagatcatcctggtaaccctctggctggcttcgtaattaaaaacgggtggttacagcaggttaagcccggctatcagcccgctttacctgccgccgaggagttggctgaactagccgagcactttagggccgtgactgatgcaatttccctggccagagtgcttaatgctgctctcgagctccaccgtaagcaacaccctaaggggtcaccaaagacggtgagcccagggctcctgttgtactatgcacaccacaagaaagagcgctaccaaaccttccaggtcccgaaaaggactcgaggccagtttagagacatcaaagcacccgagcacgggctcagaaggatccagcggcttctcctgctgtgtctgaccgctgcgttcacaacatgtgacgaggcagctcacgggtttgtgcccggtcgctccgtcctgaccaatgcgcagactcatgctggacggagattcgtattgaatttggacctgaaagacttttttcctagcacgcgggttggaagagttcttaaagtgctgcagctggaaccattcgatctcccgaaggaagcagcacatctcattgccaatctatgctgcgatcaaggaagtctgccacagggcgcacctacatcaccccttttgactaacgtcgtttgcgtatggctggacagaaagttacgagccctcgctaagcggcaccgctgtcattacacacgttacgctgatgacattactttctccagtcagcggcctgccttcacagcggccttccaagccgagctcaatgccgtcttggtggacgaaggctacgagcagaaccctgcgaaacagcgactgcaaaccccagaaaccaggcaggaagtgaccggtgtcgtcgtaaatgaaaggcccaatgtgccacgggagttcgtgcaagacatcaggtttttactacatgtttggcagaaacatggctatgcagccgcctctaaggcaatgggccagaactatggcggctctaaggcccatgcccgctaccgtggaaatatccccaagcttgaaaaagtgctggcaggtaagatcgcgtacctgggaatggtgcgcggcaaaaagggaattgtctatgccagcctgtatgagcaactccaggatctgaacggagtgactgccctgcacatacttgaggaactgaccataatcgggttgcaggtggagtttgacaagaaccagaacctgtga

SEQ ID NO: 7538 - RNA, 1236 nt, synthetic construct
  source 1..1236: mol_type = other RNA
atggccgagacacctgatcagctgcctcccacacccaacgaaaatgaaccagccgctggagctcccgctgatcagcctggagagccactcgctggcttcatcgtcaccgatgacaaactgcagccggcattaccagccgccacagagttggccgaactcgcagagcactttcgcgcggtgaccgatgctacctctctggccctggtcctcaatagtgcccttgagctgcaccgcaagaggcaccctaagggcagaactaagacagtcgctcccgggctgcttttgtactatgcgcaccataaaaaggagcgttacagaacttttcaggtccctaagcgcaccagaggccagttcagggacatcaaggctccggaacatgggctgcttagaatccagcgcctcctgctgctgtgtctgacggcgacgttcaccacttgtgacgaggccgctcacggttttgtcccgggacggaatgtgctaactaacgcccagccacacgctggtaggcgattcgtgctgaacttggacttgaaggacttcttcagtagtacgagagttggacgtgtgcttaaggttcttcaactggccccctttaatttgcccaaagaagctgcacatttgatcgcaaatttatgctgcgatcaaggatcactgccacagggcgctccaacatcacctttactcaccaacgtggtatgcgtttggctggaccgaaagctacgcgccctcgccaaaaaacatagatgtcggtacactcggtatgcagatgacattaccttttcgtcccagcggccagcatttacccccgcgttccatgccgaattaaatgccgtgctggccgatgagggatacgagcagaaccctgcaaagcaacggctccagacccccgaaactaggcaggaggtgacaggtgtggttgtgaacgaacgccctaacgtgccaagggaatttgtgcaggacattcgttttctcctccacgtctggcaaaaacacggctatgtagaggcatctaaagcaatgactcggaagtatgggagcagcaaggcccacgctaggtacaaggggtccacacctaaactcgagaaagttctggcgggcaagatcgcatacctgggcatggtgagggggaaagaagacgtagccttcgagcaattcgcccattctctggtcaccctatccagccccgaatatcgagagattgagatgctgatttccatacttagcagaataggttga

SEQ ID NO: 7539 - RNA, 1299 nt, synthetic construct
  source 1..1299: mol_type = other RNA
atgccccagccccccgatgatctttttccaccctctcccgatgcagcagctggcagagaagaggatgctgctgggataccaaaccaggggagtagcatgccagatgaacccgcctcgattccacaacctgaccggataagggatgcggcggatttgctagccatgctcgacgccctcgatgacattcagcctgatcccctgacagacaatctggcagcacagcccttcccactaccagtcccaactaaactagctgatcttgccgagccctttagagcagtaactagcgcggtgtcactggcgagagtgctcaatgccgcactgcacttacatcgattacgttacccacgatcccaagctaaacctgtgtccgccaaactcctccggtattatgcccaccacaaacaggcgcgatatcatacctttcagattccgaaacgcacaaggggacagtttagagacatcaaagctcccgaccatggactcagacgcgtgcagcggcttctgctgctgtgcctgactgccgcattcacaacatgtgacgaggcagcccatggtttcgtccccggcaggtccgttctcaccaacgctcagccacacaccaagcggcggtttttgctcaatctggacctgaaaaacttcttcccaagcacctccgtaggtagggtcctggccgttctgcagctggcccctttcaatctgaataaagaagccgctcacttggtcgcaaatctgtgttgtgatgctggagtgttgcctcagggagctcctacctcacctttactcactaacgccgtgtgccaacgtctggacaagaagctgcggcgcttggctgcaaggcatcactgccgatacacaaggtacgctgacgaccttaccttctctagtcagaggcctgccttcacgcctacctttcacgcagaactgaacgccgtgttgaccgaagagggctatgaacagaatccggccaagcaaaggctgcagacgcctgctactagacaagaggtcacaggcgttgtggttaacgagcgccccaacgtgccgcgcgaatacgttcgcgacatcagatttctgctacatgtctggcagaagcacggttacgcagtcgccacacaggccatgcgtgccaagtacgggagctctaaagcccacgctcggtaccagcagaagatcccgaaattagagaagttgctggccggcaagatcacgtatcttgggatggtgcggggcaaagaggaggtggtgtatcgcactctccttagaaagcttgagatcgtaaagaagaagcaaaagctctga

SEQ ID NO: 7540 - RNA, 1338 nt, synthetic construct
  source 1..1338: mol_type = other RNA
atgcctgaagacctcccacctgatgccatctctgcgacacccgaccagccagatgccggaacagaggaggcagccggtcaggcattggaggccgttcagcacgccgagctgctgagagtcctgtcccctgaataccaggcggggttttgggcaatgctgaacgcccaaaaagggagacagccacgtcctgcccctttgctcgaaataatcgataccgccggcctcgccgtaccttttagggaggtaatggatgctgacaccttggctcgcgttttaaacgctgctcttgcactggacgtcgcagagaatccccagcacaaacccaaacccctaattgggaaggtgctgaactactatgcttttcataaaaagaccactcgctacagcacttttgagatcccaaaaagaaccaggggcgaaatgcgagtcataaaggcaccagatcacggcttgcggagaatccagcgcctattgctcttatgtcttacagccgcatttactacgtgtgacaaggctgcgcatggattcgtgcccggcaggtcagtactcactaacgcccagccccacgcaggcagacgattcgttctgaatctcgatctgaaggacttctttacaaatactcactatggtcgggtggaacgcgtccttcaactcccgccattcagtcttttgcccgccgtcgctcggcttgtggcaaatctttgctgcgatcaggggagcctgccacagggtgcaccgacatccccactgctgacaaatgccgtatgtcagcggctggatagacgtctgaggcaactcgccaagtgccatcgcgccacctatacccggtatgctgacgacctgacgttctcttcccagaggcccgcattccgagagcctttttatgccgaactaaaggtgattctggacgctgagggataccaggagaacgctcagaagcggaggttacagctgcctaatgcccgacaagaggtgaccgggatagtggtgaacgatcaacccaacgtgccgcgcgaatatgtcagacaaatcagggcgatgttgcataactgggagacaaaagggtacgaagcggccagcacgactctccgtgcccattacagggagtcgaaagccggagcacggcacaaaggcaccgctcctaaactggaacaggtcctggccggcaagattgcttacctcggcatggttagaggaagcgactcagttgaatacaccgtgttctcccagaagctgaaaagtcttggtttcgacaaggaaaatttagctattatgggaatcctgaaggtgattaaggagaaaggcgtgaaggaggcgatcgcttctaagcaggtgtga

SEQ ID NO: 7541 - RNA, 1299 nt, synthetic construct
  source 1..1299: mol_type = other RNA
atgcccgaagacttgcctccagacgccgcttcagcgacccctgaccaacccgatgccggaatcggcgaagcagcagagcaagcaccagaggttgctcagcacgcggagctccttcgcatccttagcccagagtatcaggctggcttttgggcaatggttaacgctcagaaagatcagcagcagcgaccgctgccactgcctgaaatcatagatactgctgggctcgcagtgcctctgggggaagtgaaggacgctgataccttagcccaggttttaaatgcggccttgaagctggacgtggtggaaaaccctctccacaagccaaagcctctgacgggcaaggttctgaattattatgccttccacaaaaaggccaccagatacagtacttttcagatccccaagcggactaggggtgagatgagggtgattaaggcccctgatcacggactgaggcgcatccagcgtcttctgctgctctgtctgacggctgcgtttaccacttgcgatgaagctgcccatggcttcgtaccgggtcggagtgtcctgactaacgcccaacctcacgcaggacggcgcttcgtgcttaatctggacctgaaggacttctttacaaatacccattacggccgagtggagtctgtgttgcgaattgcgccctttggtctgcaacccgccgtggcacgtctcgtagctaacctgtgttgcgatcagggcagcttacctcagggggctccaacatcacccctgctcactaatgctgtctgccagagattggacaggcggctgcgacagttagcaacacgtcatcgcgccacatacacccggtatgccgacgacctcacattcagctcgcaaagaccggcatttagagagcagttccattccgagcttaaggaaatactcgatgctgaaggctaccaagagaacgccctcaaaaggagactccaactgcccaatacacgccaggaagtgaccgggatcgttgtgaatgaacagcccaacgtcccaagggagtacgtaagacagataagggccatgcttcataactgggagacaaaagggtacgaggtggcctccgcaaccttgcgctcccactaccgggaatctaaagctggagcccggcacaaaggcacagtccccaatctagagagggtcctggccggaaaaattgcctatctaggaatggtccgcgggatcgagaaccccgagttcattaacttcactagagtgctgcaggagttgacgattacccagaagtttagattctctttggatcttgtcatgccaaaactatga

SEQ ID NO: 7542 - RNA, 1065 nt, synthetic construct
  source 1..1065: mol_type = other RNA
atggaatttacttcagatgaaatccagaccattaaaacagcccttcagtctgggaagaacctggccgacctgaccgacttgcttaaccttgttagcgattggattgcgcagaaactggtgttagaatataagccttttagcatcaagcaggtgtatcattattattacaacctggagagcaaatacaaggagcaccgtattagtaagaagtcgggaggggagcgagtgattcacgctccagaggagacattgaaacgaatacaacgcagactgaacgtcatcctcagccatctctataagcctacggaggccgctcacggctttgtgatgaaccggtctattgtctccaatgctcagccccacctagggaagaagaacgtgttcaatctggatttgcaagactttttcccaactatccatttcggcagaataaaggcagtactgcagctgcctgagtatggtttaactagtgagtttgctcatatagtcgcaaatttctgctgcttccagggtaaattgccccagggatcaccagtgtctcccatcttgaccaacatcgtatgtcggcggatggattacaggatttccggactcgccgcaaaacacgggttcacgtacacaaggtacgctgatgatatcacactatcctttgacgaactttcaaaagaagccaagcaaaaaatgggcctgggcctgggaaaaatcctcaaggaagagggcttcaaggtgaattccaagaagacccgcttactgaaacctaaccagcggcaggaggttaccggcgtggtagtcaatgagaagctcaacgttaacagagaatacgtccgcactatccgcgcgattctgcataattggcaaaaacacggactggaagtgacacaggcaaagttcctgaatcactaccccgaagaaaagggcttcaaaagaaataaaaccatcccggaccttaggaaggtgctactcggtaaaatacagtttctgaggatggttcgtgggggtagtgacgaggcctttaaagagtacctgatcattttcgacaagctcgccaagaacaatctcaaatga

SEQ ID NO: 7543 - RNA, 1065 nt, synthetic construct
  source 1..1065: mol_type = other RNA
atggagtttacaccggatgaactccaaaccatcactaatacactccgaagcggtcgaaatctagcggacttgactacgctccttaacttgaccggcgaactcattgctaagaagctggagttagagcataaatcatttagtgtgagacaggtctaccattactactacaacctggagagcaagtataaggaacacagaatgccaaaaaaatccggcggcgagaggattatccatgcccccgaggaacgtctcaaacagatacagaggctcctgaatgtggtgttctcccatctgtatcagccctctgaagcagcccacggttttgttaggaacaggagtatcgtcactaacgcccggcctcacgttggtaagcagcatgtcttcaacatagacctgaaggacttcttccctactatccactttggccgggtcaaggccgtgctacaactgcccgattatggactaacccccgaattggctcacatcgtggcaaacttttgctgtttgcagggacggctcccacaaggatctcctgctagtccaatcattactaatctcgtgtgcaaaagacttgactatcgcatttcagggcttgccgcaaagcacgggcttacgtacacacgctacgccgacgatattagcctgtcgttcgatcagttatcccacgagtcccgcaaatctttctcatatgggttaggcaagatactggacgaggaggggttcatggtgaatggaaaaaaaaccagactgctgaggccaaatcagaggcaggaggtgacaggggtagtgatcaacgagaagataaacgtcaatcgcgactacatccgtaatctgcgggcgattctgcacaattggcagaaacagggagaagagacaacccaagtacgatttgaacaactgtaccctaagaccgctgtttttcagagaaagcgcaagattccgaaacttcagaacgttctgtatggcaaaattcagttcctgaagatggtacggggcggtgaagataaggatatccaaaacttcttgatccagatcaacctgctgagcaataacgtgagaaaatga

SEQ ID NO: 7544 - RNA, 1047 nt, synthetic construct
  source 1..1047: mol_type = other RNA
atggaactcagtcagtactatatcgacgaaattaaggcgcgtgtggccaatggtaccaccttagaggatgtcacaagccttattaacttcataatcaacatccagaacgaaacactaggcaccacttaccggttcatttctactaagcgcctcgcctattattttgtgcatcgcgacgagaggtacctatccttcgaaatacctaaaaagtcaggtggcgtgagacagattacagctccagatcctttcctgaagaaggtacaacgcaggctgaatttcatcctggaggtcttgttccgaccaaaagcagccgcccacggatttgtcacagggcggagcatcgtgaccaatgctaaggtgcatgttggtaagaactacgtctataatgtagatctgaaagactttttccccacaatccactatggaaggataaaggcggtgcttcagctcaattcattccgtatgaagccagattttgcccacataattgcccacttatgctgttataaaggaatcctccctcaaggggcacccactagtcccatcattaccaatatcacgtgccaacaactcgataagaacctggtcgattatgctaagctgaactcctgctactatacgcgctacgctgacgacatcacatttagcgctgataaaaacgtgtttaaggacaagttccatgagaacctgaaattacacctggaagccgccggctttaagctgaatgacaagaaaactcgaaaacagaagagaactcagagacaggaggtgaccggcattatcgtgaatgagaaactgaacctccagcggacctacattaaaaaaattcgggcaatgctgtacaattgggaaagagacgggttgcccgcatgtcagagggagtttaacaaatattacccgctggagaaagggtttgttaagtcgaggatcttgccacctttcgagaacgttctgatgggcaaaatactttttcttggcatggttagaggaaaagaagacaagtacttcatggagttcacctctaagtaccagtccttgaagtcttga

SEQ ID NO: 7545 - RNA, 1047 nt, synthetic construct
  source 1..1047: mol_type = other RNA
atggaactatcacataaacagacggagtacattaagtatttcgtctcaaatggcgaaaccttggaggatctgaagtctctcatcaattacatcattaagctccagaacgacacactgggcaccacgtataagccggtcagtatcaagcaactcactttctattttgccaatcgtgataagcagtattttaacttcgagatccccaaaaagacagggggggttagaaagatcaccgccccagacctcttcttaaaaaagattcagcgcaggatcaactttgcgctggatttgctgtttaagcccaaagcagcagctcatggatttgtgaccggtagatcgatagtgtctaatgcaaaagtgcacgtcgggaagaaatacgtatataacgtggacttaaaggatttctttcctaccattcacttcgggagaatcaaagccgtgctccagctgcatccttttaagatgaaaccaaaatttgcgcagctgattgcccacatttgttgctttgaaggaattttgccccagggtgcccccacatccccaatcataactaacattatttgccagcaactcgacaaaaacctggtgagcttcgctaagttctacaagtgctattatactcggtacgctgatgatctgacctttagttccgacaagaacagcttcaaagaaaaattctacgaagatctggtgcttcaccttaccaacgccggattcgctctgaatgagaagaaaacacgcaaacaaactaggacacagcggcaagaggtcactggcataatcgtgaatgagaagcttaacttacagaggtcctacataaaaaagatccgggccatgctttataattgggaaaaagacggcctgcacgcatgtcagaaaaatttcaaccaatactaccctctggagaagggcttttttaagaataagagcgtacctccattcgagaacgtcgttatgggcaaaatcctcttcttgggtatggttcgaggaaaggacgacaaatacttcctagagtttttcagcaagtaccagaatctgtctaagtga

SEQ ID NO: 7546 - RNA, 1065 nt, synthetic construct
  source 1..1065: mol_type = other RNA
atggatttgactaacaaacacatcgagtacattaaactgttgttacacaagggcagcacccgggatgatctcgtgtccctgatcaactttgtaatcgagctgcagaacgaacagctccagactaactacaagacaatctctaacaatcaacttgggtattacctagctaagcgggatgaaaagtatattcatttcgagatacccaagaaatcgggaggcgtgagacgtatcagttccccttccaaagtgctgaaaaagatccagaggaggattgcttttgtgctagaggtcctgttcaccccaagattaagcacaaatggctttgtgaaacagaggtctattgtcacgaatgccaaggggcatatcggccggaaatacatttataacatcgacatcaaggacttctttccgagcacccactacggacgagttaaagccgttctccagatttttccattcaaagccagcgaggaaatggcacacctgattgcgcatctctcttgttacaagggaatccttcctcaggggagtccacttagtcccatacttactaacatcgtctgtcagtctttggattatcacctggtgaaactggcccaagaccataagtgcttttattcccgctatgcagacgacatcacgttctcatcaaataagaacatttacctcaacgagaagttcttaattaagcttaagaaggttgtgaacgaccagggtttcaatatcaatgaaaaaaagacccggctgagatcaaatgctcaacgccaagaggtgactggtgtcatagtaaataccaagcccaacctgaagagaacatacattaagaagctccgagcaatgctgtacaattgggaaaataaaggactcaagtattgccagaataaactgacaattcactacccttatgagaaaggcttcatacgtaacaaagtcgtgcccgactttgaaaatgttctgcagggaaaaatacagtttctggggatgatcaggggcaaggatgaccattactacaagaccttcaatcgcaagttcaacgagttgaaaaaagtgaagaacggttattga

SEQ ID NO: 7547 - RNA, 1062 nt, synthetic construct
  source 1..1062: mol_type = other RNA
atggactttacacagacagaaattagtgaaattctgacccaactccagcagggacagaagatcgaggatctggtcgagctgttgaatcatgtaatcaagctccagaacgaaaaggataagaccacttacaaacctctgacaaacaagagagtgaagttctactacgcaaatatcaacaaaaggtacgtgaatttcgaaatccctaagaagaccggcggcaaacgcaccatcacggctccagataagtacctgaaaaaagtgcaacggcgcattgatttaattcttaggctcttgttcgtaccgaagcctgccgcccatggattcctagccaatcgttctattgtttctaacgccaaaatccacgtgggcaaaaagtatgtactgaacatagacctgaaagacttttttccttccgtccattttggcaggatccgagcggtgctgcagttgtatcccttcagacttaaacccgagtacgcacacgtggttgcgaatttctgctgtttcgaatcaaaattaccccagggtgctccaaccagcccaatcatcactaacatagtctgccagaagctcgattataagcttgtccagctggctaaggagcaccactgctattttactcggtacgcagatgatattactttttcgtgtgacaaggcacggttcgacgacgaattcctgaagaagcttgatgagattgtcaaagcagaaggtttcgtgatcaatgagaagaagactcggattcagaagcgagcttttcgccaagaggttacgggcgtcaccgtgaatgagaaactcaacctccaacccgactacatcagaaacgtgagagccatgctgcacaactgggagaagtatggatatgagatcgccaacgccaaatttgctaaattttacccgaaggagaaggggttcctacgtaataaaataataccacccctggaatccgtggtttcagggaagattatgtttctcgggatggtgaggggaaaagaggacgccttatacttgcgctatagcaaccagctgaaaaccctgacagacttgaaaaatacaaagtga

SEQ ID NO: 7548 - RNA, 993 nt, synthetic construct
  source 1..993: mol_type = other RNA
atgtacaaaaagattagcgcaaagcggctcaaacactattacgccaacatcaacaagaagtacatcaacttcgagattccgaaaaagacaggaggcaaacgaaccatcacagctcccgataaattccttaaggccattcagagaaggatcaatctgctgctgacgctctttttcgaacctaaacccgccgcccatggtttcctggaaaacaggagcattgttaccaatgctaaaattcacgtcgggaagaagtatgtgctgaatatcgacctcaaggatttttttccatccatacatttcggtagaataaaggccgtgctgcagcttcctgtgtttggcattaaagctaatcagttcaaacagggggatagtatctcttttgaactccttgccaagttcggactgaaacctgagttcgcacagatcatcgcgaacttttgctgttttgagtcaaaactcccacaaggcgcccccacttctccaatagtcacaaacatcgtgagccagaggctggactataagctggtcaagctggcaaaagagtaccactgtttttatactcgctacgccgacgatatcactttcagttgcgataaaaaccgctttaaggaagaattcatgattaagttggacgagattatcaaatcggaggggtttgttatgaatgacaagaagacgcgtactcaaaagaaagcagtgcgccaagaggttacagggattacagtaaatgaaaagctaaacttgcagaggacctatgtaaagaaggtgagagctgctttatccaactgggagaaatatggatacgaaaaagccaatgcaaaattcgcgtcctcatacccacaggaaaagggttttttacggaataaaaccatccctcccatggaggctgtcttgagcggcaaggtgatgttccttggcatggtgcggggacaggatgacaccctctatttgaaatacaagaacaagctatctgagctgctgataaccaagtga

SEQ ID NO: 7549 - RNA, 1080 nt, synthetic construct
  source 1..1080: mol_type = other RNA
atgaaggagcgcaaggaaatgatcatgcaactcgtaaaaaactgtgacaatcttaaggacttctgcgaactgattaactcatccaacttgctcgtgagcaagattcagtctcagaaaccactttacacctccggcaaacaatttggctacctcctggctaacaaggagcatttatataaacagttcgacatccctaagaaatccggcgggaggcgaaaaattaacgcacccttggataatctaaaggtggtacagtacatgatcaaaaacctgctgcaactcttctataataccccatttgagtggcaggaaaagttagaggagatcagcaagaataacgcaacagtcctcccctgcgtgcacggttttgttaatggccgggggatcgtgagtaatgcgtatctgcacctcaagcaggatttcgttcttaactttgacctgaaggactttttcccttcaataggaaatggcaaaataatcgaaacgctatgtttggcccccttcaacttcagcagatttacaagcaagataattgccaacctgtgcaccctggagaaccatctgccacagggagcatgcacctcacccttgctgtctaatatcgtctcgcagagaatggacaatagatttatgagcctcgccaacaagtaccctaccatgcagtttagccgttacgcggatgatattacattcagttgtatgtaccatgtctttgacgactctttcatggagattatagaagatatcgttcgcgctgagagttatgtgatcaatccgaaaaagactaggctgcagaggcagtcccagagacaagaagtcactggtctgatcgtgaacgaaaggcttaacattcctcgcaaaaaaattcggatgttacgagccgtcctgcacaattggaaagtgaacggctatgagtccgcccaggccaaatttaaggatgctttcgggatgaaaaaggatttgaaactctctattgggggattccttaattttctgaagatggtgcggggagatcaggacgctctatatcaaaagtactacgaggaattcaagatcctgacaaatgagatcactaattga

SEQ ID NO: 7550 - RNA, 987 nt, synthetic construct
  source 1..987: mol_type = other RNA
atggaaattactaaagagaagatcaaggagctactcgaaaaaggcaaaactatggaagacttcttggaagcatataattgcttcctgctatatctgaacagtagggacgggaaagatagaaaattgtgggagaagaactcttttttgtatctctaccgaagtgttaacagacaatacatagagttttccatccccaagaagagcggagaggaacgcaaaatttgcgcccccaaaaaacagctgaaactggtgcagaagaagatcacacaaattctggagctctactacaaacctaatgctaactgccatggattcgtaaaacagaggtctatcgtgaccaacgccgagatccatacaaataagacatttgtgctgaacctggacttagaggattttttcccctccattaaaactaaccggattatcgactctctcattatcgaaccattcaatttctcaacagagatggctaagataatctcaaggattgcatgtaaagaaggcggactcccacaaggcagcccgatgtcccctatgatcagcaatgtgtgttgtgaaaagatggatcttgaccttaaagatttcagcaaaaagtacaagctcaattactcgagatacgctgatgaccttacgttctcaggttatcgcaagatcttcaacaataccttcttttccgaactggggcgtatcatcggtaaaaagcaccattttcgtattaagaagtctaagacccgcattcagaatcgcaacaaccggcaggaggtcaccggggtcgttgtgaatgacaagttaaacgtgaataggaagtatatacgggagctgagggccctgatacactatcacaagctgggaaaggccgaggagaatgcgctttatgtaataagtgggaagttggaatttctgaagatgatcaagggcaaagatcgggtctacagaaacctgttaattcagtttaagagccagaaaaatggccagcgaaacaactga

SEQ ID NO: 7551 - RNA, 1071 nt, synthetic construct
  source 1..1071: mol_type = other RNA
atggagaagtatcggactgctaggtggcggttaacgatgtatagcgaacgtcacattattaccatcctgaatcgtattcgaagaaggcgcgacatcctgaactgtaagggttactttaaactttccacgttacagaagtatgcaagcggaaactactataagtttttcagcatacccaaaaagaacggggggaaacgcataatctccgctcccgaaagagagctcgccttcatccagctatgcatcgcggtgctgttcaatagcatctacaagcccaataaatgcgtcttcggatttgtggataagcgatcgattgtgcagaatgctcagcagcacattaacaaagagatccttttcaacattgacctgaaagattacttctcttcaatctcttacaacgatatcatcgagaaactgatcagacagccttactatttctcttacccagccgcaaagtttctgacagacattttggtcgtggagactcaagatggaaagcgggttctcccgcaaggcgcacctagctccccaattgtgacaaacatgatagccgaccaccttgacgtccgcttgtccaagttcgctgaaaaacacgacttgacctatactaggtatgccgatgatattaccttctcattttcaaggagcaaacttcgtggttggcgcagtcatggtctgaccaaagggatccgcgacataatttttgacattatcgagacagaggggtttctcatcaataagagaaagaccagaatctcctttataaatcaaagacatgaggttaccggcctggtcgtgaataagaaagtgaacgtaaagcgggaatacatcaaaaggctgaggacagaaattcacaattgggagcgagatggctatgtcattgccagttacaagttcctgaaacattacgaaaagactcatctgggaaaactcaagtctatggaaaacgttatagaaggcaagctaagttttatcaagatggtgaagggcgagaacgatactacatttatgaagttgtacaaccggttcatgctcctcatgcagcgggacaaagtattcatcaattcatga

SEQ ID NO: 7552 - RNA, 1743 nt, synthetic construct
  source 1..1743: mol_type = other RNA
atgcccagaccagcgctgctgtcctcgtcattcggattgctgagcgtgcaagatctgtgccagtatctgaatagtatcccagtcagcgagcccctgctcaagcaagcctatacccccctttctctccaggccctcagtgaagtggcttccagctgctacaaagagttacacctgcccaaaaaaaacgggtccttacgaataatccacggccctaacccacacctgaaagctgtccagaaaggcctgtgcacactgttaaatgagtatcagaaggagttgaaatctccttccgcttacgggttcgtaccagggagaaacatagtggacaacgcagctcgacacaccggaaagaatgttgtgatcaacttagacctgctgaacttcttccccacaatcaactcaagcatggtggctgaggcacttgccaaaccaccggcaagcattcccctggtgtctcagctcaatcaagtcatgacaaacctgatgtgtcgcgaggacaggttaccgcaaggtgccccatcaagccctgccatggcaaacctcgtctgtcacagtctggatttgaaccttcgggccctagcacagaagcatagatttacgtacactcgctatgctgacgaccttacattttcgtcaaactaccctaaggttgcggaggaggtcttcatcaatattatttatcagcgttgtgagaagttgggtttcaaggtcaacaaggaaaagactaggatccaaaggagctccggcagacagtccgtgacagggttggtggtgaattccaaggtgtctgttaaaaagaaatactgccgtataactagggctatgcttcataactggaaaaaactggggtacgaggaggccgaggccctattcaaagccaattatcccaaaggccctctatataatctgtccaacgttctgcttggtcgaatcgagtttatcggcatggtcgacaatcacaagttgccgctcagacagcggaaaaatcaactgctctctgacacccggtatatgaaacttctggccgaatactgggaactcatgaatgggcagaactatagcttcattcagaatcagaagatctttcagaggttggtcaggtttaaccggctcgccgagaatgtagctatgattaagaacaaccagtttagttctcgcgatcgctttatccggtattgcacctacaccttcgtacagttggaggaactttataaggtatacttcctcatcaagttccaagaagactacagtaagataggccgccatttctttgacaacaacgatgcattcaaacgcatgctgctcggaaagaagaaagaagaccactcacccgaggatgtggagagagctcgtaaagaggccgagaataaaacttcatttgcggattacaagacgtacatgctggaatcccagtttctgaacgattgttactacgcgaagggtagaaatcctccaaagctccccaggctgctgaggcagctacggaatttttacgtgcatggatctgaatttactaaaagagatgaggcaagcctgaagcagaccttggaaggaattcctgcaaagaatgccgcatataaaaagaagcatcagaaggatcgagtgatgcctaaggacgaagtgaaagcccaggaagaatatcttgtgttcaagtggattgatggaggcgactacgatagtgtgcgcgccttcctgggcgacattgttgctctcgttcggtacgaatttgaagatcggaattga

SEQ ID NO: 7553 - RNA, 2040 nt, synthetic construct
  source 1..2040: mol_type = other RNA
atgataagcacacagtacgatacaaacgttctgatctcgctactccgcgagggggagtctctggatgacttgctgaccctgctcaacggcgtcgtcgaatggcaaaacttcgtgcaccagtctaaacgacggctgttcaccaggaagcagctctcatttttctacaaaaacgtggacaagaagtaccattcatttcaggtgccaaagaagtccggggccctgagaacaatcaatgcgcccgacgggaccttgaaagccatccaacggtgcattacggacctcctccagattatctaccagccccctttctcggtaaacggctatgtaaaaggcaggagcgtcgtatctaatgccttgatgcatacgaataagaactttgtgctgaatatagacctgcaggatttcttccccaatatcaagttcggaagagtgagtgcagtgttaaaacttaagcctatcgctgttaaacccaaattcgcctaccttcttacaaaatactgttgctacaacggcgctttgcctcagggagcacctacttctccagtacttagtaatctcatatgccagcgactagactttcgactcactgagctgactcggtccgagcatcttagctatagtagatacgccgatgatttaactttctctagtgatcaaccgtttcagaacgggttcctgacccgcctggaggagattatccaagaggaaggattcctgattaatcccggcaaagtgagactgctaggcagagatgtgcggcaggaagttaccggtgtgactgtgaatgacaagactaacgtcagtaggaaatatatccgtaagatcagggctatgctgtacaactggactaacctcggctatgaaaaagcccaggacaggtttcttagtagctacaaaccaccagccaatgttgtcaagaacaaaaagtcagatcctcagctgtccaatgtggtcggcgggaaaatcgactacctgaagatggttcgcggagcagacgattcaatttacagacaatgtaaggaggcttttgagcaattacttaagggggagctgatttttcagatctctgagaaaatcctcagaacgcaaaccgtagagcaccagccacggcaagtggtgtccttcctgcgcaatttcaaagttattaaccagaccggattccgtgagctgttacatgaccctgatgtctccgattttgattttaagaccaacttggcgaaggtcaacgagcagatgcctgctctgagcgctgtcttgcccgcaagcctctacacgaaactggaatcctttgttgcagtgtacaacacagacggacaggcttaccacgaaaagtatggacttcttccgctgaagggccagaagaagacaaatccaaataatctcatcgacatcctgtctcgaaagaagaagaataaagtggtcgaggatatggtgctgacaacacgggttcaggccgaagacatattgcccgataataaggtaacccaggccgccaaggactttcggacacaaatccggatagggaacgactattttcacgactggatactaattaactcgctcaagcccattgtcaatgaactcaactctagggaactggtgtctatttcctatgaaccatccgaggaagaattcagcctgaactgtgagtttttcactgacactaaagaggtgtggaaagctattaggagcttgctgaaggacttagccgagaacccttattatgatgtgaaggacgagcgcattatattgcttcgcagcgccaccattaagcgcaatctgaatggtgagtcattctttgcgactattatctatctcaacctacaaaacgctttcatcgtgaatgaactgaaagcctttcagcagagccgtctgaccaaaaaccagcagaggctgcataaactagcagattggtccaccgtgtatcaggacgaaagtggtcagttatccgagcacttgtttctggcaagcccggaaacaagatcagataatcagctcaccgaaggtatcacccacaagctcacattctatcactcatga

SEQ ID NO: 7554 - RNA, 1998 nt, synthetic construct
  source 1..1998: mol_type = other RNA
atggcgcctatccagtctgatatcgtaactcttcagaattctctacagaaggctgaggacttccacgattttctctccgtcctcaatgacgcgctagagtttcccttctctcagaagaaactgtacttccacctgaaaaacgtcgacaagctgtatcatagcttccaggtgcctaaaaagtcaggtggcctccgtaccattaatgctccaaacaaatctctgaagttcatacagcattgcttggcgtttatcctgcaaggagcatatcagccaacatattccgtaaacggatacgtgacggggcggtctgtggtgagtaatgcacatgtgcatgcaaacaaaaagttcgtgctcaacttggatctcgagaacttctttccttcaattacatttgggagggtgcatgccgtgctgcagctaaaacccattctggccaagcctaatgtggcacagatgattgctaagttatgttgttacgagggcgttcttccccaaggcgcaccaacatctcccgtcctctcaaacatgatctgtcagcggctagacagaagaatagagtcgctcgtgtccggctaccagattacatacactcgctatgccgacgatttgactttctcctccgacaagcctttcgaaaatggattcttaagcaggctcgatgagatcatcaaggccgaaggatttaccataaacctcgaaaaggttcgactgcagttgaagaatagcaggcaagaggttaccggcttaaccgtcaatgagaaagtaaatgtcacccagcggttcatccgggaaatcagggctatgctgcataactgggggacgctgggctatgactctgcccaggccaagtttttaacccactactcccctaaggttagcaagaagaagaagagcgaaccccaattacgcaacgttgtggcagggaagatcaattaccttaaaatggtgcgaggaaacgaggataccgtttaccagcaatttaaagccgagcttacacggctcgaaaagggagaggagatcccacaaaaaaagccgaaactgccagtgtggcagccgtccatcgaccacaaccctcgtagggtggtacaatttctgagaaatttccgggtggtcaacgacacaggctttcgcgaactgctgcacgaccccgatgtgagtgatttcgacttcatggctaatcttgccaaagtcaacactcagatggacggtctgaagtccgtgctcacgccaaaacttcaccagaagctgtccgtgttcgtgaacgcttacaataccgccggcgttacctatttccaagaacacggtttgttgccgctgaaagggcgacccaaacagactgtgagcctgttagctcgcctactcctgaagaaggcaaaaatgcccgtcctggaacagcagactacagagcaggtagccgtggctcctgatcgcgccgtcagtaaagcagccaaggtgtttagagagcagatcagagtcggctcagattacttccaggatctgatcctggtaaacgctttgaagccaatagtggagacacttaatgctagcgacagtgtgaacgttagctttcaacctggtgaaaatgagtttgggataaactgcagtttttttaccgatacgtgggagagtgtcaagacactgaggtcagttttgaaagacttggcccagaacacagactaccaaactccaactaatcagaggaacatttggcttagatctgctgttattcagcgagaagcggagaaagaagcattttttgccaccgtcatttacattcacctggaaggcgggaagattgagtcagagaatgccttcaaacatatccgtctccttaaaacacagcagagactctgcagcctggccgattggtcggtcctgtatcaagacgcgaacagccagactcaagaattcttcttcctgaattcagatgccaaccgctcccatcaggcacccaattatgaaggaattacccacaaactgaccttttatcacagttga

SEQ ID NO: 7555 - RNA, 1497 nt, synthetic construct
  source 1..1497: mol_type = other RNA
atgtccgaggccgaaatgaaaaaaatttggtggtttcggaatcgcatgtacaatcagttcgtggtcacctcaaaacacggcaaagctcggaggatcaatgctcctgatctcaggttgaagatgctccaaagaagcattgcaaaactcctagatcagctgtatgccccccgtaatccagtgcacgggttcgtcaatgatcgatccgtgattaccaacgcatcctctcatctgcgatccaagttcatagtgaatttagacatcgagaacttcttcccaagtatcagcgaaaacagagtagagggcctcctccgagccataggaatcgacgataacgtgtctagcatcatcgctcgcatctgtacaagacagggggtgttgcctcaaggagccccgacaagccccgtgttatcaaacatgatatgtttcagacttgaccgcgaactgcttgccctgtccaaagcctcaagatgcatatacacacggtatgctgacgatattacattctcttcgtaccagaagcccgaactcctgtttggtgctggtgtacctcctactggccgcttttctcccgagctgctcgctacgaatctctcggcagcctttaccgacaacggctttactctgaacgcggataaaagtcagtatggtgacaagcatagcaggagaatcgtgacggggctaaaaataaacagtggcttgaacgtggaccgtaggtttgttcgaaatattcgcgccgcactgtactctgtggaagcaaggggccttgcagccgcgcaaaagaaatttaaggatcggcacaacggcaccactgaccttgagctgcacctgaaagggaaaatctcttggttaggctccgtgaaaggacagttcgaccctgtcttcagggcgattgcgtctcgcttcaacgcggcttttccggcacacatgataaagatcaacccaagtccagaggatatcagatcacgggctgtctgggttttggagcattttcatggtgatttcgcccaaggcactgccttctttctgaagggggtgggactggtcactgccgcccattgcgtctcagacgctcttggggaggagattgatgtgcaccaccacagcaagcctagcaatacatttaaggttaaggttaagcagcatcacgtgatccgggatctggcaatccttgaacataccattccatccaatgaatattacgagctcgagctgacaaagcaggctttgaatatcggtgattccgtcagggccattggttacccaggctatgcccccggcgacggactgaatattcgtccgggacagatcagcagcttcagtgtgaagagtaccgttcctctagtcgaggtcacccagaagctgacccagggcatgtcagggggacccattattgacgaccagaacggggtaatcggcattatccacaagggagggccccatgagggacgggactttgccgtgaacgtagaagctttggttgcatggctggacgaatga

SEQ ID NO: 7556 - RNA, 1593 nt, synthetic construct
  source 1..1593: mol_type = other RNA
atgccaaagccgttcattatgttcgggtcgttgaacctccgcactagcatacctcctgagttggcggactattctacatttttaggttacctctgcctgtctcaggctgagcttaagaagatttggtggtttcgtaagaagatgtacaaggacttcaaaattacatccaagtacgggaagacacgtaggattaatgcaccagatagaagattaaagatgctacagcggaacattagcccactcctcgataaactgtatagcccccggaacccagtgcatggatttattcatgagcgaagtgtgatgactaatgcgagctcccacctttccaacaaattcgtcgttaaactggacatcgaaaatttctttcccagcatctcagagaatcgtgtcgcaggcctgcttcacgccctaggggtggatgagtcagtgtccgccataattgctcgcctgtgcaccaatcggggagttctccctcagggagcccccacatcacctgtcttgagtaatatgatttgtttccgcttggataaagaactgctcaaactggcgaagaccgctaggtgtatctatacccgatatgcagacgatgtgactttctcttcataccaaaagccggaactgctgtttgaagtaggcgcccctcaacccgggagattttcacccgagcttctggccagcaacatctctgccgcctttaccaataacgggttcaaactcaacgcaaataagtcccagtatgcagataagaacagtcgccgcgtcgtaaccggcttaaaaatcaattccggcctgaacgttgaccgcagattcgtgcggaacatcaggtcagcactctattcagtcgaaacacttggcttgagcgcggctcagaagaaatttgctgatcaatacggagggaagtgcgatctgacacagcacttgaaaggaaaaataagttggctgggttctgtgaaaggccattccgacccagtatttagagccactgtgctgaggttcaattccagctttccatctcagcccatcaaaatgaaccccagttctgacgaaatcagaaatcgaggcgtctgggtgctggagcacttccacggagactttgctcagggcacggccttcttcatgaagggcgtcggtctggtgacagcagcccattgtgttgccgatgctattggcgaagagatcgacgtgcaccatcacaccaaaccgagcaattctttcaaggttaaggtgaagcggcaccattttatcaaagacctggctatcctggagcacgccataccttccaacgaatactacgagctcgagctaaccgaccaagatctccaagtgggagacactgtgaccgccgtaggctaccccgcattcgctcctggggatggtcttaacgttaggtccggacagattagcagttttagtgtgaagtcgacggtgcctttagtcgaggtgactcagaaacttacgcagggcatgagcggaggtccaatcctggatgagaaaaatcgggtaatcgggataatccacaaggggggtcccaacgaaggcagggacttcgccgtccatgttaaggctttgatggaatggctgcaggagtga

SEQ ID NO: 7557 - RNA, 1377 nt, synthetic construct
  source 1..1377: mol_type = other RNA
atgctccagcgtgctctggtaccactgctcggcgaaatatactctcctcgcaaaccagttcatggtttcgtgcgggatagatccgtcattactaatgcagcgtcccacttaaagagcaagtttgtgattaaccttgatatcgaacggttttttcctagtattagcgagaatagggtgataggactgttgaaagctctcggcgtggacgaggacgtttcttcaataatcgccaggctgtgtagtaaccagggaactcttccccaaggcgctccaacaagtcccgtcttgtctaacatgatttgctttcggcttgacaaggagatgcaggttatcgctaaggcagcacattgtatctacacgcggtacgcagatgacattactttctcctcctatcagcctctgagcgccctatttgccgctggtgtcccgtcaacgggcaacttcgcccctgatctgctggctcctcagcttctcgctgcatttatcaataacggcttcaaggtacatcctgataagacccactatggggatcgccactccaggcgaatagtgaccggactgaaagtgaactcaggcttgaatgtggaccggcgattcgtgcgaaacgtgagatcaaccctcttcagtatagaaactacagggttagccgcggcccagaaaaaatttgacgatcactatggcgggaggagggacattgcccgcttccttagagggcgcatctcgtggatcggcaatgtcaaagggcagtctgatcccgtttatcgctctattgccacgcgttttaatgcgtccttcccaatgcagccaattatggttctgccgaccaggaccgagatcagaagacgcgctgtctggattctggagcacgcacacggagagtgggcccaaggctctgccttcttcctgaaagatgtgggattagtgaccgcggctcattgcgtccaggatgcaattggcaaggaaatcgacgtctaccaccccacaaagccagccaacatctttaaggtgaaagtcaagaagcaccataaaatcagagacttggcccttctggagcatagtatccccagcaatgagttttacgaactggagatgaccaacacaacatacgtgatcggcgacgttctcactgcagctgggtatcctgggttcgcccccggagatgggctcaatgagcggctcggtcacatcagcagcttcagcgtgaagtcaggtgtacccttgatcgaagtgactcaaaaactaacacaaggaatgtccggtggacccgtcttcgatgacaacgacctggtagccggtgtgattcataagggagggccagacgaaggccgtgactttgcagtgcacattgacgccctgaccgcctggctggatgaatga

SEQ ID NO: 7558 - RNA, 1596 nt, synthetic construct
  source 1..1596: mol_type = other RNA
atgccccatccactgagagtatttggcggggtgtcatttcgcgtccgcatccccagcgagatgacagacctgactacctttcttgaccacctgtgtctgtctgaggctgagctccggaagatctggtggttccgagggcgcatgtataaggatttccctctgctaagcaagtcaggcaaaccacgcataataagtgcgccagatcggcgtctgaagatgctacaacggacaattgcgcctttacttgaccagatctattccccaagaaaccccgttcacggattcgttcccgataggtcggtgaggaccaatgccacatctcatctcaaatccaagttcgtggtcaatctcgacgtagagaggtttttcccgagtatttccgagaaccgagtggctggcttgctcaaggccgtcggcatcgacgagagtgtggccgttgtcgtggcccggctgtgcacaaatcagggagtactgccgcagggtgcccccacttctcctgtgcttagcaacatggtctgttttaagctggacaaggagctgcaggccatcgctaaagcagctcattgcatttacaccagatacgcagacgacgtgaccttttcttcatatcagcctcctggcgggctgttcgctgaaggtgtgcctcccacgggcaatttcgtcccagacctgttatctccgcgactcatcggtgccttcacaaataacggcttcaagctcaacccaagcaaatcacactatggagacaagcatagcaggagaattgtgaccggactgaaaatcaacagcgggttaaatgttgatcgccgctttgtgaggaatatccggtcaaccttgtactctatagaaactttgggcgccgatactgcacagaagaagtttgaggtcgaatacggcggtaaatgtcgcctctcccaacacctgaaaggggagatttcttggctgggtagtgtgaaggggcagagcgatcccatcttccgtgccatcgcagcccgatttaactcctccttcccaacccagccaataaaagtgtcaccgactcgggcgcaaatcaggtccagggctgtgtgggtgatagagcactttgaaggaaagtttgcacagggaagcgcctttttcctgaaggatgttgggctcgtaacggctgcacactgcattgaggaggcccttggacaggaaatcgacgtctaccatccctccaagcctagtaacgtgttcaaggcccgtgtcaaacagcaccatacagtccgggacctggcgattctcgatcatgaaatccccgcacacgaattcttcgagttggaaatggcgaccagagcaccctctctgggggatgctttgacggcagtgggttaccctggatatgggcctggagacagtcttaatgtgagatcaggccatattagctcgtttgccgtaaaaagcgctgtgccactaattgaagttacacagaaattgacccaaggcatgtccggcggccctgttttggatgacgaggatagagttgccggggtgatccacaaagggggccccgaagaaggtagggacttcgctgtccacattgatgctctgactgcctggcttgatggaagatga

SEQ ID NO: 7559 - RNA, 1623 nt, synthetic construct
  source 1..1623: mol_type = other RNA
atgccaactccccgtagcatgtttgggggaaatctaacacgctccagagtgcctctcgaactgacctccattgatgagctgctccgacacttgtgtgtgagcgaagctgaattacagaagatatggtggtaccggtctagaatgtatagcgagttcaacatcagcaagaaggccggcaaatcaaggcttatttccgcgcccgatcggaggttgaaaatgattcagcgtgcactcgcacagctgctcgacgggatgtatcagaggcggaatgccgttcatggctttgtcgccgacagaagcgtgatgacgaatgctaggtcccacatgcgctccaaatttgtgttaaacctggacatcgagaacttcttccccacaatttctgagaatagagtggtcggggttctgaaggccctcggggtgattgaggacgtggcacgaatcgtggcgcgcctctgttgcaataacggggtgttgccccagggagcacctacctctccagtgctgtccaacatgatctgttttcggctggataaggacttacacggcgtggccaaggcatcccattgcatctacacccgatatgcggacgacattactctctcaagctaccagccgccagtggctctatttgcaggaggggtgccaccaaccggtaatttcagcacagaactgctggctcctgtcctggtggaagcattcgctcacaacggtttcaagctgaacgcccataaagcccactatggtgatcgcaactccaggcgcattgttaccggcctgaagatcaacgagggcctcaacgtagaccgccgttttattagaaatgttaggtctgctctctacagcatcgagacattgggcatcgaaactgcccaagccaaatttaaatccgagtacggaggcaagtgcggcgtcgcgaatcatttgcggggtaagatatcttggatcaagtcggtaaaaggccagagtgaccctgtattccgcggcatagcagcccggtttaataagctgtttcctgccgagcccatcaaagtacagccaactcggactgaaatgagagacagggccgtctgggtgcttgagcatactcatggagattgggcccaagggagtgcattttttctagagggagtgggtctggtgaccgccgcacattgcatccaagatgctgtcggccaggaaatcgatctgtatcacccaagtaggcctagcaacatcttcaaggttaaggttcgagcccaccacgctgtgcgagatcttgcactgctggaccactctataccctcaacagaatacttcgaactgcaactctcggcccggacgcatgctgtcggtgactatctgatagccgtcgggtaccctgggttcgctgctggagataacattaatgtaagatcaggccagatcagcagtttcagtgttaaatctaccgttccgttaattgaggtcacgcagaaacttacacagggaatgtcaggagggcccgtgctggacatcgatggtagagtcgctggggtgattcacaaaggaggacccgatgagggcagggacttcgcggtcaataccgatgccttgatggcttggcttagtgagcttgttacagccgtaggcgccccggtgtcatga

SEQ ID NO: 7560 - RNA, 1458 nt, synthetic construct
  source 1..1458: mol_type = other RNA
atgtattccgacttcgagattgccaaacctagcggaaagtccagggtgatcaacgcacctgacgacaggctgaagatgttgcagcgctacatagcaaacctgctggatcagatttacaagccacggaacccagtccacgggttcgttttggatagaagtgtgcgcactaatgcatcttctcacctgcgaagcaaattcgtggtcaatttagatattgagaacttctttgggtctatcagcgagaatagagtgattggcttattgaaggctcttggcgtggatgaaggcgccgccgaaatcgttgcccggatctgctgcaacaaaggtcatctaccgcagggagcgcctagtagtcccgtcctctccaatatgatttgttttcgtctcgataaggaccttcagcagattgcaaagaaggtgtattgtatttacacacgatatgccgatgacatcacattttcttcctaccagcccttgtccagtcttttcgaggccgccgtcccacctgcgggtaatttcgattttgacatgctcgtgccagaactgaagcagtcttttctcaacaatggatttaaggtaaacgcttccaaagtgcactacgcggacagaaacagccggcggattgtgaccggcctaaaaataaatgagggactcaacgtggatcgcaggttcatccgcgacatccgcagcgcattgttcagcgtcgagaaggacggtctggttgttgctcagcaaaagtacgctgagaaatatgggggaacgtgctctatcgacctgtatctgaaaggcaagattagttggattggctcagttaaaggaagatcagacccggtgtttcggggcctggcatcaagattcaacctatccttctcattcaatagggtaaagctgctggccacccaagccgagatcagagaacgtgccgtgtgggttctggagcactgggaggggaattgtgcccaaggatccgctttctttctggaagacgtcggcctggtcactgcttggcactgtgtggccgaagctgccaacaagggggaaatcgatgtgtatcaccccaccaagcgatcaaacatatttaaagtgaaagtcgctagccattgcgcagtaagggatctcgccatccttgagcattcaatccccgataatgagttttatgaactccaggctagcactcacgtggtcgggatcggtgattcggtcaccgcaataggttacccctcgtacgggcctggcgacggaataaatgtgaggtccgggcaggtgtctgctctgcctgtgaaaagcgccgttcagttagttgaagtaacacaaaagctcagccaggggatgagtggaggccccgtccttgatgacgaagacaaagtggccggcgtgatccataagggcggcccacatgaggcacgggactttgcagtatctatcaaggcgctgattgatcttgccgctggtaaatga

SEQ ID NO: 7561 - RNA, 1467 nt, synthetic construct
  source 1..1467: mol_type = other RNA
atgtacaacgatttcgaagtggccaagcccagtggtaagaagcgggtgattaatgcccctgatgaaaggcttaagatgttgcaacggtacatcgcggagctcctagatcatatttaccggccccgagatccggtgcatggctttgtcttcgacaggtcagtgagaactaacgcaagctctcatctccgctctaaatttagcctgaacctggatattgagaacttcttcggctccattagtgagaatcgtatcatagggctcctgaaagctcttggcattgaggatgacgccgcagaaatcgtagctcgaatttgttgcaacaaaggtcagctcccacagggagctccgtcctcacctgtgctgtccaacatgatctgtttccgcttggacaaggagctccagaggatagccaagaaaacgcactgcatctacacaagatatgcagacgacattacgtttagctcctatcagcccctgtctggcttattcgacggcgtgcctcctcccgctggtaacttcgacgttgaactgttgacagccgaattaaagcaaagcttcgctaataacggatttaaagtcaatgctgccaaagtccactacgcagatagaaatagccgcaggatcgtaaccggtttgaagatcaacgaagggttgaatctcgacaggcgctttatacgtgatgtacgatccgcgctttattcagtggaaaaagacggtctagctgcagcacagaagaaatttgaggacgcttatgggggcaagtgtcctattgacttttatctcaaaggaaagattgcttggatcgggtctgttaaaggcagatccgacccagtgtttcgcggactggcgagtagattcaatgcatcctttctgaagaaccgcatcaagctgcaggctactcctagtgagatacgggagagagcagtatgggtcctcgaatactgggaggacaatggggatggcgcccaaggaaccgccttcttcctgaaagacgtgggcctagttacagcatggcactgcgttgcgaaggccgagactgtcgggcttgacatcgatgtctaccatccaaccaaacggagcaacgtgttcaaggtgaaagtggttaagcactgcgccgttagggatctggccatcttagagcactctattccagataatgagttttacgagctggaaccatcaactagaaattcggtcatcggggacggagtgaccgccatcggatatccgagcttcggacccggcgatggcatcaatatacggtctggccagattagcgcacttaccatgaagagtgctgtcccatatatagaggtgacacagaagctggcccaagggatgtcaggagggcccgtcaccgatattgaccacaaggttgtgggcgtgatccataaagggggtccccaggaagccagggattttgccgtggacgtaaaggccctgatgaacctggccgtgggaaaatga

SEQ ID NO: 7562 - RNA, 1539 nt, synthetic construct
  source 1..1539: mol_type = other RNA
atgacaagcgaggccgccttgttggattatctcggggtgacaagcgccgagctcaagaaaatctggtggttcagagggcgaatgtaccagacatttgaaatcgctaaggcagtaggcaagtcaagaataatctcggcccctgaccgccgtctgaaaatgcttcaaagaaatatcgccaccctcctcgacgccatttacaaaccacgccaccccgtgcacggatttgtccctgataggagcgtgttaaccaacgcgtctagtcacctccggtcaaaattcgtggtcaatctggacatcgaaggctttttttctgctatctccgagaacagggtcgctgggctgctgaaagctcttggagtgcagtctcgggctgccgacatagtagcacgcatttgttgcaatcgtgggtgtctgccacaaggcgcaccctcctcaccggttattagtaacatgatttgtttcggaatggataaggaattgcagcggtttgctaagaccgcacattgcatttacacaaggtacgccgacgatattagcttctctagctaccagccccttactgccctgttcgacggggccgtccctagttctgggaattttgatcacgacactctggcgcctagactaagagcagccttcgtgaacaatggtttcaccataaacaaggccaaggcacattatgcggacaagcatagtcggcggatcgtcactggtctgaaaattaacgagggactaaatgtcgatcgaagattcatcagggatgtgcgctcaaccctgtattccatcgattctctcggactggccgatgcacagaagaaattcgaagataagtacggcggcacctgtgatctttccagctttttaaaaggcaagatttcctggattggaagtgtgaaagggcggtccgatccagttttcagaagtcttgccggccattttaatgtcaagtttcccacccgcgccttcaagttgcaacctactagggacgaagtgcgtaagcgagctgtgtgggttatagagcacttcgagggagagtttgcacaggggtccgccttttttctaaagggcgtgggtctggtgacggcatcccattgcgttgctgaagcggcggcagcaggtgctgagatcgacgtttatcacccgacaaagccatcaaacatcttcaaagccactgtaaaacagcactgcgagatccgagacttggctatcctggaccacaatattcccgaaaacgaattttatgagctcgaggtgtcaggcgagaagttcgcagtcggtgatccactgacggccctgggctaccctaaattcgcccccggcgacggcatgaacatcaggagcgggaacatatccgccttcagcgtgaagtcttcggtccccttaatcgaggtgacacagatgctgactcaggggatgtctggtggcccagtgatagatcgccatgacaagctggctggaattattcacaaaggaggcccggaagaaggaagggactttgctgttcatgtaaaagctctgatggactggctcaccagctga

SEQ ID NO: 7563 - RNA, 1497 nt, synthetic construct
  source 1..1497: mol_type = other RNA
atgtcaaaatccgagcttaagaagatctggttctatcgcgagagaatgtaccacaatttcaatgtttcaggggctaaagaaaccaagagactgatatccgcccctgaccaccgcctgaaaatgcttcagcgcaaaattgccgcatctctagatacgctgtactgtccaagaaagtctgtgcacggctttgtcaggcatcgctctgtgaaaacaaacgcagccagtcatctgagcgccaagtatctgctcaacttagatcttagcgatttcttcggatcaatttccgagaaccgagtgaatggcctcttcgtcagcttgggcatagataaagaggtcgctctcatcttggcccggttgagctgctacaaaaaccacctgcctcaaggagcgccgacttctcctgtcatttcgaacatgatttgctttaggctcgacaaggaactgttgagtattgcaaagcagaataggtgtatctatactaggtacgctgacgacatcactttcagtagctataaacctctcaccgtcctcttcgacggagttacaccaaatacaggcaagtgcgacatcaaattactgggtggccgtctgcttaccacatttcagaacaatgggttaatcatcaaccctgagaagatgtattacgccgataaatccgctaggcaaacagtgaccggcttacgggtgaacgagctcgtaaatgtcgatcggaagtacgtgcgaaacgtgcggagcgcccttcacgtggtggaaaagagcggtgtgctggaagcccagagagttctcaaggataagtacctgcgcaattcaaccatagaggctcatctgcagggaaaaattgcttggctggggcacgtaaaagggaggagtgaccccgtgttcagaaagttggccgctaaatacaacaacttgttccccaagaaggcaatcaaactagaacccaccaaggaggaggtgcgtaatagagcggtgtggatcgttgaatactcagatcatgagaattactcacagggatctgctttttttctcaaaggcgtcgggctggtgacagcctggcattgcgtgaatggtcacgaaagttatgacctgtaccatccgagtaagccctccaataagtttactgtgacggtgtctcgatcttgtaaatcccgggatcttgcactgctcaaccacaatattccattcaccgagttctatgagcttagcctaccagacagaacctttcacgtgggcgaaagcctgtatgcagccgggtatcccggctttggtccaggagacaaactgaacgttcgcttgggggccatctcttcctttcccattaagtttggtattcagatggtcgaggtcactcaaaagctaccatcgggcatgagcggtggcccgctggtagactccgctaaccgggttgccggaatcatacataagggaggggaagatgaacctagggacttcgcggttcacatcgatgtactgaaggcatgggtatccctgccctga

SEQ ID NO: 7564 - RNA, 1491 nt, synthetic construct
  source 1..1491: mol_type = other RNA
atgagcccagatgagctcaacaagattcggtggtttcggggcaggatgtatcggaagttcgatattagcaaggggaaaagcaaaaagcggactattaattcccccaactatagattgaagatgttgcagaagaagatcagtattcagcttgctaagatttataagccacgtaacagtgtacacggttttgtctcccaccgatccgtcaagacgaatgcccagagccacataaaacagaagtacatcctgaacatcgacattaaagacttcttcccctctatcactgagtctcgcgtccgtgggcttcttgaggcgataggcctagacgaaaatgtgtcagctgccattacctggatctgttgtaacgacggctgcttgccccaaggcgcaccttcatcaccactgatttccaacatgatatgctttcggctcgataaaaatttacaggccttcgccaaaaggacgcgctgcatttatacaaggtacgctgatgatataacctttagtagccaccagcctctgtcactactgttcgcagagtccgtgcctagagccggacatttcccagtcatccagctgtctgaaggcctgaggaatctgtttacttccaacggatttaccctaaacgacaataaagcccattatgccgataagcattctaggagaacagtaactggaatcagggtgaacgaggtactcaatatcgaccgcaaattcattaggaatgttcgcgcggccctctacaaaatcgaaacaatcgggttgaaggacgcccagaaggagctgatgagccgattcagttccaacgcctcaattgaagactacttgcgaggcaaaattgcttggctcgggcatatcaagggggtgtccgaccctatctttagaggtctggctgctaggttcaatcgctcttttgcaaaaagtgccatcaaaatacagccgacccaagccgaaatgcgcgatagagcagtgtgggtcatagagcatttcgatggcgagatgtgtcaagggagcgcctttttccttgaaagtgtgggactggtgaccgcagctcattgcgtggaaggcagcacagagatcgaactttaccaccctagcaagccatctaacaaattttcgggtaagatcaagtctatttgttcccacagagatttagcaatcattgagcacaacatcccgagcgttgaatacttcgagctgagacggtcactgaaggacgcacagataggcgaagagttaatcgcagccggataccccggctttggacctggggataaactgaatattcgtcccggtaccgtgtcttcacgacccgtgaagtccgcggtgaactacatcgaggtgacacagaagctcgctcaaggaatgtcggggggtccactgctcgacactgataacaatgttagtggagtcatccacaaaggcggggctctggagaatcgggacttcgcggttcacatcggcgaactgtatctgtggctcggaatttga

SEQ ID NO: 7565 - RNA, 1599 nt, synthetic construct
  source 1..1599: mol_type = other RNA
atgcccagcttcgcgtcctttttcgttactccagtgcgagtgagtgtacccaatgaacttacttcagaggctgagcttttgaaatttttagctctgtctaccgccgaactgaagaaaatttggtggttccgcggtcggatgtatcaaaagttcgaaatctcaaagggtgagggcaagaaacgggttattagcgccccagaccatcgcctcaaaatgctgcagacaaaaatcgcttcatctctcacgcccatctgccggccgagaaacccagtgcacggctttgtggatggcagaagcgtcaagacaaacgctacagcccacagaaggtccaagttcgtgatgaatctcgacatcgaagggttcttttctgccatcacagagggacgcgtgtcaggcctcatgtccgcattgggcattgattctcgtgtggcagagattctggctcgaatatgctgtaacgagggcgttttgccacagggtgctcctagtagccctatcatctccaacatgatatgtttcaggatggataaggagctgcaaaccatagccaaagagtctcgctgcatttacacccggtatgccgacgatatcacattctcttcctaccagcctctgactttgctttttgaaggacccactccccctgctgggaagttttccccagaactgctcaaagacagactgcggggcgcattcaggagtaacggcttcgctattaatccacagaaggtccattatgccgataaatattcacgtaggactgtcacaggccttaagatcaatgaactggtaaatgtcgaccggaaatttgtgcggaacattagggcggcactgtttgtcaccgagaaacagggagccaccagtgcccagaaaatcctgaaagacaagtacgggagagaggctgcactggcgagtcacctccgaggacgcatcagctgggtgggacacattaaggggcctagcgaccctatctttagaggactagcactcaggtacaacaagcttttcccatcggaaaaattggagatcctaccgactatctttgagattcgtgagagagccgtctgggtagttgaacattggggcgatacaaccacagagggatctgtccaggggacagcctttttcttaaagagtgtgggtttagtgaccgcatcccactgtgtagaaggcgctaccgagatagagatttaccatccaagcaaacccagcaataagttcaaggtgaccgtggcgaaaaacgacactcaccgcgacctcgctgtgctaacccacgagattcctgccactgagtactatgaatttgatatatccaagcgaacactgaaggtgggggacatcaccacggcgctcggattcccttcgttcggcgcaggggataagataaatgtcaggagcgggcctattacgtcccttcccaccaagtcagcagtgccgatgattgaagttacgcaaaagctgtcacaggggatgagcggtgggcccttgctggatgaagacggcgccgttgccggcatcaatcacaaaggaggacccggtgaggccagggactttgccgtgcatgtcaaggcactgactgattggctgtctggtgcctga

SEQ ID NO: 7566 - RNA, 1596 nt, synthetic construct
  source 1..1596: mol_type = other RNA
atgaccaaccctttcgccttcctcgatatcgcctacaggattgatctgccagacgagctgaaggatgaggagcgcctgcttctccatctaggggtgagccaggcagagcttaagaaaatttggtggtaccgctctcgaatgtaccaccactttgacgtggccaaaggcaaaagaaaaaagaggattatcagtgccccagaccccaggttaaagatgctgcagagaaccattgcggcctctctgaatgtcgtttataaaccgcggcgtcctgttcatggattcgtgatcgaccggagcgtcaagtccaatgctctcagtcacttgaattccaagttcgtgttgaacctggatctcaaggacttctttccatccattacggagaaccgggtgtcagggctcctcaatgccctgggcattgacgctcgagtgtctgaaatcatcgcccgtatctgctgtgacaagagccagctccctcaaggggcgccatcatcacccgtaatttcgaatatgatttgcttcaaactggataaagagcttcaggtcattgccaaagcggccaggtgcatctatactcgatacgctgacgacatcaccttcagcagctatcaacctctgacactgctatttgaaggtgtcgcaccccccgcgggtaacatttcccccgaactcttgagcaaacagttacgcgaggcattccagaacaatggattcacaataaactctgagaaggcccactacgccgatagacactcacggcgaacagtgaccggactcaaagtcaacgaaatcctgaacgtggacaggaagtacgtcagaaatgtgcgggctgccctttataccgtcgagaaagccggcgtcgaagcagctcaaaagcgcctggaggaaaaatataacaaaagaagctccatcgctagtcacttgcgcggccgcatcgcctggatcggaaatattaaaggctggaatgaccctacttttaggagcattgcactcaggtttaacaactgttttcccaaggatcagttgaagattgaaccggatcgtgaagaaatcataaatagatctgtgtggctggtagagcattcattaggttccgtcaagaagatggctcaggggacggcgttctttctgaaaggggtgggcctggtaactgctgcacattgtgtacagaacggaaaggggatcgtggtttaccatccttccaagccatctaataagttcccggttaatgtggctaactcatgcaagtatcgggatttggctatcttatcccacagcatatctgaccaagagttctatgagctgaatgcctctgagagaagttttaaagctaaggataaccttacagcatacggctaccctggttttggccccggagacaaactgaacgtgaggccaggctacgtgaatagcctgccagttaaatcgagtatacagctgatcgaggtaagtcagaagcttgcccaggggatgtccggcggtcccatactggatgatgacggtcatgtggcaggagttatacacaaggggggacctgaagaagcacgggactttggcgtgcacatcgaggttcttatgaagtggctaaaggaattgtga

SEQ ID NO: 7567 - RNA, 1614 nt, synthetic construct
  source 1..1614: mol_type = other RNA
atgactaatggctggcttggttttggcataccaacatctatacacctccctatccctccagaacttagttccaaaactgccctgctcagctacctcggggtatcccccgccgagatgaagaagatttggtaccatagggaaaagatgtatcattgctttgacgttgcaaaaaaatctggaaagccgcgcctcatcaacgctccagataggcgcttgaagtttctgcaacgcaggatcgccaatctgttggaccagttgtatagagttcgtaaccctgtgcacggatacgtccagggcaagagcgtcaagtcaaacgctacctcacatctgaagcagagattcatcctcaatctcgacatacgcgatttctttgggtcaatcagcgagaggcgggtgttcggcgtgcttcacgccatcggcgtaccacgggatgctgctgaaacggtggcccgcatttgttgttattctggacatcttcctcaaggaggtcccgctagcccagtgctgagtaacatggtttgttttagactggaccgagcactactgaagctcgcgaaagacagtaagtgcatctacactcggtatgcagacgacatttctctctcatcgcttcggccgttgactgccttattcgatggaaccttacccaccaccggccgggtcgatcctgaactgctgtccgccgcgctgcaagctgcatttacatccaatggttttgcattgaaccccgagaagatccattacgctgatcgacattccaggcgagtcgtgacaggcctgaaagtcaatgaaggcctgaatgtggataggagattcgttcgaaatatccgcgcagccctgtatgaagtggagaaagacgctgtagcagcacaggcccgctacgctgccgatttcggcggtaaggcagatatctcgagccatcttaaaggcaagatcgcctggctgggtaacgtgaagggattagccgatcccgtgtatcgggctctggcgctgagatttaataccgctttcccgaaaagggccattaaagtgcagccaacccggcacgagagactagaccgttcagtgtgggtaattgagcaccacctgaatgacatagagaagtatgcccagggctcagttttctttctggctggggttgggctggtgacagcagcccactgcgtcgctggagtgaaagacgctattgtgcaccatcctagcaggcccagtaacaaatttaaagtcagtgtggcccactactctaagcacagagacttagcgatcctgacacactccattcccgccacagatttttacgagctaagcaaaagtgccgccgcagcagttacgggcgatcctattgtggccatcggctaccctgacttctctccagcggataaggtcaactttagagagggaactgtctccagcaccaccgtcaaaagcctcattaacctcttggaggttaacttcaagttcattcaggggatgtccgggggtcccgtcatcaactctaacgacgaggtggtaggaatcgtgcacaagggggggcccaaagaaaagcgtgacttcgccattgtgatagaagagttcgactcttggaatgccgcggggctaccatccgattactga

SEQ ID NO: 7568 - RNA, 1188 nt, synthetic construct
  source 1..1188: mol_type = other RNA
atgcccaacggctggcaaagattcggcattcccgcgcctgtgcacgtgccaattccgcctgaactggtcagtaaggccgccctgctcgtgcacctgtcagtgagccctgccgaactgaagaaaatttggtaccatcgggagaagatgtacgaaaattttgacgtcgccaaaaagtccgggaaacctcggcccataaatgcgcccgacaggcgtcttaagtttcttcagcgccagattgctgagctgttggacaccctctacccagtacggaaacctgtacacgggtacgtgagcggcaagagtgtaaaatccaacgctaccagtcatctaaaacagaggtttatactgaatctggacatcaaggacttcttcgggtccattactgagaggagggtgtcgggtattctgaatgctatcggcgtcccttcagacgttgcagaaacggttgcccgaatatgctgttatggcggacacctgccacaaggcggtccagcttcccccgtgctgagcaatatggtctgttttagattggaccgtgccttgctgaaattagcaaaagacgcaaaatgcatctacaccaggtacgctgatgacatctctttgtcctcactgcgaccactcgcacccctgttcgacggtgcactccctcccacaggacaggtggctcccgagttactgtctgatgctttgcaggccgttttcgcaaacaacggattcactcttaatccagataagatccactatgctgacaaacactctcgccgggttgtaaccggccttaaggtgaacgagggcctgaacgtggataggagattcgttagaaacgtgcgggccgcgctatatgctgtggaaaaggatgtcgccgccgcgcaaactagatacgccgcagatttcgggggaaaggcagatgttggtacacacctaaagggcaagatcgcctggcttgggaacgtgaagggacttgcggaccccgtgtatcgggctctcgccttacgctttaataccgcctttccgaagcagtctatcaaagtgcagccgacacgccatgagcgcctcaacagaagcgtctgggtcgatctcctgcctattaatcatgctatcgggaaactcgcccgccagatggagacaagcgatgcagcccgaccaatctataggggatcagatcattggagagcagctcgtgcctga

SEQ ID NO: 7569 - RNA, 1608 nt, synthetic construct
  source 1..1608: mol_type = other RNA
atgccttccgtgtggtccatgtttggaactgcagtgcagattcctctgcccccagagttcggcgacgaaggtactctccttgcatatctggggctgtcacaggctgaactgaagaagatctggtatcacagagagaaaatgtacaagaatttcaatgtcgctaagaagagcggtaaaccacgaccaatcaattctcccgatcgccgcctcaaattcctgcagaggcagatcgccacaaaattggacatgatttatccacggaggaatcctgtacatggctatgtcaaggaacggagtgtaaaaagcaacgccgctgcacatcaaaaccagcgcttcgttctgaacctggatatcaaggacttttttcttacgatcaccgaggggcgcattgtgggggtgctgacagccataggggttcccgatagagtatcagcgatcattgcccgtatatgctgctatggcgggcgattaccacagggagggccagcatctcctgtgttgagcaatatgatctgttttcggctggatcgagccctcttgaaagtcgctaaggagggccggtgcatttacacccgctacgctgatgatatcagcctgtcaggattgaggccactatcacccttatttgaaaacggcctacccccctctggaccgatcagtcccgagctgctgagttcggcactacaaagcgcttttgccaacaatgggtttgttctcaaccctgagaaaattcactacgcagacaagtttagtaggcgggtggtgaccggagtgaaggtgaacgaagggcttaacgtcgataggagattcgtgcgaaatattcgggccgccctcttcgaggtggagaaggaccaccttgccgcgcaggcaagatacctttccaaatttggcggatcgaccaccatctccgctcacctcaaaggcaagatcgcatggctgggttttattaaaggctccgctgatcctgtgtaccggtcactggccctgagatttaacaagagcttccaatctcaggccattacagttcaggcgactagggaggagcagatcgacaggtccgtctgggttatcgagcacggctctgtgttagatgacacctaccgtcaagggtctgtatttttcctggacggtgtgggactggtcactgccgctcattgtgttgccggggtgaaagaagcaacagtccaccatcctagcagaccttccaataagttcaaggtgcaggtattgcattatagcaaacaccgcgatctggcgatcttgtctcacgccataccacctaccgacttcttccaatttgccaagtcccttataccggctgccgcaggtgacgccgttacagctttcggatacccggacttcaatcctgcggataaaatcaatatacgttctggcactgtctccagcacaacggtcaagagcctgattccgcttgttgaagtgaacttcaagctctcacagggaatgagtggcggtcccctcatcaacagttcagacgctgtggtcggcatcattcataagggaggccccgagatgcccagagacttcgccattgtgatttccgaactcgacaaatggatagccgcaggctgtccagacgatttctga

SEQ ID NO: 7570 - RNA, 1587 nt, synthetic construct
  source 1..1587: mol_type = other RNA
atgccatcacccgcaatgatgtttggaccgccacctagagttaccatcccaccagccttggaaacggaggccgccctcctagctcacctagggttatcaagtgcggaattgaagcgaatctggtggttcaggcatcgtatgtatagggactttaacatagccaaaggcgccggcaagctgcgtatcattacagctccccaagaccgcctgaaacatcttcagaggcgaatcgctgacctgttgacccctatgtacagggtgcggcaccccgtacacggatttgtggcagataagagtgtgaagactaacgcccgaagtcatgtgaagtctaaattcgtcctcaacctcgacatacgcgacttctttggggccattactgagaatcgcgttgagggcctgttccggtcgttaggcattgacagaagagtggcagagatcttggcccggctttgttgcaatcaaaaccggcttccgcagggagccccttctagtcctgtaatttccaacatggtctgcttccgcctggacaaagaactgctggcggtcgccaaagctacccgctgtatctacactcggtatgccgacgatatatctttctcctcctacaggcctctctcgggactgtttgaagcagcccttccccccacagggaatgtctcccctgatctcctgagcactgacttgagaagcgccttcgagacaaacggattcgctatcaacccagagaaagcgcattatgccgatcggcactcaaggagaattattaccggggtgcggatcaacgagggcttgaatctcgataggcggtttatacgaaatctgaggtccggcctgtatagcatcgaaaaactgggcgagacagctgccgaagcaaaatatcatgcaaaacacggaggtacagcctcccttgagagccacctccgcggcaagctgtcttggttaagcgacatcaaaggggcatctgacccggttttccgcaatctggctaaaagatttaacctactgttccccaaggctcccatcggtattgagccaaccccagcggaggttagagatagagctgtctgggtcattgaacactcaggccctaagggccgtcagggtacagccttttttcttaaggattacggcctggtgactgcggcacattgcgtgtccgaagcctctgagcccataattgtctaccatccatctcgattatcaaataagattcctgtcaccgtagccaagacgtgtccccaccgtgacctggccattatcgcacatgctgtcccgcctaacgaatactatgaactcgaggttactgagaagcctccagctgtggaggaccacgtgacctccgtgggctacccccagttcggattcggtgacagactgaatgtgcggaaggggacggtgagtagcctcccagtgaagcacgctgtgcagcagatagatgtaggtattcgcattaccgaagggatgagcggcggtcccctccttgcagaggatgggaaggttatcggaatcaatcacaaaggagggatcgatgaagatagggatctggctatccacatccaacagctggtgaagtttgcaagcgagtga

SEQ ID NO: 7571 - RNA, 1305 nt, synthetic construct
  source 1..1305: mol_type = other RNA
atgcacattgtgatcgcccggattatctgcctcacttggcgggactggaagggcgatccagtacctcgctctgcctctattttcggccgcgcgattagggtgaaactgcctccagagctgctgacagaagtcaatctactgactcacctgggaatgtcccgcggagaactcaatgtcataaattggtacgcgagacggatgtatcactcctttgacatcaagaagaaaagcggcaagcctagggttatcaacgctccagagcgcagattaaaactcttacagaggaaaatagccgatcttcttatgcccctgtatcggcgtcggaaccccgttcacgggttcgtggcagacaggtcagtgaagaccaacgcccagtcacacctgaacagtaagtttgtggtcaatctggatctcaaggatttcttcccctctatctcccaaaagagaattgtaggagtgctgcgatccctgggtatcgacaggggtgtggccgatgccatttcgacaatctgctgcctcaatggatgtctcccacaaggcgcaccaagctcccctgtccttagcaatatgatatgctttaggctcgacaaggagcttttggaattcgccaaacaggcgaagtgtatttacacccgctacgcagacgacctgagtttcagtagctaccagcccttgggatcactgttccagacgagcccaccttcccccggccattttagccctgacctactgggcgagaaattgcgccacatctttactgccaacggtttcatcttgaatccggacaaagctcattatgcagatcgacatagcagaagaacagtgaccggaattcgaatcaacgagctactgaatgtggaccgtcgatttgttcggaacttgagggccgctctgtacagtgttgaagcacagggcatcgccacagcagaagctaagttccacgcctcatacaacgggaaatctgatatagggaaacatctgcaggggaagattgcttggcttgggtatatcaaaggtgcttccgatcccgtgttcagaggcattgcgtctcggtttaacaaggccttcccctcgctcaagttggagattcagccgaccccacaagaaatccgcgagagagcagtgtggctcatcgaacattgggagagaaccggcgatcagggaaccgctttttttctggagggcgtggggcttgtaactgctgagcattgtgtcagccccagtgggatagtcgaactgtatcacccgtccaaaccttctacgcggaagtcacataggcgtgtcgtgcacagggttcgattatga

SEQ ID NO: 7572 - RNA, 1542 nt, synthetic construct
  source 1..1542: mol_type = other RNA
atgaagctgcccccggagctgatgagtgaagcgtccctgctggcacacctaggcgtcggtagggcagagctgaatgtgatctcgtggtacgctggccggatgtaccataagtttgacatcaagaagaaaagcgggaaagctagggttatcaacgcccccgaccgccggcttaaaatgctgcagcgaaaaatcgccgacctgctgactcctctatatcgcagacggaacccagtgcatggttttgtgatcggtcgatcagtgaagactaacgcacagtcacacctggggtctaagttcattgttaatctcgatctcaaggattttttcccctcaatctcttacggccgcgtcaccggcgtccttaggtcgttagggatgaaaagagaagtcgctgaagccattgcgacaatatgttgcctgaacggaaccttgccccaaggggcaccatcctcccctattctgagcaatatggtgtgtttccgcctcgaccggaggctgagagaactcgccaaagatgctaggtgtatttatacccggtacgccgatgacttgtccttttctagttaccagcccttgatgggactattcgagactacacctcctgcctccggacacttcagcccagacctcctctcagagaagttgaagcagattttttctggcaatgggtttgtgctcaacccagacaaagcccattatgccgataagcacagcagaaggaccgtgacaggcattcgtataaacgaggcactaaatgtggaccgccgtttcgtcaggaacctcagagcagccttgtacagcgtcgaaacgctggggttagctgcggctcaagctaagttcaaatccctgcatggaggtaaagccgacgtgggccaacatcttcagggtaaagtgtcttggctgggatatatcaaaggggctagtgacccagtgttccgctctgtggcctcccggttcaatgcagcttttcccccattagcgcttgatatcctgccaagtccacaggaaatccgggagcgtagcgtttggctgatagaacactgggagacaggaggcgatcagggcaccgcatttttcatgaagggagtgggactcgtgaccgctgagcactgcatttcccccagcggcattgtagagttgtaccaccccactaagccatctaataagttcgccgcatcagtcaagcaccgatgccctgatagagacttggctgttttagatcatgcaattccgaacaacgagttttacgaacttgagacagccggcaaagccgccgccacaggagatgctactaccgcgatcgggtatcctgggtatggacccggggacagactgaatatccgacctggcgccgtaaccagccttcccacgaaatcagccgttaagatggtcgaggttcaacagatgctcactcctggcatgagtggcggccctctccttgacgtggacgatagggtcgtaggtgtagtgcataagggtgggcacgatcacggaagacagctggccatagcaatcagcgaactgcatgcttggctgccgtga

SEQ ID NO: 7573 - RNA, 1581 nt, synthetic construct
  source 1..1581: mol_type = other RNA
atgcctagaccagcgcgtgcatttggcccaccgatacgcgtgaagctgccagtggaagttgcttccgagggtgcgatcctcgcccatttagcagtgagccctgccgaagccaagaaaattcgatactaccgagccaggatgtaccgcaccttcagcatccaaaagaagtccggaaaggctcgcatcataactgctccagacagacggctgaaaatgctccagaggcggatctgtgatctgctcactcctgtataccgcagacggaatcccgtacatggcttcgtggccgatagatcggtcaggaccaatgcggaggcacacctgggcagcaagtatgtagtgaatattgatctgaaggatttctttccaagtatctccgaaaggcgagtaacaggtgttctgatgagcctcggcatcgggcgagatgtagcagagatcctctcctctatatgctgtgttaatggatgtcttccccagggcgccccctcttcacctctgctttctaacatgatttgcttcaggcttgataaggagctgatggccttcgccaaacggacaaggtgcatctacacccggtatgccgatgacatcacattttcttcataccagcccttggctggactcttcgaggcagtgcccccttcaccaggccgattcgccccagacttgctctccgccgaggtagctgccatttttgctgccaacggctttgtcattaaccccgagaaagctcactatgcagaccgtcactcgaggcggactgtcacaggattaagagttaatgaggctatcaacgttgaccgtagatttgtccggaatttgcgcgccgcactcttctctgtggagaaactcggcgcagctgccgcgcaagctaagtttcacgctactcacgggggtagagtcgcactaggcaatcatttgcagggaaaactgtcttggctgggatacgtcaaggggcagtcagatccggtctttcggtccatggccagccgtttcaataggagtttcccagatagggcactgaccatccagccgactcgcgacgaaattcgcgacagagctgtgtggttggttgaacattgggagaacggcggcgaccaaggcacggcattctttctgcggggggtgggacttgttaccgccagtcattgcgtctcccctagtggcgctgtcgaggtgtatcacccctctaaacctagcaacaaatttaccgccaacgtgaagcatagatgtgaacaccgcgacctggcagtgcttgaccatgctattgccgcgacagaattcttcgagctagaagcagccgccacagctgtggtgacaggggatgcgaccgtggccgttgggtatcccggttttgggcctggtgacaaactgaacgtgcgcacggggaacgtgacttcacttccaatcaagagtggagtccaaatggtggaagtgcagcagatgctgacccagggtatgagcggaggtcccctaacggaccccgacgatggagtcattgggataattcacaagggggggcctgaacacggcaggcagttaagcgtggctatagaggtgctgagagattggctggcctga

SEQ ID NO: 7574 - RNA, 1503 nt, synthetic construct
  source 1..1503: mol_type = other RNA
atgaagcacctcgggctgggagcagcggaagcgaaaaagattcgatactatcgtagcaagatgtaccggaccttcgacatccggaaaaagagcggtaaagccagggttatcaatgcccccgacagacggctgaaaattctccagcgcaaaatttgcgacctgatcactccattatatcgccgcagaaatcccgtccatgggttcgtagctgatcggtcagtcaaaactaacgcgcaatcacacctgggggggaagtttatcgtgaaccttgacttgaaggacttctttccttcaataagtgagcggcgcatagtcggcgtgcttatggcactcggcctgaagcgagacgtcgccgaaagactctcctccatctgctgtgtagacaatggacttccacagggagcgccgagcagccctatcctttcaaacatgatctgctttaggatggataagcagttgatggccttcgctaagtcggctaggtgtatttataccaggtacgccgatgatattactttcagctcttaccgtcccctaactggcctgttcgaatccgtgccaccacctagcggatcctttccacctgaactgctgagttcggagttgctagggatctttgggtctaatgggtttaccatccatcctgacaaggcccactacgcagatcgcaatagtaggcgtacagtgaccggcctgagggtcaacgagaacctaaatgtggatagaagattcgtgcggaacctgcgagctgctctctattccgtggagaagctgggcgagaagccggcagagacaaagttccatgctgaccacggaggacgggcaccaataggccgccatctgcagggaaaactcgcctggcttgggcatatcaaagggccagccgacccagtgtttcggtccatcgcctctcgattcaatgctgcttttcccagtctggccctcaagatcttacccacccagctcgaaattcgagaaagaacagtttggctgatcgagcattgggagggaactggcgcccaaggcacagccttcttcctgacaggggtcggcttggtgactgctgatcactgtgtttccccttccggcgcagtggagatgtaccaccctagcaaaccctccaacagatttgcagctatggcaaaacaccgcagctctgatagggacctcgctgtattggaccacgccattccgcccaacgagttctatgagctggatgcgtcaaacgttgggtctgtgaccggtgatgccacggtggccataggctaccccggctttggtcccggcgacaaagttaatgtgaggagtggtaatgtgacctctttacctaccaagtctggtattcaaaagattgaagtgcaacagacgctgacaccaggtatgtcaggcggccctcttttgaacagcattggacaggttattggagtcatccacaagggtggagcagaggaagaaagacagttagccatagatatcagtgtactgcagaaatgggtcccctga

SEQ ID NO: 7575 - RNA, 1581 nt, synthetic construct
  source 1..1581: mol_type = other RNA
atgccctctgcattttacctgttcggcggcaccagtcggaccatcatccctgccgaactgtccacaaagagcgagcttctgaaacatctgggagtttcacctgccgagctgaaaaagatctggtggttccgcgggaggatgtattcccacttcaatatttctaagcgctctggtaaagtgagattgatctccgcacctgactacagactgaaaatgttacagcaaaagattgctaggtctttatctggcttgtataatcctaggaaccctgtccatgggttcgtcccagacaggagcgtgaggtcaaacgccgaggctcatctcagacggcgattcatcctcaatgtggacataaagaactttttccccgccattaccgaggctcgcgtccaaggcttacttgaaagcatcggagttgatactgatgttgccgagacgataacaagaatctgtacaaacaatggttgtctgccacagggagccccctctagccctgtcatctccaatatgatatgtttccgactcgataaatcactcatgaatttctccaaggaacacaggttgctctacacacgttatgctgacgacattacattgtcctcatttcagcccccaaccgcactgtttgaaggcgataggcccgacagcggtagactgccaccagagaagctgtctggtgagctcttgagcatactgggaaacaacggctttgagctgaacccagaaaagattcactatgctgataagaatagccggaggatggtgaccggcatcaaaattaatgagggcctgaacgtagatcgacggtacgtgcggaagattcgcagtgccctgtttaaggttgagtcggcttcagtggcagccgcagaagctgaactgaagaccagattcggaaaatcatgcaagatacaggcccaccttcaggggaaaatttcctgggtggggttcgtgaaaggacaatccgatcctgttttccgggggttagcagaacgttacaatgcctgcttcccagccagtccgatcaaggtacatcctactcaggcggagcttctcgacagatcagtgtgggttctcgagacagagaaaaacaccgggactgcctttttcctgcggggtgtagggcttgtgaccgctgcccattgcgtgaacggcgcgagttcgatcgaggtcttccacccagggaaaccggctaacacttttatggtgggggtgcagcatatctgcacacaccgtgatctggccctacttagccacagcattccctccactgactactttgaactggaagagtttggcggctttcccgccacgggggcaaatacgattgcagcgggattcccgagctatggacccggcgatcgactcaacatccgcccaggaactatctcttccctaaccattaagcatgccgtgaatctcattgaggtcacccagaagctaagccagggaatgagtggcggtcccttgatgacccaagaccacgctgtcatgggggtgatccacaaaggcggtcccgacgaacctcgcgactttgcagtaacactgagtgaaatgaagagttggatagcgactctgccgtga

SEQ ID NO: 7576 - RNA, 1644 nt, synthetic construct
  source 1..1644: mol_type = other RNA
atgtgcacctggggcgactggcgaggaaatcttgtgccctctccgttcaacctattcgggggggcctcacggacaaagattccgccagaactgacttctaaagacgaactgctcaaacatctcggcgtgtcacctgctgaactgaagaaaatttggtggttcagaggtagaatgtactcccacttcaatattagtaaacgctctgggaagacgcgtctgataagcgcacccgactaccggctgaagatgctgcagcaaaagatcgccagaagtttggccaaactatataacccaaggaagcccgttcacggcttcgtgccagaccggagcgttcgctccaatgcggagtctcatctcaggcgtagattcatcctcaacgttgacttaaagaacttctttcccaccatcacagagcccagggtgcagggactgctggagtcaatcggcataaacaaagacgtcgctgaaacagtcgccagaatctgtgctaataacgactgcttacctcagggagccccaagtagcccagtaatcagtaacatgatctgttttagactggacaaagctctcatgaagttttccaaagaacatcggcttctgtatacccgatacgccgatgacattaccctgagcagtttccagcctcctaccgccctgttcgaaggcgatagacccgaccctggcaaggtggcggaggagaagctgagcgacgagcttagatccattattcgcaataatgggtttgagctgaaccctgaaaaaatccactatgcagataaaaactcgcgacggatcgtgacggggataaagataaatgaggggatgaacgtcgataggcgctatgtacgcaatgttaggactgccctttttaaagtagaaaagcacggccctgcagctgctcaagccgagttagaggctcgctttggtaagacatgtaagatccaggcgcacttacaagggaaaatttcatgggtggggttcgtgaagggtcaatccgatccagtgttccggggactggctaagcggtataatgcttgctttccggcctgcccgattaaagtgcatcctacccaggccgagattgtcgatcgagctatatgggtcgtcgaaactgaggatgatactgggacagccttttttctgaagggagtggggttggtgacagctgcgcattgtgtaaactcagcgagcgaaattgaggtgttccaccccttgaagactgcaaacaggtttaaggttactatcaaacacatctgcgcacacagggatctggccatcttggagcacagcatttcctccaccgagtactttgaactagagtctttcactggaagcccagtcgtgggcaccaatacccttgccgccggatttccaacgtacggccctggtgaccagctcaacatacgtcagggctctatctcgtcacttaccacaaaatccgccgttcccctgattgaagtgtctcagatgctcggtcagggaatgagcggaggccccctgatgaataagaataacgaaattctcggaatcatccataagggtggcccagtggcatacgttgccaaagatggctccgtctctccccagaggcagctcgcagtggcaatcagcgagttgaaggcatgggtcagtgcattgccttga

SEQ ID NO: 7577 - RNA, 1104 nt, synthetic construct
  source 1..1104: mol_type = other RNA
atgatctgtttccggctcgacaaaacactaatcaatttttccaaggaacaccgcctgctgtacaccagatacgcagatgatattactctcagcagctttcaacctccaacagcgcttttcgaaggggacaggccagatcccgggcgtctagcattagaaaaattgagcgacgacctgagaatgattttcaagaataacgggttcgagttgaacccagagaaggtgcactatgctgataagaactccagacgcatggtcaccggtattaagatcaatgagggtctgaatgtcgaccggcgctatgttcgaaacgtccggagtgcgctctttcgagtagagactacaggcctggccgccgcacaagctgaactcaaaaccaggttcggtaagtcctgtaaagttcaagctcatttgcagggaaaaatctcttggattggctttgtgaaagggcagagtgaccccgtcttccgcggcttggctaaaaggtataatgcctcatttcccgctagcccaataaaagttcatcctacaaaggacgagatctttgacagagcggtctgggtggtggagactgacgacgacaccggaacggctttcttccttgatggcgtgggccttgtaactgcagcccactgcgtgaacggggcatctgagattgaagtgtttcatcccctgcggacctccaataagttcaaggtcaccataaagcatatatgcgcccacagggatctggccatcctggaacacctgatcccttcgacagagttcttcggcctcgaagcctttgagggtagtgtgacggtagggaccaacaccctggccgcagggtttccgacgtacggacctggcgatagacttaacgtgcgtcagggttcaataagctcactgacaacaaagtctgcagtgccattgattgaagtcagtcagatgctgggccagggaatgtctggaggccctctcatggatgaggatcacgccgtttttggaatcattcataaaggcggacccgtggcttacgtaactaaggatggatcagtgagcccgcagaggcagttagccgtggccatctccgagctgaaggcctgggttgctactttcccctga

SEQ ID NO: 7578 - RNA, 1602 nt, synthetic construct
  source 1..1602: mol_type = other RNA
atgttctacctgtttggtggaaccagcagagccaagattcctggagagttgagctcccgctccgaactccttaaatacctgggcgtgagcccagaggagctgaagaagatctggtggttcagagggcggatgtactctcacttcgacatcagtaaaaggtcagggaagtcccgcacaattagcgctcctgactacaggctcaaaatgctgcagcaaaagttggctcgttcattaagcggcctgtacagcccccgtaatcctgtccacggttttgttcccgacagatcagtgcggacaaatgcagaaactcatctgaggaggcggtttatactgaacatcgacattcagaatttcttcccgtctattacagaggctagagtgcaaggactgctgacctctataggcgtcgacactaatgtggcggaaatagtcgccaggatttgctctaacaatggctgtttacctcagggtgcaccatcatcccccgtgctctcgaacatgatctgctttcgactggacaagagcctgatgcggttcagcaaggagcacaggcttctgtacactcgatacgctgacgatatcacgctttcttccttccaaccccccaccagcctctttgagggagagcgaccagcgcctggtcgcctttctcctgaaaaattgcacgctgagctgcggatgatctttcagaataacggcttcgagttaaacccagaaaaaatccattttgctgatcgcaattcccgcagaatcgtgactggcataaaagtgaacgaaggtctgaacgtggacagaagatatgtacggaacgtgagatcagctctgtttaaggtggaacgcagtgggctcgcagctgcccagacagagctgaagtcccggtttggaaaatcgtgtaagattcagagtcacctgcagggcaagatttcatgggtggggtttgtaaaaggccagtctgatccagtgttccgagggatggccaaacgttataatgcctgtttcccggccaaccctataaaggtgcatccaaccagagcagaaatcgtcgaccgcgctatctgggtcgtcgaaacagaattcgacaacggcactgccttctttctcgatggagttggtctagttaccgccgcacattgcgtcgatggagccagtaaaattgatatctttcaccctctacgcactagcaataggttcaaggtaaccattaagaacatttgcacacacagggatctcgcaatcctggaacacagcgtggccagtacggagtatttcgagctaggatctttcactgggtcccccaccatcggcgcaaatacacgggccgccggttttcccacatatgggccgggcgatcagcttaacgtgcgacaggggtccatttcttctttgacgaccaagtcagctgtacctttgatcgaggtcagtcaaatgttggggcaaggaatgagcgggggccccttaatgaccgaggatgatagtgtgctcggcattatacataaaggaggaccagttgcctatgtggcaaaagacggctccgttagtccccagaggcagctggcggttgcgatctccgagctttcagcctgggtcgccaccctcccatga

SEQ ID NO: 7579 - RNA, 1641 nt, synthetic construct
  source 1..1641: mol_type = other RNA
atgccagaggacgtcaggcagtcctggagggattggaaggagggccttgttagttaccgcggggccctgttcggcaagcctatacgtataacaatccctgccgagctggctgatgaggcagccctcctggcatatttaggtttgggcgcagcagaacttaagaaaatatggcactttcgcggtcggatgtaccagcattttagtatcgccaaggggcccaacaaagtgagattaattagcgcgccagatcagcgtctgaaattcctacaacgccgactggcagataaattcaccgaactctacagaccaaggcacccggtacatggatttgtggtggggagaagtgtgaagaccaacgcccttgcccatctccatcggcggttcgtggtgaatatcgatctcaaagactttttccctacaatcgcccagaacagagtcgagggcatgctgttttcccttggcatcgacgccagggtggccgagattattgctcggatctgctgtaatcggggacacctccctcaaggggcacctagcagccccgtcctctctaatatgatttgcttcagactggataagcagctgttggacgtggctaaggaaactaggtgtatttatacacggtatgcagacgatataacattttcgggtcaccgtccccctactgcactgtttgacgccgccttgccacccgccggaagattttcaccggacctgctggcaccaaaactccttgacatcttccagcagaacgggttctctattaatcccgacaaagctcattacgcggataggcactcgcgccggactgtaacggggctgaaagtgaatcagttgctcaacgtagaccgacgctatgtccgaaatatcagggctgcacttcattccattgctactctaggcttgaaggaggccgagaaaaaattccacgagaagcacggcggaaactcagggctggctgcccacctgaggggaaaaatcagcttcttaagccacataaagggccagtctgattccgtggttcggtcccttacgctacggtttaacaagtgctttcccgcccagcctattaaggtgatgccgacctcaacagaaattcgagacagagcggtgtgggtcgttgagcacaacctggacagggaccatggaaaacaagggactgcgttcttcctgaaaggcgttggactggtgaccgcagcgcactgtgtagagggcgtgtctgagatcgaagtttttcacccctctaagcatgccaacgccttcaaggcaactgttagaaagcgagacgaacatcgcgacttagccatcctagatcattccattccagctaccgagtacttcgagttggaccccgtgtcacatgccatcgtgaccggtgatagtatgacagctgtggggtatcccgcttgggctcctggagatccactgaatatcagacccggcttcgtcagcacactcaccgttcgctctgctgtgcagtacatcgaagtaacgcaaaagctgaccccaggcatgagcggcggaccattgctggatgctaatgacgccgtcgccgggatcattcacaagggaggccctgaagaaggtcgcgattttgctgtccacattgaggtcctggaagcgtggctcaaggaaggttga

SEQ ID NO: 7580 - RNA, 1584 nt, synthetic construct
  source 1..1584: mol_type = other RNA
atgacatactggggggcacttttcgggaaacctattcggattaccattcctcccgagtttgccaatgaagccgccctgttagcctacctcgggctcggtcccaatgagctcaagaaaatatggtattttcgggcgagaatgtatagacacttctccatagccaaggcgcaaaataaagtccgactgatatccgctccagatgagcgcctgaagttcctccagcataaaatcgccgagaagctgaccgatctttataggccacggaaacaggtgcacggcttcgtggccgggaagtccgtgaagaccaacgctctggcacatctaggacggcgattcgtagtcaatatcgatctcaaagactttttccctaccatcacccaaaaaagagtcgctggtttgctcctgagccttggtcttgacaaccaggtcacaactctgattgcccatatctgctgtaatgacggcaatttaccccaaggcgctcccagtagcccagtcatctcaaatatgatctgcttcaggttggacaaaaagctcctggggatcgccaaggaggctcgctgtgtctacactagatacgctgacgacattactttttcatcacaccagcccccgacagccctgttcgaggttgccctccctcccgcagggaggttttctcccgatctgtttacccccaaactgctggaggtgttccagcagaatggagtggccatcaaccctaacaaaacgcattacgcagacaggaactctcgtcggatcgtcactgggctcaagatcaacgaacttgtaaacgttgacaggcggtttgtgcgcaatattagagctgctttgcacgctgttgaggcacagggaattgtcgaagcacagaagacattccaggagaaatatggcggcagctccttggtagcacacctccaaggcaagatcagctttctgagtcacatacgagggcagtcggatccagtggttcgctcggttactctgaggttcaataagtgttttccgaaacatctgatcaaggtgacacccaccccatctgaaatccgcgataggtctgcctgggtgatagaagataagaacggcgacgtcgtgcagggtaccgcattcttcctgaaggatattggcttagtgaccgctgcccattgtgtggaacctaacacagaatttcagatctatcacccaagcaagcctgccaacaaatttgccgtcagagtaaagaaaaagtgcacacaccgcgaccttgctctgctggagcatgaaattcccgccactgagttttttgaactggcgcgtagtttgaacgcagcgagccagggcgaccagttgacagccgtggggtacccatgcttcggacctggagacggtgttaataccagactgggtactgtatccagcttaccagtgaagcgtgatgtgaaactaattgaggtgacccagacgctaacgcaaggcatgtccggcggacctctgcttgatgcgaacaacggagtggttggagtgatccacaagggcggaccggaggaaggacgaaatttcgcaattgctatagaagtgttgtcagagtggattgagtctagttga

SEQ ID NO: 7581 - RNA, 1578 nt, synthetic construct
  source 1..1578: mol_type = other RNA
atgccccgatggggggctctgtttggtcagccagcaagggtcgccattccagcagaactggcggacgaggcagccttactggcttaccttggtctgggggcgggcgagctgaaaaagatttggtattacagaggacgcatgtatcagcattttagtattgctaagggaccaaataaggttaggacgatcagtgcccctgacgggcgcctcaagtttctgcaaagaaagctcgccgacaaactaacagaactgtatcggccacgcaatcccgtgcacggcttcgtggccgagagatccgtcaagacgaatgccctggcccacatgcacagacgtttcgtagttaatatcgaccttaaagactttttcccgacaatttctcagaacagaatagaaggcatgctcgcctcactgggcatcgatgctagagttgctgagatattagcccgaatctgctgtaacaatggccacctccctcaaggggcaccctcatcccctgtgctcagcaacatgatctgtttccgtttggataaaaaattgatgggcattgctaaggaggcaaggtgcatttacactagatacgcagatgacattaccttgtcctctcatcagccccccaccgccctatttgaggccaccatcccacaggctgggcggttctcacctgacctccttgcgcccgaactgcggaacgcagttcaccagaatggtttcgccatcaatcccaataaggcccattatgcagaccgccactcccgcaggacagtaactggccttaagataaacgaactcctgaacgtggatcggaggtacgtacgcaacatacgagctgcactgcactccattgaaacattgggaatcaaagacgccgaaaagaagtttcacgaaaaacatagcggtagggcatcgcttgctgctcacctgcatggaaagatctccttcttgacgcatattaaaggccactctgacccagtcgtgcgatcggtcactctgcggttcaataagtgcttccctacccggaccatcatggtggcccctaccccgtctgagatgcgagatcgtgccgtttgggtggtggaacatagcgagaatcacgggactgctttttttctgaagggggtgggtctagtgacagctgctcactgtgtcgagggcgtggatgaagtggagattttccacccctctaaacatgccaacaaatttaaggccaccgtgaggaagagtgacgaacatcgggatctggcaatcttggatcaccaaattcctgccactgagtatttcgagctggattcaatcagcagaaccatcgccattagtgatcctatgactgcgcttggatacccaagctggggcccaggagataggctcaacatcaggcccggcgtagttagcacagtcacagtgaagagcgcagtccagttaatcgaggtgacccagaaactcactcaaggaatgtctggaggaccgctactggacgggaacggtgctgtggcgggcataatacataaagggggacctaacgaggggcgggactttgccgtccatatcgagatgctgcaggattggttacgcgagggctga

SEQ ID NO: 7582 - RNA, 1281 nt, synthetic construct
  source 1..1281: mol_type = other RNA
atgggcgccatctttgggcagccgattaggatcatcgtgcctgctgaactcgccaatgaggccgcattgttggcctacctgggggttagcgcggatgaactgagaaagatttggtactacagaaagcgtatgtataggcacttctctatatcgaaaaaacctaacaagaaccgactcatttcagcacccaacgacagattgaagtttctgcaacgggcactggcagtgaagctgaatgagctgtatagccggaggaatcccgtgcatgggtttgtcccagacagatcaatccgaactaatgctcttgcccatctacggcgcaggttcatcgtgaacctcgatctgaaagacttctttccaacaattggtcagaagcgcatcgagggcgtgctggtgagtctcaatattgatgctagagtcgccgaaattatatcttgtatttgctgcgttaacggacacctgccacagggtgcgcccacttcacccgtgctaagcaacatgatctgtttcagactagacaagaagctgatggacttcgcgaaagaggcgaggtgcatctataccagatacgccgacgacattacgttctcctctcatcagcccccgaccgctctcttcgagacgaccatcccggcagctggaagagtagcccccgatcgcttagcccctcgattacgggatttgttccagcagaatggatttgttatcaaccccactaaggtccattacgctgacagccacagtaggcgcatcgtcacaggcataaaggtgaacgaaatgcttaacgtggataggcgctttgtccgtaatatccgagccgcactgcactccattgagacattaggaattgaggccgctgaggaaaaatttcacgataagcacggcggccggagcaatcttgtcgctcatctcaggggtaaaatctccttcctgaattatatcaaggggcaaagtgaccctgtggtgcggtccatagcactccgtttcaactcccgctttcctgcaattccaattaagaccgcacctaccccatctgaaatacgggaccgcgccatctggatagtggagcagtcaaaaagccaaggaactgcgttctttctgaatggtgtagggctggttacagccgcccactgtgttgaggggtttgccgaagtggatgtcttccatccaagtaaactcgctaacaagtttaaagccagggtaggcaaattggatcgacaccgggatcttgctattctggaccacggcatccctgctaccgaatacttcgagcttcagtga

SEQ ID NO: 7583 - RNA, 1281 nt, synthetic construct
  source 1..1281: mol_type = other RNA
atgtttggaaagacagttcacattagcatccctccagaactggcggacgaagcaagtcttttaacctacctgggactgggcgccgacgagctgaaaaagataaggtattatagggcgtcaatgtatcataatttccccatcgggacggatggcagaaagcggagaattatcaacgctcctgacgcccgactgaaattccttcagaggcgcattagtgataagctagccgatatttataggagaaggaacccagtacacggatttgtggccgagcgctctgtcaagaccaacgcgctggcccatatgcggagaaagtacgttgtcaacatagacctcgctaattttttcccaaccatctctcagaaccgggtggagggtatgctcctctcgctgaaccttgatgccagcgtagctcagatcattggtatcatttgctgcaacaaaggcatactcccacagggcgccccctcttcacccttactgtcgaatatgatctgctttaagttagacaagggcctgatgaacttcagcaaagaagctaggtgtatctacactcgctacgctgatgacctcaccttctccagttttcaccctccagcagccctattcgaaacagcccctcctccggcaggtcgcttgagctctgagcagctggcaagccagcttcgaaggctcattatccaaaatgggttcagcattaatgagcgtaagctgcactacgcagaccgcgactcccggagattggtgactggtttgaaaatcaatcagatcctgaacgtcgatagacgatatgttcgcaacatccgcgcagcacttttctcagtggagcggaatgggatcaaaggggccgagaagacataccataaagagcatggagggagagggtccctagctgagcatctgcgtggcaagatttctttcttgtctcatatcaaaggccaacacgaccccgtggtgcggggattggctattcggtttaatcaatgtttccctcactggcccataaccgtgactccgaccaaaaacgaggtgcgtgatagagccgtgtgggtcgtcgaaaatgaaacttcctcacagggcacggctttctttctccgaggagttgggctggttacagccgcacactgtgtggaaggcgtaaacgaagtcgacattttccacccatccaaaccctccaataaatttaaggcgaagatctttaagagggagccccacctggatttggccgtgctcagtcatgctatacccgagaatgaatactttgagctgagcaagtcctga

SEQ ID NO: 7584 - RNA, 1584 nt, synthetic construct
  source 1..1584: mol_type = other RNA
atgcctttgttcggcgcctttttcggggctcctgtcagagtgacaatccccgaagccttggccgacgaaacaagcctgctgacttacctcaatttgtccgggcccgagcttaagaaaatatggttttatagggccagaatgtataggcacttctcaatcgccaagagtagtacaaaggtccgcctgattagcgcacccgatcaacggctcaaatttttacagagacaactcgccgacaagttggatgagttatacagaccaaggaacccagtccacgggtttgtagctgataggtccgtaaagaccaatgctctgtcacaccttcacaggcgcttcctgctcaatatcgacctagctgaattctttccgactatcaccgaaaacagggtgcagggactgttgatcagcctggggatcgactcaagggtcgctgacattattgcccgcatttgttgcaatgacggccagcttccacagggcgctccttcttcacctgttctgtccaatatgatctgctttcgtcttgacaagcagctgatgacgatagcgaaggatacgcggtgcatctatacacgatacgccgacgacatcactttctcatcctaccagcctcccgtgggcctatttgaggcgaccctccctccctctggacggttcctacctgatctgctaactccagccctccggggggtcatccagcaaaacggcttcgtgatcaacccagaaaaagctcattacgctgaccgccactcgcgtagaattgtaacaggattaaaggtgaacgagctgctcaacgttgatcggcgttatgttcgcaatattagagccaccctgtactccgtcgaaaagcttggagcgaaagaggcagagcaaaagtttcatgacagccacgggggacgaagttctttggcagcccatcttcaaggcaaaattgcatttttgactcacataaagggacgatgggacccagtggttcgcggtatcaccctccggttcaacaaatgtttccccgagcgcgcccttaaagtgcgacccacaccacaggaaattagagggcggtccgtgtgggttgtggaaaacgatccagcccagcagcagggaagtgcattcttcctcaaagatgttggcttagtgaccgccgctcactgcgtggagaatacggatgaggtagaggtctaccatcccaccaaaccggccaataaattcgtcgcaagagtgtcgaagaagtgtgagcatcgcgatctcgctctgctggagcatagcattagcagtaccgaatttctggagctcatacggtctgagagggcggtgtcccagggagatcccctgacagctgttggttatccccgatttcacgtcggtgatcggctgaatgcaaggcctggcaacgtgatttctctggtggccagaagcggcgtggaaatgatcgaggtgaaccagaccctgactcaggggatgtctggaggcccggtgctgaatggcgacgacggtgtcgtgggtataatccataaggggggtcctggcgaaggcagggactttgcagtaagcattgcaatgctgaacaaatggctggaagagaagtga

SEQ ID NO: 7585 - RNA, 1581 nt, synthetic construct
  source 1..1581: mol_type = other RNA
atgccatccgccgctcgaatctttggcaaacactttccaattccaattccaccccagttagcagatgaggccactctattagctcatctgggtttgtccacaaaggaactcaaaaaaatctggtggtaccgtgggcggatgtatcatcaattttctattgcgaaaggagctggtaaggtacggttgatcacagcacctgatcgtcgactgaagatcctgcagagcaaattggcgccgctgctggaccagttgtattctgttagacaccctgtacatggcttcgtgcctgccagaagtgtgaaaactaatgcagaggcgcatggacggcggagattcgtcgtgaacctcgatctccaggacttctttcccaccatcaccgagaatagagtccgcggactgctgaccagcctgaacgtcgatgctagggtgaccgaaattatcgcccgactgtgctgctttaataaccacttgccccagggcgccccaacttcacctgtcatatcaaacatgatctgttaccgcctggacaccgagctcctgaggattgggaagggcgcccgagccatctatacgcggtatgctgacgacattactttcagttcatatcaaccccctgctttactgtttgagggagccctgcccccagtcggacggttttcaagagacttgcttgcacttcctctcagaggcacttttcaatctaatgggttcacgattaaccctgataagtcccactatgcagatcgcaactctcgcaggattgttacaggagtgaagattaatgccggcctcaacgtggatcgcagatacgtgaggcatatcagggcactactccactctatcgagacactggggctagccgacgctaacgccaaattcgttgccgcaggcggcaaaggttccattgcagcccacctgcgaggaaagataagctacatcgcgcatctgaaggggaggactgacccagtagttcgtacactcgccctgaggtacaatacatccttttcacatcagccgattaagctcgtgcccaccgttgaagagcgcagagataggagtgtgtggatagtagagcactctgccaatgggggcgaacagggaacagccttcttcctgaaagacgtgggacttgttactgcagctcattgtgtcgagggcgtgagcgacttcattgtgtaccaccccaccaagccctcgaaccaggcctccgtcaccgtgcttaagcggtgcgagcaccgggacctggccatcttgggacacgctatccacgacaccgaatacttcgaacttggggccgcgagccgcgctatagcagttgatgatgtggtcaaggcttacgggtatcctggttacggaccaggcgataagataaatgtgaggagtggcgctgtgtccagcctccccatcaaaagcgctgtccagatgatcgaagtgacgcaggaacttgcacaaggcatgagtgggggcccaatccttgacgcccacggtgaggtcattggggtgatccacaagggtggtccgaacgaagggagacagctggctatacatattggcgtattacagaaatgggcacaagagtga

SEQ ID NO: 7586 - RNA, 1581 nt, synthetic construct
  source 1..1581: mol_type = other RNA
atgccgagtgtcatgcgcatcttcggtaatctgattcccatcgcaatcccccctgaactggccgcagaaccccctctgctgacccatctgggcctcagcgcaaaggaactaaagaaaatatggtggtaccgcgggcgcatgtataaacagttctctatcgccaagaacagtgggaaggtgaggctgattacagctcctgacagacgcctaaaaatcctgcaaaggaagctggcccctctgctcgaccagctgtacctggtgcggaatccggtgcatgggtttgtcccggcaagatctgtcaagacaaacgctgaggcacatgggcgacggcgttacgtggtcaacctcgacctgcaggatttttttgctacaattacggaaaatcgcatacggggactgcttatctcactcgatatcgatacccgggtggccgatatcgtcgcgcgcttgagctgtgtgcacggccatttaccccaaggcgcccctacatctcccgtgctgtcaaatatgatttgctaccgtttggacacagaacttttgagagtggccaagggggcaagagctatctacacccggtacgccgacgatattactttttcaagctaccaaccacctgctcctttgttcgagggcgctctgcctgccgttggaagattcagtccagaggtgcttgcaccacgagtgcgccagacatttgacaccaatggtttcactattaaccccgacaaggctcactacgccgatcggaactcccgtaggatcgtaactggcgttaaaattaatgccggcctaaacgtggaccggaggtacgtcagacatatcagggcgctcctgcattccatcgaaaccatgggtctggctgatgcgcaggctaagtataccgcaactggaggtaaaggcagcctagcagcccatctccgtggaaagatttcttacattacgcaccttaaagggcttaccgatcccgtggtcagagccctggccttaagatataatcggtcgcttgggcacaggccaatcaagttggccccaacaatcgaggagaggcgagaacgctcaatatggattgtagaaaactccgccaaggcgggcaaacagggtacagccttcttcctcaaagacgtgggcctcgttactgctgcgcactgcgtggagggcgatagtgacatcactgtatatcacccaactaaacccactaaccacgccaaagtcaccgtgttgaagaggtgtaagcatagagacttagctatactgggccataccatccacgaaaccgactattttgagctggagccgaccgaccacgttgtggtcgttggggatttcgtgattgcttatggatatccagggtatgggcccggtgataagattaatgtacgaggcggatccgtgacaagcctcccaatgaaatccgccgtccacatcatcgaggtggatcaagagcttgcacctggtatgagcggaggccccattttggatgcccgaggagacgttatagggatagttcacaaaggaggaccagacgagggcaggcagctggcagttcacctcgacgagttacagacgtgggtacaggagtga

SEQ ID NO: 7587 - RNA, 1524 nt, synthetic construct
  source 1..1524: mol_type = other RNA
atggcggatgaagcttcacttctgagacacctcggtttgtcgccacgcgaactgaagaaaatctggtggtatcgcggtagaatgtaccaacagttttcaatcgccaagggaggcgggaaggtccggcttattatggccccagatcgtaggctgaagattcttcagtctaagctagcccccctgctggaccagctgtatcgcgtgagaaatcctgtgcacggattcgtacagcttcgcagtgttaagacaaacgcagaggcacacggcaggaggagattcgtgataaaccttgatctccaggacttttttcctactattacagaaaaccgcgtgaaaggcttgctgaaatccatcctgatcgaccccagagtggccgaaattgttgccaggctgtgttgcgtggagagccacttaccacagggggcgtcaacatctccggtgctcagcaatatgatatgcttcaggctcgacacgcagctgttgcagatcgcaaaatcagccagagccatctacacccggtacgctgacgacatcactttctcttcttatcagccccccgcccctttatttgagggagccctacccgctgtcgggcgattctccccagacatgctggctgcgcctctgcgtggagccttcgaatccaacggcttcattataaaccccgtcaaggctcattatgcagacaggaatagtcggcgtattgtaactggtgtgaaaataaacggggggttgaatgtcgatcgacggtacgtgagacggatcagagctctgctccattccattgagctgctaggcctggacgatgcacaacagaaatacggttctggagggggcaagggagctatcgcggaccaccttcgcgggacaattagctacattacccacttgaaagggagcgtagacccagtagttaggtcgttagcaacgcggtacaatcgaagtttccctgcacgccctattatgctcgctcccaccgtggaagagcggagagatagggcagtctggatcgttgagcatagcgctgacggtggtcaacaaggcaccgccttcttcctcaagaatgtgggtctggttaccgcgtcacattgcgtggagggggatagcgattttgtggtctatcacccatccaaaccgtccaacaggagtaaagtgaccgtgctcaagcggtgtgcccatcgggatctggccctcttagggcatgctgcccatagcactgattactttgacctggatgtggccgcacgatctgccgctgtcggcgatgacgtcgtggcatttggctatccaggctttgggcccggcgacaagatcaatgtccgaggcggatctgttacaagcctgcctatcaagagtggagttcctatgatcgaagtttcccaggaacttgcccagggaatgtccggcggcccgatattggatgctcacggcgccgtagtgggaattgtgcacaaaggaggacccgaggaggcacgccaactcgctattgagatcggcgtcctgttgaagtggctggccgagtga

SEQ ID NO: 7588 - RNA, 1575 nt, synthetic construct
  source 1..1575: mol_type = other RNA
atgagcagcgcagcaaggatatttggaaaacgcattcccattccaatccctcctgagtttgccgacgaatccacactactcgcatttctggggctttcaccaagagagctaaaacggatttggtggttccgcgggcgcatgtaccaccaatttgagatcgccaagggggggggcaaatccaggctgattaccgctcctgaccagcggctttccatcctgcagagcaagctccgtcccctgttgaataccttatatcgagtgagaaaccctgtgcacggcttcgtcccagccaggagtgtgaaatctaacgccgaagcccacggcagacggcggttcatcgtaaatcttgatttgcagcacttctttcctactatcactgaaaaccgcgttagaggggtactggaagccctcggggtcgaccaaagggttgccgagatcattgcccgactgtgctgttttgagagccatctgccacagggtgcgagtacaagcccagtcttaagcaatatgatatgttacaggctggacacagatctcctgcgccttgctaaaactggtcgggccatatacacccggtacgccgacgatatcaccttctcttccaaccaaccgcctgctccactcttcgatggtgctcttcccaccgtgggccgtttctctcctgagctgctggcttcagccttgagagatgctttccaaaccaacggctttatcctgcatccagacaaggcccattatgccgatagaaattcaaggcgaatggtcactggagtcaaaatcaacgacggcctcaacgtggatagacgttatatccggcgtatcagagcgctcttacattctatagagacactgggcctggcagacgctcagtctaagtttgctggcttgggcggacgaggggctttagcggctcatttgcgcggaaagatcgcgtatattagtcacctgaaaggggccacagaccctgtagttcgcgctctggcgcagaggtacaataaaagtttcggcgctacccccataaccttggtgcccacgccccaggaaagaagagacaggtccgtttgggtggtagatcacatcgaccagtacgggagtgccttcttcttgaagggagtggggctggtgactgctgcccactgcgtgaagggactatcagaggtggagattcttcatccctctaagcacacaacaactttttcagcaaaggtgctcaagaggcacgatcaccgggacctggcactgctcgacaccagcaccattcctgcaactgagtattttgagctagacctggcaactacgcctcccctcgtcggtgatcccgtgacagcagttggctacccgaactgggcccccggtgataggctgaatcaccgcccgggagttgtcagccttattacgccacaggcaggagtgcgaaagatcgaagtgtcccagatgctgacccaaggaatgtcggggggtccgattctcgatgccaatgccggcgtcgtcggcattattcataaaggtggaccaggagaaggccggcagttagcaatccatctctccgtgctgcaggaatggttgaaggagtga

SEQ ID NO: 7589 - RNA, 1611 nt, synthetic construct
  source 1..1611: mol_type = other RNA
atgggggactggcgcgactggaagggcgacttagtgtccgtcgcaaggatttttggaaagcactttccgttgcagatcccgcaggagctggcagacgaggcctctctgctggctcacctcggtctggggcctaaagagctgaagaaaatttggtggtacagaggccgtatgtacgagagattcgatattgcgaaaggtggcggaaagatccggcagataactgccccagacaagcggctaaagatcctgcaaagtaagctcacgcctctccttgatcaattgtatcgcgtgcggaatccagtgcatgggtttgtgcctgagcgatccgtcaaaaccaatgccgaagcgcatggccgtcggaggttcgtcgtgaacctggacctgaaggacttcttccccacaataaccgagtcgcgcgtcaagggccttcttggcgcgcttgctgtcgacgacagagtggcagaaattatcgcacgtttatgttgtgtcaacgaccacttacctcagggcgctccgaccagcccagtgcttagtaatatgatctgcttcagactcgatactgaactgctgagagttgcaaaagctgccaggagcatctatacacgctatgccgatgatattaccttctcttcttatcaacctcccgcccctttgttcgagggagccttacccgcagtgggaaggtttagcccagatacgctggctcccacactgcgcaatgtattcgccggcaatggcttcgtggtcaaccccgataaagcccattatgctgaccgaaactcccgacggatcgtgactggagtgaaaatcaacgcatccctgaacgttgacaggcgatacgtccggcacattagagccctcctgcattcagttgagactttgggtctgggggatgcccagcagaagtataccgatgccggtgggaaaggagttattgcagagcacctgaggggcaaaattgcctacgtgacacacctgaaaggactcaccgaccctgtcgtgcgcagccttgccatgagatttaacaagtctttcaccgcccgcccaatccggctagcacctacagtagaggagcagagggatagagctgtgtggatcgtggaacatagcgccaacggagggaagcagggaactgcttttttcctcaaggacatcgggcttgtgacagcttcacattgcgtggagggcgagtccgattttactgtgtaccatccctctaagccctcaaatcagtttaaggtttcagtggccaaaagatgcgaacaccgagacttggccttgctcggccacgccatcccaactacggattacttcgaactcgtggtggccacacaccctgtagcagtcggtgcggttgtgaccgcatttggttaccccggttttggcccaggagataagctgaatgtacggggggggagtgttaccagcctgcccataaaggggggcgtccagagggtcgaagtgtctcaagagctcgcacaaggaatgagtggagggcccgttgtagatgctcaggactgtgttgtgggcatagtccacaaagggggcccagaagaagctaggcagttggccgtagctatttccgctctgcaggacctagctgcggaatga

SEQ ID NO: 7590 - RNA, 1581 nt, synthetic construct
  source 1..1581: mol_type = other RNA
atgccttctgctgctaggatctttggcaagcactttcctctgccaatccccccggaattggccgatgagtcctccctgctggcacatctcggacttagcccgcaggagcttaaaaagatctggtggtatcgcggaaggatgtacgcacagttctcaatcgcaaagggtggcggaaaggtacgacagattaccgcaccagacaagcgcctaaaaatccttcagaataaactggctccactgctgaatcaattgtatagagtgcggaaccccgttcatgggttcgttccggcgcggagcgttaaaaccaacgccgaggcacatggacagagaaggtttgtggtgaacctggaccttaaagacttttttcccaccatcacagagaatagaataacggggcttctccgctccctgggtgtggatgatcgcgttgctgaaatcattgctcgcctgtgttgcttcaatagtcacctcccccagggagcccctacttcaccagtgctcagcaacatgatttgcttcaggttggacactgaactcctacgggcggccaagggagctagatcaatctacactaggtatgctgatgacataactttctcttcctaccagccccctgccccactattcgaaggcgccctcccagctgtcgggagattctcccctgatactttggccccttcactgagagacacatttacccgtaatggcttcgccgtgaaccccgataaggcccattacgccgatcggaatagtcgaagggtggtcacaggcgtgaagatcaatgccggcctgaatgtcgatagaagatacgttcgtcggattcgagcacttctgcactctgtcgaaaaactgggattacgcgatgcccagcagaagtatgctgacgccggcggtaaaggtgtgattgcggagcacctgcgggggaagatatcttatattacccacttaaaaggggccacagaccccgtagtgaggagcctggcaatccggtttaacaagaactttcgagcacgaccaatcaagctggccccaaccattgaggaacaacgggatcgcgcagtatggctcgtggaacattccgctaactgcgggcaacagggcaccgcgtttttcctgaaagacatcggattagtgaccgcgagtcactgtgtggaaggcgtgagcgattttactgtctaccatccgtcgaaaccttccaacaggttcgaagtgacagtcgccaagcgctgtccacacagagacttggccgtcctcgaccacgcaatacctgcttctgactatttcgagctcgaggctgctgcccagtcagtagcggtgggcgacgcagtgacagcctttggataccccggtttcggccccggcgataagatgaacgttcgtggggggagtgtgacgagtctgcccgtcaaaagcggcgtgcacttagtggaggtcagccaggagttggcccaagggatgtctggcggacctattgtagacggccacgacggtgttgtcggtattgttcataagggggggcctgaggaggcaaggcaattggctattgccatcggagtcctgcagaaatgggtggctgagtga

SEQ ID NO: 7591 - RNA, 1506 nt, synthetic construct
  source 1..1506: mol_type = other RNA
atgacgtcagcccggaggatgtttgggaaacagatccggatccccctgccacctgagctggctaatccggacgccctgcttgcttacctggaagtgtcccccgctgaacttaaaaagatttggtggttccggggcaggatgtatagtgaatttaacattgcgaagagaagcggaaaggtccgcaccattacagcacctgatcgtaggttaaagatcattcagtccaagttggcgcccctgcttgatcagctctaccgaccccggcacccggttcatggattcgtcccaaatcgctctgtgaaaaccaacgcagaagcccacgggagacgcaggtttgtggtaaacctcgatctcaaagacttctttccgacaataactgaaaaacgcgtggttggcctgctgagggccttgggtgtcgagaagggtgttgccgagatcgtagctcgcctctgctgtcatatgggacaactgccacagggcgcaccaacttctcctgtactgagcaatatgatctgctaccgactggacaccgacttgcagcaagtcgccaagtctgcgcgggcaatctataccaggtacgcagatgatatcacattttcctcttaccagcctcccacaactctcttcgagactgcagtggctggggcaggaagattttcccctgaggtgttagccccacagctaaggggtgctattgcctccaatggcttccttataaaccctgataaggctcactacgcggatcgtaacagccgacggatggtgacaggagttaaaataaacgctgggttaaacgtcgaccgccgttacataagaagaatccgggccatgatgcactcatttgaacgtgtagggcttgcggaggcccaggccaaatatgcctcaggaggtggcaaaggcagcttggcggcccatctacgcggcaagattgcctatgtggcccatctgaagggccagaccgaccctgtggttaggtccctggctcaaagatacaataagagcctccccgcaaagccaattaggttgaccccaacggtggaagagcggcgagatcgcgctgtttgggtaattgaggtgccactcaaacacaatggcacggccttcttcctcgctggagtcggcttggtgactgccgcacattgtgtggaggggctcagcgaagtggaggtcctgcacccctccagacacaccaccacttttacagttaaggtcagacactatgacaaacatcgggacgtggccgtgcttgaccacgggactatccccgcaacagagttctatgaactggagcctgctaccaaaccagccgccgtcggtgatgcagtcgttgccttaggatatcccctgtgggggctaggcgagggcctgaatatcaggccgggggaagtgtcgtcgctgaccgtgagaagtacaagtgctggtttctcagccagacgccccagcaagcgaagtgagaggggacctagcctgtctggcgtggactgcgcttctgcatcacggagttga

SEQ ID NO: 7592 - RNA, 1083 nt, synthetic construct
  source 1..1083: mol_type = other RNA
atgtccaatatgatttgctacagactggacaccgagctcttgcgggtggctaagtctgcgcgggccatctacacgagatacgccgacgacatcacatttagcgggtatcagcctcccgccccgttatttgaggctgggcctccacccgtgggacgtttctcttccgacctcttgagcactgcgctgcgtgtcgccatagaaggcaatggcttcacaattaatccccagaaagcccattatgctgataggaattcaagacgcatagttacaggcgtaaagatcaacagtggcctcaacgttgaccgccggtacgtgcgtgatatccgcgctaagctgaacagcgttgaaaaacacggcctaaaggcatctcaggccaggcattcagcaaagaacggcaaaggggatatctgtagccacattagaggaaaaattgcttatgtcgtgcaccttaagggtctggcagaccctgtggtgcggagtttggccctgaggtataatagaagtttcgcagatcaacccatgaaggtgacccctactgactcagaaaggagggatcggtccgtgtggatcgtcgagcactcggggaacgagggagagcagggaaccgccttctttctcagcggcgttgggcttgtcacagctgcccattgcgtagagaatcccgaggatctgcttttgtatcacccgtccaccccttccaaccagacccgggttagcgtcagaaagcgatgtgaacaccatgacttagcaatacttgaccacgcaatacatccaaacgagttctttgaaatggaagcggccacagtcgctgcagcggtaggcgatgacgtgacggcttgcggttaccctgggtacggaccaggggaccgactgaatatccgcaatggaactgtcacctctctgcccaggaaatccgccattgatcgcgtggaagtgagtcaagagctgtctcagggtatgagcggtggtccagtactcgatgccggcggacgcgtggtgggtattattcacaaaggagggccaaacgagggccgacagatcgctactgccatccatgaactgaaaaagtgggccgcatcatga

SEQ ID NO: 7593 - RNA, 1581 nt, synthetic construct
  source 1..1581: mol_type = other RNA
atgccatccgcagcgagggtgtttgggaaactctacccaattaacatccccgcggcccttggggatgaggctacactgctggctcatcttggtatgtctccaccggaactgaagaagatctggtggtacagaggcaaaatgtaccggcggttcagcatcaccaaaggcagcggcaaaacacggaccatctgcgcacccgactccagattaaagattctgcagcgtaaactggcaccgctgttaggccagatttaccgggtccggaaccccgtgcacggatttgtcctcgatcgctctgtcaagaccaatgccgaagcccacggggcaagaaggttcgttgtcaatctagatcttcaggatttcttccctaccatcacggaaaatcgaatcgtggggctcctgacttctgtaggccttgagaggagggtggcagaaatcgtagccagagttgcttgctatgacggccacctacctcaaggggctcctactagtcccgtgttgagcaatatgatttgttatagattggacaaggccctcttgcgtattgccaaatccgctaggactatttacacacggtatgccgacgatattaccttcagcggctatcaacccccagtggccctgtttgaggccggaccacccagcgtcggtaacttctcccctgaactcttgtcagccgcactacgaactgctgtgcagggcaacgggttcataatcaatccccataagctccattatgccgacagaaattcaaggcgcatcgtcaccggtgtgaaaataaacagtggtttgaacgttgatcgcaggtacgtacgcgatatcagggccaagctgtcctcaattgaacgccacggactgaaggcctcccaagccacgtatttttctaagggagggaaaggtgatattggtactcacatacgaggaaagattgcttacgtgggccacttgaagggtctggcagaccctgtcgttcgttccctcgccctccgatacaatcgcagcttcgcagatcatccggtgaaaataacccccactgagagtgagcgtcgcgacagaagtgtgtggattgtggagcactcaggaaatggcggggagcagggtacagctttttttctgtcaggggttgggcttgtaaccgctgcacactgtgtggaggaccccgaggacctgctggtctatcaccctagcacaccatccaatcaggctaacgtgtctgtcaggcgccgatgccagcatagagatttagcgatactggaccatgctatcagctcgaacgaatttttcgagatggaggcggcaacgaccgctgttgcagtgggcgacgacgtcatcgcctacggctaccctggatacggcccaggagatagactgaacattcggtctggcaaggtgacatcgctcccacggaagcacgcgatcgatcgggtagaggtgagtcaggaactgagccaaggaatgtcagggggccctgtgcttgacgcttctgggaaagtggtgggagttatatataagggaggccccaacgaaggaaggcagatcgccacagccatccatgagctgaagaaatggactgccgtttga

SEQ ID NO: 7594 - RNA, 1575 nt, synthetic construct
  source 1..1575: mol_type = other RNA
atgccgcgcaatccgtttggaccaccaatcagagctgccgtccctgcggaacttgcgtcggaggcagccctcttggctcatctgggcatgacagtcggtgaattaaataaaatccgttggtatagggaccaaatgtaccagacgttcgagatcgcgaagtccggaggcaagagtcggttaatctcggcacccaacaaacgcttaaaacacattcagcgacagctgctccccctcctctatcagctctaccagacacggagtcccgttcatggcttcgtctttaacaggagcgtgaagactaatgctcaatcacacctgcgtagacggttcgtgctaaaccttgacctgcaggatttttttcctaccataactgagaaccgggtggtgggaatgctgaaagccataggcatcggagctactgtggccgtagccattggctatctgtgctgcattcatggccacctgccacagggtgcaccaacctcccccgtgctgagcaatatgatatgtttcaggctagatcgagagcttcttgcctttgcaaaggcaagcagatgcatctatacccgctacgcagatgacatcactctaagttcccatcagccaatgagcgccctgtttgaaggctctcccccacccgctggcaattttgctaatgatctgctggtttctgctctgacagccatagtggtgggcaacggcttcaccattaaccctatgaaagcgcactacgctaataggcatagccgccgaatggttacgggcctgaaaattaacgatcttctcaacgtagataggagatatataaggaacattcgtgctgtactgcactctgtcgagacattggggttcgtgggggcacaaactaagtacgccacctcaggaggaaccggttcccttgctgcccaccttcgcgggaagattgcatggatctcccacattaagggtccctctgatcccgtcgtcagatctattgccctgcgatttaacacctgtttcgccgatcgcaaaatcatggttactcccacccccattgagagacgggagagatctgtttggattgtagaacatgatgacggtcaggggacggggttcttcctcagtggagttggattggtgacagcagcccactgtgtcaccgggaagcgggaggtcgaggtgtttcacccgtcaaaacatgctaacactttcaaagcgacagtgctgcaaagggacgaccatctcgacttagctatcctgggacatgagatcccagccaccgaatactatgaattgaatagagccgccctgccagtggtaacaggggatcctatgacagccgtggggtacccaaagtgggcccctggtgaccctctgaatgtgaggcctggtgtcgtgagcaccgtgaccatcaagagcgccgtccgcctcatcgaggtgacacagaagctgactcaggggatgtccggcggacctctcttggacgcaaatggcgacgttgctggggtcgtgcacaaggggggacctgaagaaggccgggacttcgcgatccacgttgaggtgttgaactcctggttggcacacctggcctcatga

SEQ ID NO: 7595 - RNA, 1488 nt, synthetic construct
  source 1..1488: mol_type = other RNA
atgactgctaaggagctcaacaaaatccgctggcatcgagggggaatgtatcagagtttcgagatcgctaagaataaagacaaaggcaggcttatttccgctcctgacgatagacttaaacatttacagaggcagctccttcggttgctggaccccctttacacagtacgcaacccagtccatggcttcgtgttacagagaagtgtcaaaacaaatgccctgagtcacctgcgcagatcatttgtcctcaatctggatctgcaggatttcttccccactatcactgagaaccgcattgtcgggatgttggaagcgctgggaatcggatccagcgtagccgccgccatcggatacctctgttgcattaacggacacctgcctcagggagctccaacatcacccctcttatctaacatgatctgttttcggctggatcgggaactgcttaacttcgccaaggtcaccaggtgcatttatacaagatacgcagatgacataacctttagttctcaccgtccgatgacagcgctgtttgagggtccactgcctctcgccggacactttgcccccaatctgctggttccgagcctcgtggccctgtttgctggtaatgggttcacaattaacccctccaaggcccactacgcagaccgccatagtcgtcgaatggtgacgggcctcaaggtcaacgaactgctaaatgtcgacaggaggtacattcggaatattcgggctgcgttacacagcgttgaaactctgggcactgtgggtgcccaagccaagtacgaggcatccgggggctcagcttcattggctagccacctcttgggcaagatagcgtggatcagctatatcaaggggtcttctgatcccgtggtgaggagcatcgccttgcgcttcaactggtgttttccagactgcaaaatcgaagtgctgccgacccctatcgaaagacgggatagggccgtgtgggtggtggagcacgatgatggacaaggtaccggcttctttcttaatggcgtcggattcatcactgcggcccattgcgtggccggcaaaaaggaagtggagatattccatccttcaaaacacagcaactccttcaaggcaatcgtgctaaagtccgatgacgacatggacctcgcagttctgtcgcatgagataccagctaccgagtattacaagctggaccaagctgcactaccaattgcaaccggggcactcatgattgcagttggttatcccaagtgggcccccggcgaccctttgaatgttagacccggcgtggtatctacgataacggtgaaaagcgctgtgagactgattgaagtgacccagaagctgacccagggaatgtctggggggcctctgctagatgccgatggggctgttgccggggtcattcataaaggtggccctgaggagggccgagactttgcaatccacatcgacgtattgaactcctggcttgccgctgccgcaccatga

SEQ ID NO: 7596 - RNA, 1683 nt, synthetic construct
  source 1..1683: mol_type = other RNA
atgtcacgggaggacgttcgcgccattaggctgctgagagagtggcgtgactggcggggggatttggtaccccagaaccccttcggccccccagtaaggattgacatccccgctgagttggctagcgaagctgcactactgtctcatctcggactgagcgtgatggaactcaagaaaatccggtggtgtcgcgggagaatgtatcagtctttcgatattgctaaggtgaagaataagatacgcgagattaatgcccctgacagtagacttaagcatcttcaacgccagcttttgcctctgctggaccagttgtatcgcgtgcgaaaaccagtgcacggattcgtggccgacagatccgttaagacaaatgccctcgcccacctaaggaaacactttgtgttgaatttggacctgaaggactttttccctagtatcaccgagaacagagtcgtgggcgtcctgaaggctctgggaattgacggcagcgtggctgctgtgatcggatacctgtgttgcgtgaatgggcagctgcctcagggtgcacccacctcaccagttctcagcaacatcatctgcttcagattagataggaagttactggcttttgcgaaggacgcgaggtgtatctacactcggtacgccgatgatattacattcagcagttaccagcccatgactaccctgttcgagggcccgttaccaccggcagggcactttgtgccagatctgcttgctgcagcatttgcctccatatttgtagtgaatgggttcgccataaacccagccaaggctcattatgctgatcgacactccagacggatggtcacaggactcaagattaatgagctgttaaacgtcgatagaaactacgtacggaacataagggccgccctacactccattgagacaatcggcggtatcgccgcacaacgcaaatttgaagcacgaggcggcactggatctctggctgcgcacctcctgggcaaactgtcatggctgcgacacatcagggggcaaactgacccagtttttcggagtgtcgcagtgcggtttaacaatgccttccccacccacaaaatcgacgtaacgcccactcctgcggaagtgcgtgacagggccgtttgggttatcgaacattacgaaggagatatagaccaatggtatcagggttccgccttctttctacgtggagtgggactggtcacggctgcccattgcgttacaggcgcctccgaagcggaggtgtatcatcccgggaaaccggccaacaaattcaaagtgaccgtgcttaagatcgacgatcacagggatttagccattcttgcgcatatgatcccagaaacagagtatctcgagttggagcgctcgacccaggtcattaccgtgggcatgctcctgaccgcagtgggctacccttcttttgggtctggtgatcgccttaatgtacgagacgggaacgtctcatcgctcccggttaaacatggggtccagtatattgaagtgcagcagaaactctcaccaggcatgagcggcggccctctgttggatgcatacaatgctgtcacaggtgtggtccacaagggaggtccttctgagcctagagacttcgccattcacatcgatgttctgaacgcctggctcgcaagtgcaagcgctagcttcgggcccaacggttccgcctga

SEQ ID NO: 7597 - RNA, 1260 nt, synthetic construct
  source 1..1260: mol_type = other RNA
atggtggcctatttgtcattaactgaagcagagcttaaaaagattcgctggtttcgccggggaatgtatcactacttcgaactggcaaaaggtaacggcaaacgtaggcggattatggcacccgacgcaagactgaagcatctacaaagggccctcctgccactgatggaaaatctgtaccgagttcgaaacccagtccatggttttgtaagggataaaagcgtcaaaaccaacgccgctgcccaccttagacgccggaatctcctcaatattgacctaaaggatttcttcggcgccatcactgaaaaccgtgtggtgggcgtactcgaagcaattggtgtccccggagatgtggctgctgccattggctatctgtgttgctgtgagggcagtttgcctcagggggcgccgtctagtcccttgctgagcaatatggtgtgtttcagacttgacagggagctgatgcgctacgctaaggagcataggtgcatatatacccggtacgcagatgacataactttgtcctcccaccaacccatggcctctgctttcgacgggcctattccacccgctggtacagttcagagtgagcttttggaccctgagctgagagggatcatcggaagcaatggcttcgagctgaaccctgataagattcactacgcagataggaattcccggcggatggtgacaggactcaaggttaacgagctgctgaatgtcgaccgtcgcttcgtccggaacttacgagctatgcttcatagcatcgagataaaggggcacgccgatgccaaagctaggttcgcgtccctcgggcactcaggatcaatgtctgctcatattcgcggcaagatcgaatggctcgcctctatcaagggaacatccgatcctgtggtgcggggaatcatattgcgctataacgcttgctttcccgggaaggcaatcgcggtgagcccaaccgacgaagaaagacaggaccgagctacctggatcaccgagaacaaaaatgggcagggttcgctgttctttctgaagggggtcggactggttactgccgcacactgtgtggccgatctactgaaccttgagatttttcacccatcaaagcatgccaatagatttggcgcgacggtaacgaaatacgacaaagacaggagacgactcagattaggcttaaagagggtgctggatccaatcgaggccgaaatgtgcgcctgcctcacagcccctctgtttggcaccggcccgagaatcctgtga

SEQ ID NO: 7598 - RNA, 1638 nt, synthetic construct
  source 1..1638: mol_type = other RNA
atgcataacccctttgggccatcaacccccccgcggatctccattcctcaggagttggagaataaggaatcaatcctcgcttatctggatgttaatccagaggagctaaagaagatatggtggtttcgcgaaaagatgtatcaggccttcgaaatccagaaacggggaggcaaagccagggtgatctcagcccctgatgatcgcctgaagtacctgcagcataagattttgctcctgctaaacagactgtaccgtgttaggaaccccgtgcacggcttcgtccctcaaaaatccgttaagactaatgccaccgcccacctgagaaaaaggttcatcttgaacatagacctaaaggacttcttccccagtatcactgagaaccgaattattggtgtcctcaagtcgatcggtatcgatgaccaggtggctcaaattatcagccgaatatgctgctcaaacggttgtctgcctcaaggcgcaccaacatcaccagtcctctccaatatcatatgcttcaggctggacaagaatttaatgagcctcgctaaggacacaagatgtatctacacccgctacgctgatgatctgactttcagcagtcaccagcccatgatcaaactgttcgagggcgtcatcactccagccggccatgtgtccccggagctgttatctctccatttgcgcaatattttcctggccaacgggtttattattaatcccgataaggtgcactatgcagataggaattccagacgcatggtcacaggcctcaaggtaaacgaatttgttaatttggaccggaggtatatacgcaacattagagcaattcttcactctattaaggtaagtgacgttaaagccgtggagacaaaatataagcaggattatggaggtaaggtcgatctgggaaaatacctgagaggtaaaattacatggctcgggtttatacggggacagagcgaccctatttttcgagcgatcgccataaggtttaatgaagaattccctgatcttaagatcgaaacaactccaacctttattgagatccgggacagagccgtgtgggtgatagaatactgcgtggatactctcgcagggctgaaagcatttcagggtagctgcttcttccttaaagatgtgggattggtgacggcagctcactgtgtgctggacgagaatgagccaatgaaggagttggagcttgaattacaccatcccagtaagcccgccaacaagttcaaggcgaaaatctgtatgttcgacaaacatcgggacctggctatccttagtcacaagattcctgctaccgagtactatgagctcgagctcagcacaaaaaccatcagcgttgacgatgaacttaccgctgtggggtacccttcgtttggcccaggcgaccagaccaacattaagaagggaacggtatccagcctgcccaaaaaatctgatgtccagttaatcgaagtgacgcagaaactggcacaagggatgtctgggggccccctacacgactccaactttgccgtagtcggagtgattcataaaggcggaccgtctgaggggcgtgactttgcggtgcacttcgacgaacttaacaagtggctgtctaccccacctatctccaaaatcctgggctga

SEQ ID NO: 7599 - RNA, 1503 nt, synthetic construct
  source 1..1503: mol_type = other RNA
atgagcggaaaagagttaaagaagatctggtggtttagagggcgcatgtaccaccagttcgagatcgccaagagggagggcaagacacgcattatcaacgctcctgataagcggctcaaacacttgcaaagacagattgcccctctccttgatcaactctactcagtgcgcaatcctgtccacggcttcgtgaccggaaagagcgtcaaaaccaacgcactggcccacctaagaaatagatttgtgctgaacatcgacctgaaagatttttttccaagcataaccgaaaacaggatcaacggcgtgctggaaagtctcggtgtagacagcggggtttcccgtataattgcacgcctgtgttgccataatgcccagctgccacagggcgctcccacatcacccgtcctatccaatatgatttgcttccgactcgacaaggagctgcttgcattcgccaagagcatgcggtgtatttacactaggtatgccgacgatatcaccttttcctctcatcagccgatggtggcactttttgaaggtagcgctcagcccagcggtgctttcgcactggacctcttgtcgtccacgctgcggaatattgtgaatggaaacggctttgcgatcaatcccgaaaaggcccactatgctgatcggcattcacggaggacagtgaccggcatcaaaataaacgagttcttaaatgtggaccgccgatatgtgaggaacatacgcgccgctcttcactctgtggagcaggtcggaaaaaaagcagctcaggaaaagttcgagaaagaccacaaggggaagtgtgatctgggagcccatctggggggcaagctctcctggctgagatacatccggggtcagtccgacccagtttttagggcaattgcaattcgtttcaacgccaacttccccgaccgaaagattgatgtgacgccaacatctcatgaggtgagagatcgggccgtctgggtcgtagaatattgcgagggggagggggaaaaccttaaaatgttgcagggaacttgttttttcctaaaggacgtcggcttagtgaccgctgcacactgcgttgagggagttgaggaagtcgaggtttaccacccatcaaagagaagtaacgtgttcaccgccactgtcgttaagcgtgataaggatagagatttggcgatcttggagcattcgatccctaccactgaatattttgagattgagaggtctgcccaagcggttgccatgggcgacgagctgacagccgtaggttaccctagtttcggccctggagacggactcaatgtaagggatgggaaagtgtcaagcctgccggtcaaaagttctctcaaactgatcgaagtgactcaaaaattgagtcagggcatgtccgggggtccccttctgaacggggacaatacagtagtgggcgtgatacacaaaggaggcccaggggaagcgcgagactttgctatccatatcgaaatgctgaatgcttggctgtcttga

SEQ ID NO: 7600 - RNA, 1629 nt, synthetic construct
  source 1..1629: mol_type = other RNA
atgagagcatggcgtgattggaaaggggatctggtcactttgcctctgtttaattctagtatccgcacaagtatacctgctgaactggctgatgaaacggccttctttctatacctacagatgtctccgagggagatgatcaaaatctggtggttcaggcgacgtatgtaccaccagttcgaaattgcaaagggcaaaggcaaaacccgcatcatagaggcaccagacgaccggctgaaacatcttcaacgcaagctgttacctcttttagaccagctatattgtgttaggcaccccgttcatggcttcgtcgccgggaagagcgtgaagacaaatgcccaggctcacctgcgaaagagattcgtactgaatattgacctgaaggattttttcccttccataaccgaaaaccgggtggctggtgtgctggaggctctgaacatcgacggacgagtttcgagattgatcgctaggctctgctgtcacaacggccatttgccccaaggcgccccaacctcccctatcctgtccaatatgatttgtttccgcctggacaaagaattgctggtgtttgccaagagcatgcggtgcatctatacacgctacgccgatgatattacgttcagttcccaccaacctatggctgccatgtttgaaggagccgcggccccactcggacggtttaactctgacttgctcatccagccttttaggaatattatcgccagtaatggtttcagcctcaatgcagacaaagcccattacgccgatcgcaactccaggcggatggtgacaggaataaaagtgaacgaactcctgaatgtcgacaggcgttacgtgcgaaatatcagagccgctctgtattctgtggagaaacttgggaagaagggtgcccaagacaagtttgaaagcgagcatggcgggaccagcaagctcgcagctcaccttgcgggtaaaatcgcatggcttgcacatatccggggccaaagcgaccccgttttcagagccatagcggtgagatttaacaagaacttcccagaggctcgcattgcggtgacacccacttctgaggaaatccgtgatcgagccgtatgggtagtcgagcatgaggaagcccagggaactgcttttttcctgaagggagtggggctgattactgccgcacactgtgtcgaaggagtgaaggaggctcagctgtatcatcccagtaaaagggcaaacgaatttactgtgagagtggtcaaccgggacaaggacagagacttagccctccttgagcacaccattccttcaaccgagtattttgagctcgacagatcaaaccagccggttgctgtcggccaggagctcactgccgttgggtacccatcattcggcccgggtgatcgcttgaatgtccgggatggaaaggtgtcatcacttaccgtacagcacggggtgaggttgattgaggttacccagaagctgccccaggggatgtctggtggacccttactgagctcccagtgcgcggtggtcgggatcattcacaaaggcggcccagatgagggacgggacttcgcaattcacatggatgtactggcagcttggctcgcagagaaaccacccggcgatggctgcacatcctga

SEQ ID NO: 7601 - RNA, 1578 nt, synthetic construct
  source 1..1578: mol_type = other RNA
atgccccccagtttttttgggatccccgtggttcgggtcgcgattccacctgagctggcctcagaagctgctttgttggcctacttaggtgtttccgccaaggagctgaagaagatttggtggtttaggggccgaatgtaccaccagtttgaaattgcaaaaggaaacggcaaatcgcgcattattaatgcccccgataaacggttgaagtatctgcagcgcaagatagccgcgttgctttatcatctctaccgtgtgagaaacccagtgcacgggttcgtcgccggaaaatctgtgaagaccaatgcgctggcccatctccgcaagcggtttgtgctcaacatcgacctcaaggactttttcccatccattaccgagaacagagtgactggagtcttagaatccttaggcatcgattctagagtcgcatccattatcgggcggctgtgctgtcataattcacatctccctcagggagctcctaccagccctgtgctgtcaaacatgatatgtttccgtctcgacaaggagctacttgcatttgctaaagcatccaggtgcatctacaccagatatgccgatgatattactctgagtagccatcagccgatgactgcccttttcgaggctgttcctccctctgggcattttgcccctgaccaactgaagccagcgttcagaaatatcatcgtaacaaatggcttcgccatcaaccacgataaggctcactacgccgatcagcactcgcggcggacggttactggacttaaaatcaacgagctgctaaacgtggatcgaaggtatgtgcgaaatattagagctgccatatactccgtggaaaatctgggcaaaaagaccgctcagaaaaaatttgagagctcacacggaggcacgagcgatctggggaagcaccttgaagggaaaatcacatggctgaggcacataagagggcagtctgatccagtctttcggagcatcgcagtgaggtttaatactagtttcccggaaaggaaaatcgaagtcacacctaccgctgcagaagtgcgtgatcgcgcagtctgggtagttgagcatttcgagggcgacatggctcaaggctcagcattcttcctcaaagacgtgggtcttgtcacagcagcccactgcgttgcgggggttgaagaggtggaggtctatcaccccagcaagccatctaacgcatttaaggccaaggtgctcaaacgcgacgagcccagggacttagcaattctcgaacacgccattccgcccacagagtacttcgaactggagcaatccaaccatagtgtggtggtgggcgagggactggttgccgtaggatatcccagcttcggccctggtgaccgactgaatgtacgcgacggtaaggtcagttctctgccagtgaagcacggcgtcaaactgatcgaagtgacccagaagttgagccagggcatgtccggtgggcctctactggaccacaatgacgccgtagctggtattatccataaaggagggccaggagaaggcagggacttcgccatactgatcgagatgttgaacgattggctcgctgagtga

SEQ ID NO: 7602 - RNA, 1542 nt, synthetic construct
  source 1..1542: mol_type = other RNA
atggacaatgagactgccctcttgaagtatctaggcgtgtctgccgacgagttaaagaaaatttggtggtttcgagtccgcatgtaccatcaattcgagattgccaagggcaaggataagacacgcactattacagcccctgatgaacgattgaaatatcttcagcgccaaatcgcacccctgctggaccagctgtacagggtacgcaacccagtacatggcttcgtcgatggaaaaagtgttaagacaaatgccctcactcacctgaggaagagatttgtcctaaatattgatctcaagtcctttttcccatcaatcaccgagaaccgggtgattggactgcttgaagctctcggcattgataattgtgtggcctctatcaccgcgagattgtgttgctacaattctcacctgcctcagggcgccccgacatctcctgttctctccaacatgatctgtttccgactggacagagagctgctagcatttgcgaagggaaccaggtgcatatacaccaggtacgccgacgacatcacattcagcagccatcagcccatggctgccctctttgagggttccgcgccacccagcgggcattttagtcctgacttgctgatacccgccctgcgtaatacattcgcatctaacggttttacgatcaacccccacaaggctcattacgcagacagacactcgaggaggatggtcaccgggctgaaggtcaacgagctgctcaacgtggacagacggtatgtacggaacatccgggccgcattgtattcagtggaaaccctgggcaaggccgctgcccagaccaaattcgcaagcaaccacggagggacgagtgacctgggtgcttaccttcagggcaagattacctggcttaggtttatccggggccagtcagaccctgtattccgtgccatagctgttagattcaatgcttccttcccggatcggaaaattgaagttaccccaacagcagacgaggttcgcgacagggcagtgtgggtggtggagtactgcgaaggggaaggagagaagttaaagaccctgcaggggagcggatttttcctcaaagatgtcggccttgtgaccgccgcgcattgcgtggagggagttgacgaggtggaagtgcaccacccttccaaaccagctaataaatttaaggctacggtggtgaaacgcgacaaagaccgagatctggcaatcttggaacatactatacctgcaactgaatatttccaactcaacggagcaactcaagctgtcgctgtgggcgatgaattaactgcggtcggttatcccgggttcggaccaggagatcgggtaaatgtgagagaggggaaggtgagctccctggctactaaacacgccgttgagctgattgaagtcacacagaaactgtcacagggtatgagcggtggccccctgttaaatagtgataacgccgtcgttggcgtgatccacaaagggggcccggatgaagggcgtgattttgccgtgagaatcgagatgctcaacacatggcttgccgagtga

SEQ ID NO: 7603 - RNA, 1584 nt, synthetic construct
  source 1..1584: mol_type = other RNA
atgcctaaccttccccctccgtttggcgcctcaataaggttagctctccccagggagctcgccgacgaaaacgctctgctggtgtacctggggctctctcctaaggagctgaggaaaatttggtggtgccgggcaagaatgtatcaacatttcgatatcgccaaagggcgggataaagtccgcaccatcagcgcccccgataaacggctgaagtacttacagcgaaaactggctgctttgctgacacagatctacagaccacgccacccagtgcatggatttgttgtggggcgatcagtcaagacaaatgccgtggcacacctacagaagagatacattctgaacatcgatgttaaggatttcttcccctctattaccgaaaatagagtggagggactcctccattccctcggtgtggacatgcgggtagccgcaataattaccaggatcgtgtgcaatgagggctgccttccacagggcgctccgactagcccaattctgtctaacatgatctgtttcaccctcgatcgccggctcatggcgttggccagagataacagatgtatttatacccgatatgccgacgatattactttttccagtcaccagcctctcgcgtctctgttcgaaggcgctagcccgtcagccgggcagattacacctgacctgttgagcccagctttgcgcgacaccttcgtccacaatggctttgccctaaatcccgacaaggcccattacgcggaccgccattcccgacgcacagtgactggactgaaggtgaatgaactgctaaacgtagacaggaggtttgtgcgtaatctgagggcagctttacacagtgtcgagactcttgggatcgccgcggcacagcaagtgtatcaggatcgctatggaggcagcgcgtcgcttggcgcacacctagagggcaaaatcggatggctgaggcatatacggggtcagtctgatcctgtgttccgagccctggcattgcgtttcaacgcctgttttcccgatagagaacttcgtttaacacccaccgtgtccgagataagagatagagccgtttggcttgtggagaatgacgagacaatcgagcagggcactgctttttttctggcaggcgccggattggtgactgccgcacactgcgtcgagaaggccacggaactgacgctctaccacccaagtaagcctgctaacaagttcgtcgccaccgttctcaagtgcgacgcacatcgtgaccttgctttattgggtcacgacatcccccctactgagtacttcgaactagaacggtccaccgccgctgtactggtcgggcaagaactcacggcagccggatatccaggcttcggacccggggatcggctcaacgttcggcttggcacagtcaccagcttgcccatcaaaaggggtgttcatatgatagaggtgagtcaaaaactgggacaggggatgtcaggggggcctgttctggacgaaatgctgggtctggtgggcgtaattcaccgcggaggtccaggcgaagctagggactttgctatccacctggacgtcctgaactgttggctggcagaggagtga

SEQ ID NO: 7604 - RNA, 1434 nt, synthetic construct
  source 1..1434: mol_type = other RNA
atgtatcagcaattcgatatcgccaaaagcggcaaaaaggtgagaagcatcagcgctccggacaagcggctgaaacaccttcagcgtcagattgcaccactcctcgactctctgtaccgggtaagacacccggtgcatggcttcgtggctaacaagtcggtcaaaactaacgcccaggcacatttacgcaagcggtttatccttaacctcgaccttaaagatttcttcccctctatcactgagggaaggattggaggtctgctgcaatcgattggtatcgacagtagagttgcggacattattgcccggttatgcaccaatgacggacgcctcccacaaggggcacccacatctcccgtcctgtctaatatgatctgttttaggcaggataagcagttgatgtccttcgctaaggagaataggtgcatatacaccagatatgctgacgacattacattttcaagtgaccagccaatggcagccctgttcgaaagtgcggtgcccagtcctggccgattccctcctgatctcttggtcacccggttgagggcgatttttatggctaacggctttgagatcaacgctgataaaacgcattatgccgataggcatagcaggagaatggtcaccggactgaaggttaacgaactgattaatgtggatcgccggtacgtgcgcaatattagggctgccctatactccgtacgtacactcggggccgaagaggctcagaaaaagtttgaaactaaactgggcgggaagtccaatattggatcccatctggaggggaaaatcgcatggctgagatttatccgcgggcaatctgaccccgttgttcgagccatggccctgcgctttaacgccgccttcccagatcggaagatagatgtggtgccgacgcgagacgaggtgcgagatagggcagtgtgggttgtcgataatgacaccgacatatcacagggctcagcgttcttcttgaagggcgtgggactggtgacagccgcacactgtgctaagggggctaaggaggtagaagtataccaccccagcaaacgttcaaacaagttcaaagccactgtagtcaaacgggacgaacagtttgacctcgccatactgaatcacgagataccaaccaccgagtactatgagcttgagagatctctaacagcagtggccgtgggcgatgaccttactgcaatcgggtatcctgacttcggtcctggtgatggcttgaacgtgagagggggcaaggtcagctccttacctgtgaagaatggagtctccatgatcgaggtgacacagaagctgtcccaggggatgagcggtggtcccctcctagatgacaacgatgccgtcgttggagttacccacaagggcggcccagatgaaggacgagactttgtggtccgcatcgaaatgatcgataaactgtga

SEQ ID NO: 7605 - RNA, 1638 nt, synthetic construct
  source 1..1638: mol_type = other RNA
atgccctctagtagtgcctttggattccctatcgtgtcggttgccattccatgtgaactaaagagtgaggagaagctactggaatacctggctatcagcacgaaagagcttaaatttgtctggtggtatagggagcggatgtatcgcaaatttgagctggggtccaagaaggggaaggtgcgggctattgccgcgcctaataaccggttgaaatatatacagcgcagaatcgccgtgctcctgaatcagatttaccgggtgagaaatcctgtccacgggttcgttaaggaaaagtctgtgaagactaatgccctctctcaccttaagaagaaatacattgtgaacatcgatctcaaggatttctttccttcaattacggaaaaccgagtgatcggagttctgaattccctcggtatcgagcggtccgtgtcccaaatcattgcaaagttttgctgctgtaacggacatttgccgcagggagcacccacttcgcccgtcatatccaatatgatttgctttaagatggacaagagcttaatgagtatggcgaaggaaatgaggttgatctacactagatacgccgatgatattacattctcaggttaccgtcccatgactgtcttgtttgagggggctgccccattccctggcaggttcgaccccaaccagcttgccagcgagttacgacagataatcagtggtaacggctttgtattgaacgccaacaaagcacattatgctgacccaaatatgcgacggatggtgactggcctgaagatcaacgagatcattaacgtggaccgtagatacataaggaacattcgctctgcactgtactcagttcagacaatcggggagacagcagcgcaggataagtatcagattaaatacgggggcagatcatctctcggagcccacctggaaggaaaaataacatggctacgatatatccggggacagtcagacccagtctttagggcgatcgctgtaaggtataacctgtgttttcccaaccggcgaaaaattgaagttattccaacaccggaagaagtcagggaccgcgccgtctgggtcgttgagcactctgagggcgatatggctcaaggctctgcttttttcctgaaaggcgtgggcctcgtcaccgcagctcattgcgtggaagaagccaccggcctccagcaaatcagcctctaccacccaagcaagccgaataatctgttcgccgcaaccgtagtgggtatcgataagcacagagacatagccattctggagcatagtatcccacttaccgagttcttcgagctggaaagctcattcagggtggtgcaggtgggagacaatatgaccgccgtaggattccccggtttcgctaaaggcgacagacttaacgtgagggagggcaagatatccagcctgcctgcaaagagcggtgtccgcctggtggaggtgacacaaaaactgacccagggtatgagcggcgggcccttgttagattccgacaataaagttgtggggatcatccatcgcgggggacctggcgaagggagagactttgctacccacatcggggtactgaatgattggctccgtgagcgccctgaaggcgtttccaaaaaaattgaggaggtcagaggatga

SEQ ID NO: 7606 - RNA, 1368 nt, synthetic construct
  source 1..1368: mol_type = other RNA
atgcccaattttttcggcgactttcatacgcccagagtcaaactgcctgaggagtttagcagcaaggaggcctttcatcagtatcttggactgagtacagctgagctgaagaaaatctggtggtacagagaacgtatgtacaaacagttcccgctcgctaaaaagaacggcaaaaacagactgatttccgcacctgacaagagactcaagttcctccagggcagattacttttactcctaaaccaaatctaccgtgcaaggaatccggtccacggtttcgtcttcgaccggagcgtgaagacgaatgcagaggcccatctgaggaaaaggtacgtgttaaatattgacctgaaggactattttctgtctatcaccgaaaagcgtattgtcggactgctggaaagccttggcattgacactgaggttgcctgcatcgccgcacgactctgttgcttgaatagtaggttgcctcagggggccccaacttctcctatactgtcaaacatgatctgcttccgcctagataagaggctccaaaagttttccaaggaaaacagattcatctatacccggtacgcggacgacataaccctatcctctcagcagcccatgacctcaatgttcaagagtggtactatcgtgtccggatcaattagtcccgacgaccttaatgctactttcgttgatatcatcagcggcaatgggtttcaaataaacccacagaaagtgcactacgctgacaggaattctcgccggattgtgacagggattaagatcaacgagcttctgaacctcgatagacgatacgtgagaaatattagggccgctctgtacagcgtcaacaccctgggccagatcgaagcacagcgcaaatttgaggatgtgcacggaggagattgtgacctctcccggcatttgcgcgggaagataacctggctgggctatgttcgaggacgctccgatccagtatttcggtcaatcgctcgacggttcaatggatgctatcctgatatgaagatagagacagtacccacagccaaggaagtgcgcaatagggctgtctgggtgattgagcacttcgaaggcgattgggcgcaagggaccgcttttttccttaaaggtgtaggtttggtgactgccgcacactgtgtgaaaggggccgagaaaatcaaaatctatcacccagaaaagcggtctaacgaattcgacgtgcatgttgttaaaatcaacgaggacctggatttggccgtactgcaccactcgattcctacaactgaattttacgagtttgatcagacaaccaaggatgtggccgtcggcgatgagctgattgcgctcgggtatccaggcaacccacccgaaaaatga

SEQ ID NO: 7607 - RNA, 1440 nt, synthetic construct
  source 1..1440: mol_type = other RNA
atgtatcataattttaatattgggcaccacggcagaaaattgcgagtgattaacgccccaaacgaccgacttaagtatattcagcgacgcctccttaaggtcatctccggtatttattccgtgcgtgacccagtgcatgcctacgtcgaaggccggagcataaagactaatgccgcaagccacctcaagagcaagtacatcgttaacctcgatttgagtgatttctttccatccattacagaagataggatagttggactaatgaacagtctctgtatcaccccaagagtatcagccatcataggacgcctgtgttgcatggggggatatctgccacagggggctcccaccagccctatgctgtccaatatgatctgctttaggatggatagggatttcctgagcattgctaagagatacaggtacatatatactcggtacgccgacgacattaccatctcctcccggtcaccccttaccaatctgtttgcgtctggcgcacctcccgtaggacacttcgatgcaaacatactttcaaaggatgtcatctccatcatttatactaacggcttcaacataaactctcagaaatgtcattacgctgacaggcatagcagacggatggtgacaggcctcaaagtcaatgagtttgtgaacctggatcgcaaattcattcggaatatccggtctacgctgtactcaatagaaaagtttggtatcgctaaagcgactgatgagttcatcagcaagcacgccgggaaaggaacacttcatgcccacttacgcggtgagattgagtggcacggccacattagggggagaagtgaccccgtgttccgtaaaaatgccgatcgctttaacttgctcttcaaacctaagatcctggtggagcctacatacgaggagatccgtaagttcgccgtctggatcgttgataacaatactgcatgtgatcaggggacatgttttttcgtacatgacatcggcctaatcaccgccgctcactgcgtggaaggagctaccgacatagacgtctacaatccgctgaaccctacgcagaagtacaaggctaatgttcaaaaaatcgacaaacacctggacttagcaattctgtctcactccattcccacatcacagtacaggaacattaaaatcagcaaggtcagagccagtgtgggacaaagtatcattgctgcagggtatcctgattatggcccgggggacagtctgtcgatcagaactggcaccgtgtgctctctgtcaatgaaatccggtgtaggccgagtggaagtgacacagaagttgtcgagcggaatgtctggaggccccctcattgaccgcgacaattgcgtgtttggggtgatccataagggcggttctaccgaggagaaagacatcgcggttgaaatttctgaattaacgaagctggttcatgcatga

SEQ ID NO: 7608 - RNA, 1692 nt, synthetic construct
  source 1..1692: mol_type = other RNA
atgaacggtggggaacacctcgtaccgagtgggtcctatatctttgggagcgggaagccacgaatagggatccccgatgagctgaccaccctgtctaaaatgttggattacctgggcatttccgacaaggaattgctgaaaatccgtttatctaggtcattcatgtactccgagtttacaataccatcccccaagaaagcccgcctgatttcagccccagacgctcggctgaagtttctacagggaaggcttaagagctctttcgaaaagttttaccgcccccgccttagtactcacggtttcgtgtccggacgtagtattattaccaatgcggccattcacgctcgaaagagacatgtgctcagcctcgatctgaaagccttctttccctccataaccgagaatagagtcagaggactgtttcggaacctaggcttcgcaacggacgtgtgtgatgcaattactactatatgttgtcatgctggatatcttccacaaggagctcctacttctccgattatttcaaacctgatctgtttcagcctagatcgcgacttgcattcgtttgcaaaaaagcaaaatctggtgttcactaggtacgccgatgacatttcaatctcaacaaacgggacaccagccggacttttttccgcaacagtcccctctccaggaaagctggacattagtgccttgtcggtcgatttgatcgacgtcgtagttaagaatggattcttcctcaacgaagagaagatcagattcagcagcggctctcaccgaaaaatcgttaccgggctgatcgtcaacgaattccccaatgtgcctcgcacatacatctccaatattagggctattctctttagcatcatgaaagatggctatgcagtcgcagaagccaaatttcgacagaagcggccctctgcgaaacgctccctggagcagtatctccggggcaaattaaaccatctggctaatgttcggggcaaaggtgaccctatctacagatcactcgcagacaagttcaataaagagtttctacctagtctggcaacagaaccaaccccaagggaacggcagagcagcggtatctggattattgaatggcagtataatgaccgtaagatcgataagttgtacggggaggcggaggccaacggacaaggcataatgtccgtcactgaaggtgctcaggggacggcctttttcctggacggtgtgggccttgtatccgctgagcattgcgctccccctgaggagatcgatttagagtttttccgggtatttcaccccagcgcacctaacctcaaattcgaggtgaaggtggcgaagaggtgcaaagtgcgcgacatctgcatcctgaagcacgatgtgcctgagaataaatttgagggcttaaagccgtgccgagtccctgctagaggaggcgacgtggttagagccttcgggttcacggactatcaggtgggcgacgccgtaaccacaagcaggggagaagtgagtcacgtggccacccggtctggggtgaaactgcttaacctgagcttcaagatcggccagggcatgagtggcggtcccataatggataggatggaaagggttgttggcgtcgttcacaagggcgggcctctcgagttgagagattacgccgtgacccttaacgccgtgctctcactgcatgaggaagcctctctgtga

SEQ ID NO: 7609 - RNA, 1608 nt, synthetic construct
  source 1..1608: mol_type = other RNA
atgctctgcataggtcgggaaggagggggagcaccattcacaatgcctaccttgcccaaggccctcggtagcgccaatgacttttatgcttatctaggtgtcggcgctggcgaacgaaaatttttggaaaagcacgccttccataggtataagcgcgtgattgtgccgaaacggagaggaggcacgcgagtacttatggtccctgatcggcggttaaagttcctccagaggaaggcccaccaactgttaaatcagctttaccgcccgaggaccccagtccatggcttcgtgaaacagaagggagctatctccaacgcaaatgaacaccagagaaggccttatctgttcaacatcgacctccgcaactttttcggtgtgatttctagacgacgggtgctgggcatgctgatctccatggggcttcctgatgatgctgccgaggccgtgtgtagcgtctgcttgacagccaatcagctgccccagggggcaccaacttcaccgatcttgtctaacctggtcgcctaccgtctcgaccgagacttaatgaagttcgccaagacttacaggctgaaatacacaagatacgccgacgatattagctttagctcttacgctcctccgctcgctttatttaatgcaggactcccaatcccaggcagagtgaaaagcgatcaacttagtgtcgagctgtccacggtgctcgctaccaatgggtttgagatagcacctgacaaagtttggttcgccggaccaaagtcgcgcaaggaagtgaccgggcttgttgtaaatgagtttacgaacctaaaacggtcattcgtgcggaacgtgcgcgcagctctgtacaagaccgaaaaattgggccttgctgcggcccagtctgcataccagaaaaagtatactactaacgccaccttggagcaggtactgcgcggaagactagagtggatagcgcaagttcgcggtcgcagctttgatccctataggactcttgcaaagagatttaacaacctctttcccaactccccactccctatcctgcccacccatgaggagacagccgaacgtgccgtgtgggttgtcgagttcttcgcggatgaggataactgcgcacagggcactgccttctttctggcgggggttgggctggttactgcccaccacgtgcttgagaagctgccccctggcgcgcatgctgacttgtatcgtccctccggaggcggaaataagttcaaagcaacccccagcaagagatcttgtcctattagagatctgatgatcctcgagcacgatgtgcccaccacagactacctgtccctgccagtggtcacaagtcccgaacagcgagatgacaaaatcgtcgcactgggctttccagactatgggcccggggaccaactaagtaggaggggcggacaaatttacggccgggctacaaaacacggcgttaagttactcgaggtgagtgctattctgtcagatggaatctcgggtgggcctgtggtgaatgaccagcatcaggtaattggcatcgctaaaaaagggggtatagaagaaaggaagcagctggccgtagaggtttcagaactgctgaagctggccgacgagtga

SEQ ID NO: 7610 - RNA, 1455 nt, synthetic construct
  source 1..1455: mol_type = other RNA
atgctgtctgacactgcctattttacctatctgggtgtaggagcaaaggagcggcagttcctggagaagcacgctttctaccgatattcagaagccaccataccaaagcgacgggggggaaccagaacactcctcgtgcccgaacgacggctaaagttcctccagcgccgtactcatttgctgctgacacagttatattccccccgcgctccagttcacgggttcgttgcccacagaggagcaattacaaacgctaacgcccatcaatcacgtccataccttttgaacattgacctccggaactattttggcaccataactcggaggcgagtgctgggcatgcttcagagcatgggtctggacgaggccgtcgcccttgcagtctgttctatttgtatgactcggaatcagctgccacaaggtgcgcctactagcccagtgctgtctaatcttatcgcgtacagtctggatagagatctgatgaaattcgccaaagactataggttcagatacacgaggtacgctgacgacatctctctgtcatcctatgctccgccggtcgccctcttcgagcaaggagtgccaccccccggaaaaatgacagttgaacagctgtccgcttcactgaggagcgtgattacttcaaacgggtttgagattgcgccagaaaaaatctggttcgccggccctaaaagccgcaaggaggtgaccgggctcgtggtgaacgagttcaccaatctgaaacgcacgttcgtgcgcgatctgagggccgcacttcataaggtcgagacgatgggcggtgcagcagcagagaaggacttccaggccagatacaaaacaaccgcttctcttgaaaagattctccgcggcaggttggaatggatcgcccaggtaagaggacgcagcttctcggcctacaggaccttggcgaagagatttaatcaacagtttcccgctagcgcggtgaccatcttacctacttatgctgaaatcgccgagcatgcagtatgggtgattgacttttttaatggcacagtttgcgagcaggggactgccttttttctggagggggtgggcctagtgacagctgatcatgtcttgcagaacctccccgtaggagtcagcgccgaaatctaccgcccatccgggggaggcaagaaatttaaggccacacccagttcccgtaggtgcccttacagagatctggcaattgttgatcacgatataccgaccggcggttacctatccagacctgtgacatccagtcctgagcggcgggacgatgatattatcgccatgggctttcctaattacggccccggggaccagttaagcaaacggcgaggtcacatcattggaagtgctaccaagcacggcgttaagttcatcgaagtcagtgcaatgttgcccgggggaatctctgggggccctatcctcatgatcgctataaggtga

SEQ ID NO: 7611 - RNA, 1581 nt, synthetic construct
  source 1..1581: mol_type = other RNA
atgccaaccgtgcccgctgaactcaaaacggctaacgccctcttcgcacacttaggggttgggtccgccgaacggaagttcctggaacaccacgctttttacagatacactgaggtggccatcccgaagagaagaaaaggcgagcgcaaactgctggttccagagaggaggctcaagttcttgcagcgcgagatgcttaagctgctgtctcagctgtacgtaccccgggaccctgtccatggattcgttgtgggcaggggtgcgctgacgaatgcttccgcccacgaaaaaagaccttatctcctgaacatcgatctgaagaatttttttggagtcatcgcccggagacgggttcgtggaatgcttttgtcattccatcttgaggaggaaatagctgaggcaatatgtgacatttgtactaccaggaatcagctgccacaaggcgcccctacatctcctatgttgagtaatatgatcgcataccgattggaccgggatcttatcaacttctctaagacccacaggctgcggtatactcggtacgcagatgacatctccctgtttagttatacccccccaatggggttattcaatgccgggttacccaactcaggaagggtggccgaagagcagctcagcacaggtctgcgttcagtcttctcgaccaatgggttcgagacagcgcctgaaaaaatttggtatagcggaccagacttccgtaaggaagtaacaggtctgattgtaaatgagttcccgaatgtgaaacgcacattcgtcagaaacctgagaagctcactatacaaggctgagactatgggcatctccgctgccgagaaagattatcaaaagcgatacgggacaacagcctctctgcagcaggtactccgcggcagactagaatggattgcacaggtccgaggccggagttttggcgcctataggactctcgcaaagcgatttaacgcaatatttccagcgagtcccattgctgtgcttccgacctatgatgaggtggcggaacaggctatctgggtcatcgacttttgcgaggacgtggcaggcaagcctgagcccacttgcgcacagggcactgcattttttatagcgaacattggtctggtgaccgcccaccatgtgctcgctgatctccccccaggctacagcgccgtccttcacaggcctagcttaccaggcaagaaattcaaagccacgccaaccaagcgccagtgcccttaccgcgacctgatgattctggaacataacgtgcccgccaccgactacttgtctttatcagccgccacctctcccgagagaaggaacgctcccatcgtggccctagggtttccgagttttaacgctggagatgaactagggacacgcagcggactggtggtggggaatgccacccgacacggggtgaaaatgctcgaggtgtccgcactcttgttgagcggcatctccggaggtcctattgtcaacgatcgcgcccaagttgttgccgtggcacataaaggtggatatgaagaaaataagcaactgggcgtcatcgtttccgagctgattgctcttgctaacgagtga

SEQ ID NO: 7612 - RNA, 1557 nt, synthetic construct
  source 1..1557: mol_type = other RNA
atggcggctcttcctccccaactaacctcagttgcagcccttcatgcgtatcttggagtgggagccggggaagcacgattcctttctcgttatgcgcaccaccggtatcgggcagtgaatatcccaaagcggaggggcggcttccgaaacctgctggtacctgaggataggctgaaattcctccagcgtaagatgctggagctcctcgaaccccggtataagcctcggcctgccgctcatggttttgtagttggccggagtgcaatcacaaatgccaattctcaccaagccagaccgtacctgctcaatctggacctggagaactactttggaaacattacccgcaaccgggttcatggcatgctgcaggctattggattcgccccggaagtggcaagagccatctgccatatctgtatagtgaacaatcagctgccacagggtgctcccaccagccctctattggctaacatggtcagcttcaggctggataaggacttgactcagttcagcaaggctaatagaattagatatacacggtatgccgacgacataacattttcctcgtacgtgcgaccagtggcactgtttagcgagcccttacaggaggcaggcgctctctccgttgaggggctcagtaaggagctgcgactgataatctcaagcaacaactttacaatcaacccagtcaagactcgctacgcggaccgcaaaagcaggaaagaggttactgggctgattgtcaacgagtttaccaacgtgcggagaactttcatcagggatctccgcgcttcactgtacaaaatcgataaattgggactaagtgccgcccaaacttcttacaatgagaagtatggatccgacgccttgctaaaggatgtgcttagagggcgcctggaatggttagcccaggtaagatctaggtctttctatacgtatcgtaccttggcccagaggtacaacaagcattttcctgataatccagcccccattgatccaacaaatgaggaagtcgccaaatccgccatctttgtgatcgaacacttcgatggggacggcgcccaaggcacagctttcttactcgacggggtcggacttgtgaccgccttccacaccctcgacggaatggtaagcgagtgggctgatttgtaccgacctcacgagcccacgaagaagtttagggcgaaagtggggggtaagttctgcaaacacagagacatcgcactgcttgaacacgatattccggcagaagaccaggcttcattgcgccccgcaacaggcgccgagcatgtcaagtcttccatcattgcactcggctacccagaatttgcttcaggtgacggactgagtgaaagaactggtaagatagtggggcgctccacgaaaagtgccgtcaggtacgtcgaggtcgatgccattctgggtgacggcttatccggcggccccatcgtgaatgatcgctacgaggtgattgctctgacccacaaaggggggctcctggaaagcaaacagctgggcgtggacatagtggagattaccaaagttgctgaagcatga

SEQ ID NO: 7613 - RNA, 1554 nt, synthetic construct
  source 1..1554: mol_type = other RNA
atgccaaccctgcccccagaactgatgaccgttcctgctctgtacgcaaagttgggcatcgggggcgcagaggcaaagtttttggctcactatgtcagacatcgctacagggctagccagatccccaaacgtagggggggctatcggacattactggctcctgataatagactgaagtttcatcagcgggagctgctggatttgttgacacccctgtaccgccctaagcctgccgtccacggtttcgtcgcagagcgctccccaatcaccaatgcgaacgcccatcagggaagaccctacctcctgaacctggacatttccaattacttcggcgtaataacaaggaacagagtgcgcggggtgctgattgcagtaggtatgcccgcagctgtggctgacgccgtgtgtaacctcaccgtggtggacaaccagcttccacagggtgcacctacctccccgctcctggcaaacatggtgacgtttaggcttgatcgtgaccttactagctttgccaagacacacagactgcggtacacaaggtacgcggacgacctgacctttagcagctacgttcgacccactgcacttttcgctgaggccgaaccagcaccgggactcattgatatcgccgaactagcccccgtgctatctggcttgattacgggaaataacttcaatcttaacccagtgaaagcccgctactgcgtcagtaaaacccggaaacaagtgaccgggctcgtggttaacgagttcactaatataagacgggattttctgaggaacgtaagatcaagtctctatcgtatggagacactcggcgtggccgatgcagaggcagaataccagtccaagtacgatcccaaagccaaactgcacagcgtggtccgcggcaggctggaatggattgcccaggttcggggcaggtcgttcgagccttatagaatcctggctgggcgattcaatgccttgtatcctgccgccactccattaccaattaaccccactaacgacgagcttttggctaaggccgtatttgtgatcgactatggcaaaggcaagaatatggctcaggggaccgctttctttttagagggagcgggactcgtcacagcgcaccatgtcctggctaaaatgcagtctggatctgccactctataccgagccgatgagcctacaaaaaagtataaggcgcggttctctgcccgcgtttgctctcatcgagatttagccatactggaccacgacgttccagtgtcagagcagacgtttctcaagcaagcggccggaatcgaccggattaagagcaccgtaaccgtcgtcggctatccggaattcggcccgggagatagtcttgttcaaatggaaggaaggatcgtaggtcgcaatactaagtcagctgtgcgatatgtgcaggtggatatgcaggttggtgatgggctatccggggcccccatcatcaatgacagatatgaagtggtggctgtcggccacaaagggggtccttcagagagtaagcaactgggaatagacgtggccgaagtccacgggctctga

SEQ ID NO: 7614 - RNA, 1704 nt, synthetic construct
  source 1..1704: mol_type = other RNA
atgacacgtagggtgaatgccacatttgaccgaatgctgccacaggatgtggccgtagcattcggcgggttgcccgcaattagaaggcgtcgccgccttagtttcatgagacatattcctcagcagctcgcctccgaatctgaactgttggtacatcttggcgtgggtgctgaagagctcgccttcctgaggcgctggacaggatttaaataccggactgtcaagatctcgaaaaggagcggcggagaaaggacgctgctgatccccgacgatcgactgaaatttctccagaagaagatcctagggatactgctgaatctgtacagaccccgcgctccggttcatggattcaccaaagatcgcagtgcgttgacgaacgctaaagcacacgaggggcggcgctttctgttgaacctcgatcttaaggactactttgcttctgtgtccagaaacagagtagtgggacttcttgagaagctgggtattgacgctgccgtggctgacgtcattgcagcattttgcatcttccgcgaccaattaccacagggcgctccaacatcacccatcctcgcaaacatggtgacattccgaatggatcgagagctcatggagtttggccagaagcatcatctcaagtacactcggtacgccgacgatctaacgttcagtagctatcggccgcccaccctgctgttcaaagacggcctacccaaagagggcaagatcacagagaaagctttaagcgatgagatcaggctgataattaattctaacgggttcgacctaaattctgacaaaatttggttctccgcgacccgttcccggaaagaggtcactgggattatcgtaaaccagttccctaatgtgaagaggagcttcattcgagagttgagggttcttctccacaaggccgagactctgggcctgccccagacagaaaaggactatcaaagttttagcggaaaaaacgctcctctggaacaggttctgagaggacgtctcgagtggattagccaaattagaggtagagatttcccgtgttaccagatactcgccacccggttcaatgcgctctatgccaagaagcctttaaggcttccaccaagccaggaggacgtcttgcagaagtcgatatgggtgatcgaatatcacccaaaagaatctgaaaaacgggaatgtctgatcgatatacagggcacctgcttttttctgaagcaggtgggtctagtgaccgctcaccacgtcgtttcagagctgccaaagggaacccggttttccgtgtttaggcctactcacagctggcaaaagtatgaggcttggtcatccgagatcacctgccagtaccgggatctggccatcctgcaccacaatatcccacctcacgccttcctcgagcttgaagcggccaatagtcaagcggtcgatcagactcggatcaaagccctgggatttcccaactttgggcccggggacactttggcacgcatccctggcgaagtgattagaactctgaccaaatctgcagtgaagcaaattgaggtgaccgccgccttaccttctggcatctccggcggacctattatcgatgcagcacagctccgcgttctggcagttgccgtcaaggggggtgccaccgaagacagacaagtcgctgtggccatatcagaattacagacattgttcaaggagcatcccgggtcatga

SEQ ID NO: 7615 - RNA, 1581 nt, synthetic construct
  source 1..1581: mol_type = other RNA
atgccttataatccgtttgtggtgcatagaaagcccaaggtgcctgaagggcttagaaccttgcctgttttcctatccgacctgggcgtctcagagtctgagcttcgtctgatctccgctaaaaaagtggagcagtaccatctcgtttccgtgcggaagaggtctggaggcatgcgcaccctcagtgtccctaacgaaagattaaagtacatccagaagcacacagcaagccttctagccccgttgtaccagccaaggtggtgtgtgcagggcttcgtgaaaggaaggtctgccttgcagaatgcccagaggcatcttggcagaaaacacctggtgaaggtggatctgaaggattatttcaaccaggtaaccgtctcgagggcaaagggggttctgaggtattttgagctcgacgccggtgttattgacgctatcctgaccttttgcacgctgttcggtaaactgccgcaaggagcgccctccagccccttactggccaacatggtaacttttagcttggatcaggaactggttcggtacgctaggacgaatcggcttaagtacacacggtatgcagacgacatagtgttaagctctttctccaagcccagactgctcagaccctccgtgactgccgattattgcaaattaacaatagaggacgtgcaggaggactttgcgaaaattttcagcaaccaggggttcgaactgaacgaggaaaagatgcgatattgcggccaacgcgcatctcgaaccgtcaccggttacactatcaacgagtttgctaatgtccctagggagcacattcgcagaatcagaagtattctaaacgacatcgagaagcgcggttacccactagctcaacggcggttttcggaaacaacacactcaataaaaagcctgaaggctagtttaaaagggcgtctgaattgggtcagttcaacgaaaggcgtgtcagatccagtataccgacgtctggccctgcgcttcaatggcctgtttcctgacgactgtcttgagattgggccagactattccaagctcgcccagctgagcacttgggtgatcgaggcagaacgaaagactaatggcgttccagaagcccagggcaccgctttctttctcaaaggggtgggactggtgtccgcagcgcactgtttgcccggagggtgcaattactcagtcttcaacatcgataatccctctaagacttaccccgcaactatcgctaagacccataaccatattgatctcgccattcttgatcattccatacctgccgaatcttacctcgcgctggagctgagtgatcggcaagccaacctcggcgaagaggtgttctcctggggatatcccgaacacggacctggaaaacgcattacacaaaaaagcggccgcgtcagcagtaaaccacgggtatctggagttgacatgtacgcagtagatatgaagctgtatcagggcacaagtggcgggccaattttgaactcaagctcagccgtgatcggtgtcacccacaagggaggtcacggggaggcccatgatctcgctatcctcatcaaacacctgaaggacttgtga

SEQ ID NO: 7616 - RNA, 936 nt, synthetic construct
  source 1..936: mol_type = other RNA
atgcctacggctatctcggtggcctttgggaaaacccccacaccccccgtcgaatttagtagcatggcagccctgaaaactcatctcaaaatttccgacaaggagcttttggtgatacgcaagcatagatccaagatgtatagccacttcataattcccaagaaaagtggcggcgtcagattcatcgacgctccgaagccccgtctgctatacctgcagagacgcctacttgaagtgcttgtgaagatgcataaaccgaggaacccagtgcacggtttcgttaggaagcgctcggcaatcaccaacgcagaagagcacctgaatcggaaacatgtaatgaacatcgatctgaaggactttttcccaactataacccaggaccgtgtttcttcactgctcagaatcttggggattccatccgatgttcgagcggctatcctcagcatttgctgcgcgaacggaaggcttccacaaggcgccccaactagtccagtatttagcaacatgatttgtcttaggatggacaggcagctgatgggattttgtaaaacccggcgaatcaagtactctcgatatgccgatgatctcactttctcactgtacacagcacctcaccagttattcagtgaatcagttccttctcctggcaagctggccagcagccaaatatcaagggagctcaagagcatcatcctggataatggtttcgtcctcaatgaagacaaattacgctattttgggccctcctccagaaaagaggtgacggggctgattgtctctgacttcgtgaatgtgccccggaaattcgtccggaatattcgcgccacaatttttgatatcgagaagaatggcttccctgccgctcagatcaaattttccaccctgtaccggaagacaaaccctttgtctgagcacttgagaggaaagattgtgtga

SEQ ID NO: 7617 - RNA, 1650 nt, synthetic construct
  source 1..1650: mol_type = other RNA
atggacataggatccctgagatgcgcctatgactacgataagctgggtaccctcttcggggtacctggagccgcactcaaaaagaatctctatagcagccgggggtacactgatttcacaatccctaaaaagtcaggcggagtccgccttatctcagcaccagggagactgcgcaaacagctgcagagaaagctgctccccgtactggatgacgtgtacaaaatgggccccgccgttcatgggttcgccaaaggccggtccgtgcgcactaacgccttaccgcatgagagcaagggcctggtgatcaattttgatctgaaggacttctttccttctattagtttccagaggattaggggcgtctttctagggcacccttttcgactggactggacagtggctaatatcctcgcacagatgtgttcccttgacggcgtaatgcccgccggagctcccacttcaccagttctgagtaacatcatatgcgcgaagctggataaacgtcttagtgccctcgctgcaagactagggggtacgtacaccagatatgctgatgacctgaccttctcgtttgacagacccctggccaaattgtctagcattgctatgatcgatgaggaaggtaagcccgccgtgggggcttcggtaagcgaaatcgtgacctccgaagggttcgccatcaatgtggagaaattcaggatagctgccaaagggtcacgtaaagccgtcaccggactggtggtaaatgagcgggtgaacgtgaagaggtcctggtatttaaaactagagtcagccatttatgctgtcgaaaagttcggtctgaaccctgttgccgccaagatgttcccacaagaagaggtgccaggagtcgcacctgccaggttgttgcgccagctgcacggcaagatttcctacctccggatgatccgcggaaagggtgattggctggccgcagagatggcccatcgattcaatacactgcacgggaacgtgaggttgagggtgcctagcgtggagatgatatctaacccaaaccgacaggtgcggggcgtccatatcgtcgttgcatatgccgccgcagttccagttttcgaccccactgaagaacaaggcaccgcttttacgaccccatccgggctgttagtgactgcagctcacgtgctcgagcatgaagacacaaagacccttctaccatttgtttacgtaatgaacgagcgcaaactttctcttgtcgcttgtgatgtgttagcggtggattgggatcgggacattgcaatcttgcgcgtgcgtgacgacaaaaatagagtctctgcagaacgaagtagatatggcttgggccaggaccctcaccagggtgagactttgattagcatcggctaccccgactacgcaaggggacagcacggctctgcgtttgagacacccgtcacaaaactgtttaagattaaggttcctggtggccaggagattctcaaggctcgagtgggcggaccaatccaaggaggaatgagtggcgggccggctattgattccaactttgatgtgcggggggtgatccttaagggagtcgcgaatcccggaggtgtgccggagattatagcgatcagcgaagtcaggcgggttgctcaagccaatggcctgaacctctga

SEQ ID NO: 7618 - RNA, 1653 nt, synthetic construct
  source 1..1653: mol_type = other RNA
atggacatcgagagcctacgttgcgtgcactcctatgactcacttggagccctcttcggcgttcccggtagtaccttgaagaacaatttgtacaaatcccgcggttacacggatttcacaattccaaaaaaaagtggcggcgtgaggcttatcagcgccccaggaagactgcggaaaaagctgcaacacaagctgctcccagtattgtattcggcttacaaaatgggccctaacgtgcacgggttcgccaaaggaagaaacgtacgaactaacgctctcccccatgcgactaggaaggttgtgataaatttcgacctgaaagatttcttcagcagcatctcttttcaacgtatacgtggcgtgtttcttggtacccccctcagacttgactggtccgtcgccaatatcctggcacagatttgttccctcgatggagtgatgcccgctggagctcctacgtctccggttctttcaaacattatttgcgcaaagcttgacaagcggttgtctgccttagcagcccgcttgggagggtcttacactcggtacgcggacgatcttaccttctccttcgaccgcccgttaacccaactgcggagcgtcgccatcctggatgacgaaggtaaacccctggtgggcgcctcgatctcagagattgtgacatcagaaggcttttccattaatatggagaagctgcgcattgccacgaaaggatctcggaagaccgtcacaggtcttgtggtcaacgagaaggttaacgtgaagaggccatggtattttgcactcgagagcacaatctatgccatggagaaattcggagtcgatgaagtagcagctcagaagttccccgaagagaagacccctggagtggcacctgctcgcctcctaagacagattcatgggaaagtttcttacctgtccatggtgcgcgggaaaggggattggttggcctcagatatagcccataggtttaataagctgcacgaaacactgcagttacgcgtccctagcgttgagctgatctcacagctggttcgaagagcacggggggtgcatatcgtgaacgccagtactgaccctctgtttgtcttcgacctcggccagagtcagggtacagcatttactacctcaagcggaattatggtgacagccgcgcacgttgtggagcgagatgacaccaagacaatcttgccctttgtgtatgtaatgaacgagcgaaggctggccctcgtcatatgtgacgtcatagccatcgactggaatcgagacatcgctctgctgagggtgaggaatgacaagcacagactcgacctggaacggtctaggtaccgtctaggcagagatcctaatcaaggcgataacctggtcactgtaggctatccggattacacccggggggagcatgctaccgctgtcaatagccccgtaaccagagtctttaagaataaggctactagtggagcgcacgacatcagaaaggctagggtggatgggccaattcagtctgggatgagcgggggcccagcactggattccaaatttgaagttcgcggcgtcgtgcacaaaggcgtgttaaacccaggcggggtggcggagattatcgctatctccgaagtgctccgggttgcacaggccaacggtctgagtgtgtga

SEQ ID NO: 7619 - RNA, 1557 nt, synthetic construct
  source 1..1557: mol_type = other RNA
atggggatcagggcattgcgtttcccaaggaatcccggtggagtgagagccatttcggcccctggcagattgagaaaaacgctgcagagacaactgctccccgtactctatgacgcgtataagatgggacccaacgtacatggattcgcacgtgggcgctctgtcaggactaacgcacaaccccacgccgctcgcaacgtcgtgatcaacttcgacctgaaggactttttcccttccatttcattccagcggatccgcggggtgtttttagccaacccgatgcggttagattggtccgtggccaacattttggcacagatgtgcagcctcgacggtgtaatgcccgcaggagctcccacatctccggtgctatcaaacatcatatgcgccaagctcgataagaggcttagcgctttggctgcacggctgggaggctcctacacaaggtacgctgatgacttgacttttagtttcgaccgacctttagcacagctgcgctccattgccatgctcgatgaagagggaaaagctgtcgtaggcgcttcgattagtgagattgtcaaatccgaaggcttctctatcaatatggacaagtttcggatcagcgttaaaggttctagaaagaccgtgaccggtctagtcgtcaatgagaaggttaacgtgaaacgaagctggtacctgaagttggagagcaccatctatgccatggataaattcggcatcccagctgtcgccgcccaggtgtttccagatgagaaaatcccagctgttgcatcagccaagctgctgagacagatccacgggaaagtttcctatctgtcaatgatacgcggcaaaggtgactggcttgccgccgatattgctcaccggtttaatggcctgcacggcgaggcccagcttagggttccaagcgttgaactgatctctcaagctggcaggagagccaggggggtgcatattgtgaacgcctctaccgaggaactgctggtgttcgaccttgcagcgagtcagggaacggcatttacaatccctagcggcctgatggtgactgcggctcacgtagtagagaaggatgacactaaaaccgtgctgccgcacgtctacatcatgaatgagcggcgaaaagccctggcggcctgtgatgtgctggcagtggactgggacagagatatcgcaatacttcgagttaatgatgaaaagcaccgcctcgacctggagagatcacggtataagcttggcttagaccctgctcagggtgatcatctggtcacagtcggctaccctgattacaccctaggtgagagggccacagcggtgaattcccccgtgagtcgaatttttaagtccaaggccgcaactcatggggccccagacgtgaataaagcccgcgttgacgggcccatacaaggagggatgtctggcgggcctgcgctcgatagcaagttcgaagtgcggggggtgatacacaagggagtcctcaacccaggaggcgtggctgaaattattgctgtgagtgaagtgcgccgtgttgccctcacccatgggctcaaggtctga

SEQ ID NO: 7620 - RNA, 1623 nt, synthetic construct
  source 1..1623: mol_type = other RNA
atgctaactatcaagaacttacagggcgttcattcttatggggcactggctcctttattcagtgtcacacctgcggccttgaaggcccagctgtattcagctaaaggatacagttcattcaacatccccaagaaatctggggggttccggcttattcacgctcccacgaaaattcgcaagcagcttcagcgggccctgcttcctgtgctgaacgaggcatataaagccccttccttcgtgcatggcttcgtcgacaagcggagcgtcaggagcaatgcccagccccatgtacaggctcgcaccgtggtgaatgtcgatctggccgacttcttccagtctatctctttcaaaagaattcgaggggtatttctggcgccaccattccgatttgattggactatttctaacatcctagcccagatatgctgttatggcggtgctctgccagccggtggtgtgacaagtcctaccttgtccaacatgatctgtgcacgtatggacaagaaattagtcaggctgtcaagaaggttggggggcgagtactcaaggtatgctgatgacctgacatttagctttcggaggcctttggcccaactttcctcaattgtggctgtcgacgcatcggggaattacctcccaggagctgccctgttggagatcttcaatgccgaaggcttttcgctcaatccggtgaagtttagagttgcaactggcgccgctcggaagctcgtgactggagtagtcgtgaaccataggacaaacgttccccgtaaatggctcagagccctggagtccaaaatctacgctattacccgatttggtgtcggggctatcgccgcccaggaattcccagatgttgcccccgaaagcgcaagatatcggcttctaaggcagttgcacgggcgaatatcctacctgcgtatgatcaggggagcaggggactgggttgcaagcgacctggcctacaggtttaacaaggcccacggcgagaatcaactcagagtgccctgcacagagctgatatctaacccccagcgggttccgagaggagtgtgggtcctcggctgtagtgcatccactatgcatttctttgatcctcaaaatcaggggacggcctttgtgacctccagcggcctcttagttaccgcggcccacgtactgctgctggacagtggcgatgtggcgggctacatttatatcatcaatgagcgcgcaaagaaactgcgccgctgtgaactgcttgccattgacgtggaggccgacgtggccatcctgaaagctagcgagcacaatctcgaagtagaacgatctcgcttttctttgggcaacgatccgcagtcccaagatagcgttgtagcggtgggatacagtgattacggatctggtgacaccgctaccatgctccaggctagcgtgcagaaggtgttcaagttcaactccatcaagaaagctcaagtgggcgcatttattagcggtggtatgagcggagggccagttgtcgatagtgcgtgcagagtgcggggactcgtgcacaagggagtgtcctccgctgcaggcgtctcggaaatcatatgcgtcgaggcaataattcgcgtggccgtgtcaaatagcctgtcactttga

SEQ ID NO: 7621 - RNA, 1605 nt, synthetic construct
  source 1..1605: mol_type = other RNA
tccgcccacacccatgagtctctcgcagcagctctgggtttagcgcctgcgggaatgttgaaagccctctataagagaaaggggtacacggtgtggctgatcccaaaaaaaaacggccagcaccgtaccattgctagcccatcgaggcttcggaggcacatacaaattcagctcaaggccgtgctggagcaggtttacaaacccgacgctagtgttcacggctttctgcagggccactctatcgtgacaaatgccaaacctcatgtccgccgccgcacaatcataaacttggacattaaggactgtttcgggtctatctccttttttcgtgtgaggggcttgctcctcaaagcgcctttcaatctgccctgggtgaccgccaatatactggctcaagccaccacattcgaaaatgcattgccacctggaggcatcacgagccccattcttgcgaatattgtgatggccggacttgataagcgcctgagccggatgatgattagatatggaggccgatacaccagatatgccgatgatcttacattttcttttccggcaccccctggacgcttgggcgaatttgtggaaaagtccgccgtcgggaattaccaaatcgcgccaaaactgagcgctgtactgaaagaggaaggattcgaatcaaaccagctgaagttccgatgcctgactggcgcctcttcaaagcgagtgactggcctcaaagtcagcgataaggtcaatttacccaggcggtggattagagagctggactgtaaaatctatgcaatggagaaattcggggtgaacgcagtggctgctgctgatcacccagattccccagttgaggctgcaaaggccaggctactccgccacatacatggtaagattgctttcgccagcatggtgcgaggacgggccgattttatcactgcagccatggcaaaccggctcaatcagctgcatgaacggagtgacctgtatctaagtgacatcgaaatcatttcgaggggtgaccgagcctcaagagccgtttgggtggtaactgctgcccccgagggggaagaccactacttcgcccctgagggaaacgggactgccttttgcataagggggggccttttagtcaccgccgctcatgttattgaagatcatgaggggaagaccaaggctccataccctgtagtgtgtgtgaggagagccgaccaacccggtacctatctgggttgcaatgtaatcgcattcgaccgggaccgggacttggcagtcctccagcttcttgtcccgcgcccagatctgaccagattccagtttgcgttaggcaaggtacctgtcacagatgagtccatgacttcaattggatttcccaactacgttgtgggcaaccgctccgctacagaagtgcacgtggttcaggatgtcagaccgcggtacggggtcctcaggatcagagctacgggtaacattatggggggagcaagtggcgggcccttgctgaataaaaagttcgaggtggccggcatcacacataagggactgctaatgaagtgggaggcaaacgagttcatcagcgtgggtgagctgcgtactgttctgaacgaaatcaaatga

SEQ ID NO: 7622 - RNA, 1629 nt, synthetic construct
  source 1..1629: mol_type = other RNA
atggttgacattactttagtaccgcctaggcagagcttgcgggatattactacgacccgcgagttagctgccttgatgggggtgagttactctcgggaattcgcttacattctgtataggtttcccccaactggaagataccgcagctttaacattgcaaaaaaatccggcggagacagacagattaatgctccaattcgcctcctgaagaagctgcagaggaggctggtaccgctgctggcagagatctatgatgccccaccctgcgttagaggattccaggggggtcagtcaatcctgactaatgcgagcgaccacgtgggacagcgatacgtcctgaacttagatcttaatgatttcttccccagcatccacttcaaaagagtttccggcattctgcagaccaggagatacagcctgagtcgggatgtggctgtcgctatcgcccaaatcgcttgtcatggggggcaactccccataggcgctcctacatccggcatcctggctaacatggtctgcggacccctggactcaagcctcctgcgcttggccaaagcccataaactccgctatacacgctatgccgatgacattaccttctccacgagtaacagccggcacttaaatgaggccacagggatacatgtcggtgatagatttgtgatacgaggcacagaggaactgtccgactcgtttcacgccctgttcacacagaatggcttctcgctgaatccgaataaggcagtcttgatgtcaaggagagtgagacaatccgtcaccgggctcactgttaatagaaagaccaacgtgagtaaggagttttatcggaatctcaaaagcagtattaacgctatcgagaactacggctacgaggcagcgcagtcagtatatatcgatcgtttccgaaagcccaatgagtctctccagcttagggaaaacttgcttggccgcctggcctttctgggacacgtgctaaactactccgagcgctacaacaaacttgcccggaggacagcgcggctttttgaggagcggtctatcccacgccctcgagatgaccgggaaaaggccatatacgtgttgactaatgagcaggacctgatgatgggcaccgcctttcacaccggaggcggaaagttcttgacagctgcacacattttcgcagatcggcctggggtgctacgctgtgaactcgcctgcccacctcattatcctgaacagatcaccgcggtggtttctcatatcgatcgtgaaagggacatcgccctggttagagctacgggaacttttgatctttcccgtcactctattcctacggacggtaagtccgtgaggattggggacgatgtatttgcgtgtggctttccacaatatgaagacggtaacagcatctcaaccatctctactcgaattaccgccgaacgatacatctcagggaaccaacgtctcgaggtcgacaggccactcagtcacggctctagtggagggcccgtgttctccagggacggtttccttgtgggtcagataaacaccggccccagaataggcgaagactactctcccatgagctatacaatcacaccatttcggcctcatgcagacctagtggccacctggctggcagcatga

SEQ ID NO: 7623 - RNA, 1584 nt, synthetic construct
  source 1..1584: mol_type = other RNA
atgcgacagctggctctgctccttaatgtcgactacgggaaaacactaagtttcgccctctatcgcgcaaatcagaccagcgcttaccgcgcattttctatacctaagagggatggctcagagcgcataattacagcccccaagcgcgcgcgtaaatcattgcaacagtcactcctcccactgcttgagcagttatacgaccccgccccctgtgtccatggagcagtgaagggacgttctgtgaaaaccaatgccgcaccccacgtggcaagaagatacatcctaaacgtcgatatcgatgacttttttcctactatccatttcaaacgagtggtgggcatactgtccagctcacgatacggtgtacatccaaccgtggccactgccgtggctcagatatgctgtcatcaaggtcggctgcctacaggagcgccaactagtcccatcttagccaacatggtgtgcggcaagctggactccgcccttcttaggttggcaaagaagaataagttgcggtatacccggtactatgacgacattactctgagtagtagcacatctggacatctgaccgcggccactggaattgacctcagctccgaccatattgctcatggagctgatcggctgtctgatgagttcaaggatatcttcacaaataatgggttctccatcaacagcaaaaaggtatggggcaccacacggaaggtacgacaacaggtgacaggtctggtggtcaataagaaacacaacgtacccatcgccttcgtgagaagcaccagggcgatgattcactctatcgaaaaaatgggcatcaagagtgcacaggaaaagtttctgcgctcccgtaaagacaacgattcacttgatttggaatcccacatttccggaaggctggcttatattggctacattactgactacggccttagatacacaacgctcgccaagagatttatggctgtttctcagggcactaagctccctctgccattattggagagggagcggtctgtgtacgtggcagtttctaaaccgggtaacgaacaggcaactgctttccacgtcggccacgggttctttgtcaccgcagcccacctcgtggatcctaataagaagccgattttcatcctggtccacagccctgactattatgagagcccaattgctaccaaaatcgttcacatcaactatgccaccgacgttgctctcctaaagaacgtgggcgccgttgccgttaacgataggccggccataaaattgacctcccgccagagttcgagaggcgaccaagtagaggcgtacgggttcgaaaattatatccccgggaacaaactgggcgtggtcaaaacagagatttcgagcgtgaggcagctggatggccagacgagacactcagtcagcgctccttggccccatgggatgtccggaggtcccgtttttgatacgcagggagtgtttctcggtatcgttttttcagggcctctgtacggggaaaaaatcagtccatatgggaccgcctttacgccaagcaacttattcgcagctgaactggagcagtggctgattgaccaagcctcctga

SEQ ID NO: 7624 - RNA, 1710 nt, synthetic construct
  source 1..1710: mol_type = other RNA
atgcagaccaaagacgacctcgcaaacgctctgggcatttccaagtcaaaactgacatatttcgcctatgccgtgtctgacaaaaggaagtacgtgtctttttacgtgaagaagcgcagtggcggcaaaagggtaatccatgctccaaaccgcggattaaaagccattcagcgatctctcgccatattactgtccgagatttatcagccttccaatccgcactgtaaccatggctttggtcgcaatagggacataattacaaacgcccagagtcatattggtcgaagatacctttttaagtgcgacctgaaggacttttacccaagtataaacggagcacgtattttcggggtcctaaccgctgctccattcaattttagcgacgaggtggcgcacctgattgctatgctgtcgaccaaggacggagcactgcctcagggagccccaactagccctgtcctttccaatatcatcatcagaaaactcgacaggaagatgatgaacttcgccaaaagctcagggggcctttatactagatacgccgacgacattactatctcgtatcggaccatttctatgactaggtcagcaatcgattctgatggcaatatctcagaccgtctccggcatataatcgagcacgaggatttcacattgaatgagagcaaaacacggcttctgaccaaacggaatagacaaatcgttacaggcgtcgttattaacgaaaaattgaacgtgaagcgagggtacataagagatctgcgcaatctgatctatatcctagtaaggtacggagaaagcgacgctgtaaatgcatataacaaacaccacctgtttgataaatctgccaaagacatcaagagagtcattgaaggtcgcattaagtttctggagcgggtgagagggagagaggacgccgtggttctcaagttgatcggaatgtatcagcaacacgataaggggtttcgaacagataaggcccctccctacgatgacaataaaatcgagacgtttaaggttaggctgcttgccgagggtaaaaccgactataagcacctccagatagcattcgagtttttcgcggagtcaaacctgtacccctccctcgacctcaacctcgaacctcacccggacattgaaggtatcaaacatctggaagctcatgtgaaagtgctggaaaaggtgactctggagcacctgcatatagcgatctacgacagcgatgacaagacaataaatgaaaggtacgcaaacgggcccaaacagctcggcagcgatttatacggattcaccttgccccgcccagggcatttaccagccgatcaacccttttgcatcgagatgctatatacccccaaagaccttaccacgccggatgaaaacgggcggcggattttcttgatcgatgagttcgacagaaatactaaccaccacaaacaggataagcgtattacaaccaataacaaatcctgggacaagttgatcatcgatgataaagtcttccggctggatgaaaatcacaacattgagagcatcaacttgagtaaggctgccttcgctagttttattgaaaagcgaaagaccgcgggcgatccccctgatctgcatgctttcaaggcaatcttcgacatgattgataagattgcccgcacttactatggcaagaatacttccgagcttggagaaaagatagatatcatcaagacgtga

SEQ ID NO: 7625 - RNA, 1668 nt, synthetic construct
  source 1..1668: mol_type = other RNA
atgaagactacaaaagagctggcgcaacacttagggatagagttgaaaaccctgatgttctacgcttttgcattacctgatacgaagaagtactaccattttgagatcaaaaagcggaacggcgactctagacgaatcgatgctcctataattaccatcaagaacattcaatcctccttgagcctgcttctccagaatgagtatgaaaagagcgcccctaagtccgtctatggctttaggcctggtcgaggcatcataaagaacgctagtgctcatcttaataaacgtgtgacaatcaaagtggatctcaaggattactttaactcaattaccggaggcatgattgtcgagacactgaccagtagaccattcgggatggataaacaggtggccagggtaatagccggcctgtgtactatcggcggacggctacctcagggagcaccaaccagcccagtgctggccaacatcattactagaacactcgacatcaaactgatttcgtttgctcataaaacacgaggtacctacacaaggtatgccgatgacctcacattctcatactcccacgagaatactgcacgtcagtgcgccatctactctgaggacgggatcgtgctgaacgcggagattatcaaacatatagaaagcaaagggttcaccgttaacagcaacaagctccggtataaaaagtcaacatctagacagatggttaccgggatcattaccaataacaaaatcccgggacttccacgcgaatacatcagggaaactaaacttctgattcacatcctgctgaagtacggtgaaaaggaagcagccgaagcatatcggcggaaatacgctcaaaatcgctatgggcaccgcaataatctggatatttctgctatcgtcaggggccgcttggagtacataaagtccgttaaaggtgtcaaaagctcggcgtattgtaaactggccctcagatataaggcattcaacccccagtataaattcgaggaagaggagcaagccgtgtttaatccggaagagatcattattctatgtgagggaaagacggactacaagcatttgagcgccgcactagctcacttccagcgcaatggacaatttaacagtctgaagttggatctgaccgacaaagaacgggggggctacgacggccttcagaaacagatagatgccctgctgaaggtgaaactgaggcagaagcacattgccattttcgacgctgatgttccttctatcagcaagaaatattatgaccccaatgacctctataaggtccatgagaacctgtttgtaattataacccccagaccagatcatgtggaatccggagagaacttttgcatcgaaatgctctacaaggacaaggatttaaagcgcgtctccagtgaggggagaaggatcttcctcagcaatgaattcgacgcgaagacttcaaagcacaaaaaggagccctactatgtgcaggaccgaattaaggataagcttattgtggaaagtccagtgtaccggttcacggatgagggtgagtcactcaattattgccgttccaaagacgacttcgccaaagagatcgaagcatgccacatgactcagcccatcgacttttctggctttttgcccttattcaagaagatctacgaagtacactcttcatga

SEQ ID NO: 7626 - RNA, 1230 nt, synthetic construct
  source 1..1230: mol_type = other RNA
atggttttttcaccctcccgacccgcagagggatccaatagctttatgagtccatgtattacagtgtatcacgacgggattggttctgagtcacctcggcgtttcggcaagttttacccaaaagttgtcgaagccgtcgcacgcactcttcacgtgatgcccaaagtggctccatgtctccgacctcaatgggccgatattcctaatcagagattctcccaaacaattaagagcctcagctccgtgcaggacttggcccggttttgggatctgcctgttaagcagctgaattatcatgcgtatcacgcaaccgatgcttctgagtaccacaacttcagcattacacgccggaatggcaggaaaagaaaaatcagtgctcctaatcggtcgctaaagtacatccaacgtattatccatgagacactgtcaaagctatattggcccgataccacggtacacggattcgtttcgcagagatccaccatcaccaacgccaagacccacctggcacgtaaatacgtcctgaacgctgacttgaaagattttttccagactatcaccaggcctagaataattgcgcggttaaaggtggctccttacgaacttcagcccccggtggccgtgctcataggcttcctggctactgatggagacggtcaactgccgcagggctctccctgtagtccagtcatagctaacatcatggccgcgagcatggacactcagcttaaggaactgtgcaaaaaacttcgctgcacatacacaagatacgccgatgacctgactatttctacggactgcgaaccgttcccacctgagatcgcccggtacccatctgcagccggaaccgtccaggtagtgttgggcgatagcttcctggacatcattgagaataacggatttcagataaaccacatgaagagccggctgcagaaccattggacccgccaaatctgcactggtttagtagtgaacagggagaaactctccctgccccgcagttacaaacgaaggctgagggctttgatccacaattggaagtcattagggtgggaaaaggccgcaaaaagaatgcacgagaaggaatatcgccccctcttccataatcgagatagatttgtccatcatgtgtatggcaggattaactacatgaggatgatctatggggtggactatatcggggcaaagaagctcctctctgccctggaggaaatcccaaaggaccagtga

SEQ ID NO: 7627 - RNA, 1068 nt, synthetic construct
  source 1..1068: mol_type = other RNA
atgacaactgggtcttcaagtatatttacgcccaacatcttcagcgtgaattcttgtgcaaaactcgcttcgctcctgaacacaaccgagagcaggttagaaagtctcgtggaccaggcaggaaactatcggagtttccgtatacctaagaaagacggcaccacccggcttattcaggctccccaaaacgaattgaagaagattcaatcccagctcagcgaaatgctgctgtgcgcctgggagccatcccctttctcctatgggtttcttcacagtagaagtatcgtctccaacgcgagagagcatttaggtaaacgctgggtgttgaatgttgaccttaaagacttctttccatcaatcacttcgcagcagattaaaaaagctctggttagtgccccatgtgatatgaagccagaggtcgccgatctgatcgcgaggatcgcatgcaacaataacaccctgcctcagggctcaccatctagccccatactgtctgatatagtggcctcccctctagatgactccctggctagcctcgcccagtctagagactgcacttactcacggtacgccgatgatatcacaatctctacctcccagaatttgttccctgtggaaatcgcccgccccattggccgccagatcgtactgggagccccgatcaaggaccccattattcgccatggctttaaaatcaacatgaggaaggtcagccttaattccaattcacaccatcaagaggtaacgggggtagtggtgaatgagaagaccaacgtgcgacggcagtatatctctcagctacggagcattttgtataattgtctggaatcaggtgtgtaccctcaagctctgcgttacattaagagaaataggcacaaaacacccgcagcagttatcgaaagaatggatgacattgcttatattgagcactggttcagcatggttctcaaaggaaaggtcgagtacatccgaatggtcaagggcaatgattcccccactttttttatgatggccgacaggtacaacagcgtgttcggaagcacattcaacataccgccaaagtcttga

SEQ ID NO: 7628 - RNA, 1101 nt, synthetic construct
  source 1..1101: mol_type = other RNA
atggaagaacacttgtctacccatctgcgaacgggacaggatgtgcagaccctgaccaggttcctcaacgccatgctgcttcggcgcgccgagaaagatggctggacaccgtggagatggcaggaacgccagattgacgcaatgctcacggaccctagctggttctatcgttcgttcacaatacccaagaaatccgggggcctgaggcacatcgatgctccgaaacggacactgaagctggtccaatgggcactggtccctctcttctctgaaatgtttactcctagctctcaagtgtacggattcgttaagggacgtggaatcgtggataacgcgtccgtccacttaggccagtctgcagtacttaatgtggatattcaggggttcttcccctcagtgagcagggcaaggattgaggccatcctcaaggacggtccagtgcttagactcagtgagtacatggcgcgttcaattgcccgactctgcactttacatggcggtcttccccagggcagtcctgcttccgcagttctcactaatctggtcaccgtgcgcttagatgcccggttggctggcctagctgagcagttcgggtgtcgctactccagatacgtggacgatataaccctgagcgcaagcagtagagccgctctggaccgagctctccccaagctagaaatgatactgctatcagagggctttgccttgaacacaaacaagactaggatccaaaccctgtccatgcgcagagaagtgaccgggcttgtcctttccggtgaaagaatcggggtgccagcggtaaatgtgcctcggccatataggcgccaggttcgcgccatgctgcaccactggcggaaacacggtatctctgaggcggccgctagaaatggctttgatggcgaccatggagttcgaccagacttggcctttgtgaggcaattgcaggggaggattgcccatctgcggcatgttaaccccacaccagaagtcgagagattttataccgacctgagcgacctgctggtaagtgagggatttcggacaagccccgacactgacttggagtgttgcgcagatctcgagtcagctaaagccatctga

SEQ ID NO: 7629 - RNA, 966 nt, synthetic construct
  source 1..966: mol_type = other RNA
atgactccatttgaagaggtgacgcagtttatcaatgatgggttaagtgtcctcaaagaagccgccccaaagaagcaccgggaagtgttcgaagtttctctcgatcaggtattcggggtcttcaaaaatctcgacacctcatacatcgcattcgagatccccaaaaaatcgggcgagatgcggcaaatagaggcacctaaccggaagttgaaatggatgcagaagggtctgaaggcccagctggagacacttttcgaggctgagccaggagctcacggctttgtgcctgaacggtcaatccagagcaacgcgggggtgcatgtgggccaacgttacgtccttaatctcgatatcgcagggtttttcccttccgttaaaagaggacgggtgcagacagtactgcagttggagcctataggcctcagcaagccggctgcgcgaatcctcgcacagttctgtaccaggaatagagctttaccgcagggcgccccaacatctcccaccttaacaaacctggtctgcatgcgtctggaccgcaagctggagaaactagcccgccattaccgctgcagatatagtaggtacgcggacgatattaccatctcaggtcccagcaaggaccttatgtatcacctgctgaaaaggataactctgattctgaagactgagggttttgaagtgcaagagtccaagactaggattctgcccacgagccagcggcaggaagttacaggattgtctgtgcatgcctttgttaactccccccgcacctataggcgccacttgcgagctaccctgcacacgtggcagtccagaggaatggaaaccgctatggaagcactgcagattactgacaaggcacagtttattgctgtcattagaggccgactacaacatgcccagcatactaacaatacagccgaggtgcaaagaatgagggccaccttccaccaacttatcgcctga

SEQ ID NO: 7630 - RNA, 1665 nt, synthetic construct
  source 1..1665: mol_type = other RNA
atgtcactaaataaatgcaacacccttagcgacctggccctccatctgggcatcagcaccagtcgccttagatggttgttataccataagcagtctgatctgtatgacagcttccagatacctaaacacaacggcgtgagtaggaccatcgatgctccatgtatgtccctgaaggatgtccagaatcgcatcctcaacagtcttgcaacttactacaaacccccaagatgtgcccatggcttcatagactctaagtccattatcaccaatgcaaaattacacgttcggaagaagctgatacttcggatcgacttggaggattactttccatcaattcacattgggaggattcagggactgctgaaaaagggactggggtgtaacccaacaatcagctgggcaatttccaggctgtgcactctcgactccgttctaccccagggtgctcctacaagtcccctgatcgctaacatgataaccaagcgactcgaccatcagctcgccagctttgcctcgtcctactcctgccgctacacgaggtacgccgacgacattacgatttctacaaccaaaaaggcatttccgcgtagaatcctgaagcggagcgaactgtcccggttggatatagaagacctggccgacgaaatgatcgcaatcattacagagaatggattccacatcaacgagtctaaactccggctctatcactgcaaccagaggcagaccgtgacaggcctcaccgtgaatcagaaagttaatttgcctaggaagcgcgagaagcaagttagagcgatgatccatgattgggagactaatggcctgtctaatgccgctaagaaatacatcagccgctacgattataagaaacgacctgataacactagcagcggactcttgtttaaaaaagtggtacttgggagactgtcatatatcagaatgatcaagggccccgacgattggatcgtgcaaaagtacgcgcacaggctctctttgcttgacagtgaattctttgaacaatatgagagcaaatggaaggtcatagtgcgtgctttccaggccattgagtgtattcgacttatcgaggtggaatatagtaagaatggcgtggaatactattctcaagggacgggtgtatatatcaagaacataggcctgctgacatgttatcacgtgctggatcccgatttcaccggaacgacttcatcgaatattgacgtctcacttgtgcaagaaaaattaatctctgggaagctcatttactctaagaaagagctgggggccggggtcttactaaaggccgataaggactgcgacctggcgttgctcaaagtggacaacgaccgtcctaactccattaccctgtcaagtaatgatccaatcttaggagagagcattattactctgggctacccgaattatacacctggtagatctgctcacgtacagaatacttcaattgggagtcagaaaatgtacatgggaaagacacacttcactatcagcgatgatattttcaagggtatgtcaggcggacccgtcctgaactccaactatcagctggtgggtctgatgatcgtcggcaacgagatcacatgcaccaaatacaaacggtccgaatcctcctttatagttctaagccatattgtcgagtttttgcgcaagtga

SEQ ID NO: 7631 - RNA, 1641 nt, synthetic construct
  source 1..1641: mol_type = other RNA
atgggctgggtggtttccttacatgacaaacttcttatcctagggttaaccaataccatcaaaggagtaaaggatccaatacctgatctgccaaggatggagccggagccgtataaggcaggaaagaaacttaaatgggacaacaagaaactggagaaccacagtcaggcctcgaaagaagagattattgacatctgtgagaagatcatcaacaaggatatcgtgattacgtctgctaacgatgtcgcaaatatactggaggttcccgtgggtcagctgctctacattctgtatcataagaaagggaattaccgccagttcgacatagagaagaaggggggcggttctcgtacaattagtgcacctcagggcggaatggctattttgcaagaaaaactgaagcccattatagaatacttctaccgacctaagaaaagtgcgcacggcttcattattggcaaaagcatctataccaatgctgcaaaccatactaagaaacgatatgtcgtcaatattgatctggaagggtatttcgattcggtgacatttgcaagggtgtacgggatctttaagtcaaagcccttcaacttttctcacccagccgctagtgtgttggcccagctgtgcaccagagacggaatattgcctcaaggtgcgtgtacgtccccagccctggcgaacctggctagtacaagccttgataaacagttgacccagctggccagacgcaaaaatataacttatacccgctatgctgacgacatcaccttctctttcaatcaggagcagatcaaggatatcataactctgggagacgaggatgagttcgaactgtccgagactgtcatctcaatcattgaaagatgcgggttcaaggtgaatctccgcaagtttcgggtgcaagagaaaaacgtttgccagaaagtcactggattggtggtgaatgagaaggtgaatatcgatcggaagtacctgcgagtcacaaggtcaatgattcacaagtggagggaggacaagttaaaggcatctctgatctttttcgcggccaaaggcctcgaaacaataaacaacgaacacgccattagcatatttaggaaccacatttatggcagactgagcttcattaagatgatccggggtgacgattttcccctctacctcaagctgatggcccagatgtcccataatgacccacggaagactaaagaaggcctgcgggctatgagagttacggagaattacgacgtatttatttgtcacgcaagcgaagataaagataccatcgccatccccatctacgacgctctcgtagctttgaacatcagcgcatttatcgatcatgtggagattaaatggggcgactcccttatcgagaagatcaactcagccctggtgaagagcaaatacgtcatggccattctctccgcttcatctgtgaataaagactggccccgcaaagaacttaacagcgttctcgcccgtgaaatctccgaaggaaaggtgaaactactgacactagtcaagaaggaagatgaggagatcgtggcctccgttttgcctcttctccaggacaagttatatatgtcttacgagaacaaccctcaagacgtagccgagaatattaaaagcctgctcgaatga

SEQ ID NO: 7632 - RNA, 1608 nt, synthetic construct
  source 1..1608: mol_type = other RNA
atgctgcgacttgccacagccaacaagcaggctactgatcaagtgccggatctccctaaaatggagcccgaaccgtataaaacaggcggcaggatcaagtggaacaacaagaagctcaaaaacaatagtcagacccctaacgaggacatcatcaaaatctgccagaaaatcgagaacaaaagcatcatcatcacaagcgccaatgatatcgcaaacgtcctcgaggtgccagtgggtcaattactgtacatcctttacgacaaaaaggataactaccggcaatttgagatagagaagaagaatgggaagtccaggattatcaatgcgccccaaggtggcctggctatactccaggagaagctgaagccaattatagagcatttttacaggcccaagaagcccgctcacggcttcatcaaagggaaatccatttacacaaatgcactgaaccacaccaagaaaaagtacgtggtgaatattgacctggaagactattttggaagtgtgacctttgcccgcgtctatggaatctttaaatcgaagcctttcaatttcagtcatccagccgcttcaattgcagctcagatctgtacaaaggaagggaagttgccccagggcgcgtgcacttctcctgttcttgctaatctcgcctccgccgccctggacaaacaacttacgcagttggcccggcgaaagaacattacttataccagatatgcggatgacatcaccttctccttcaaccagagacaggtgaaagaaataatcaccttggatgaggagaataatttcgaattgggggaaactattatctcagtgattgagaagaatggcttcaagattaatacgcagaagttcagggtccagaagcgtaacgagtctcagaaggtcaccggactggtcgtgaacgacaaggtaaacgttgaaagaaaatacctacgggtgacccgaagcatgattcataaatggcgcgaggataagctcaaggcatccctgctgttcgctagcaagaaaggtatcaaaacgaatagcaacgagcacgcaatttctgtgttccgcaaccacatatatggacgtctgtcctttattaggatgattcgggggggtgattttcctctgtatcttaagctcatggccgagatgagccataatgaccccgtaaaaaccaaagaagggctaagaactatgaaggtgaccgaaacatacgacgtctttatctgtcacgcttcagaggacaaggccactattgcgatccctatatacgatgagctgaataaactcaacatctctgcctttattgaccacgtagaaataaaatggggagactcgctaattgaaaaaattaacagcgctctggtgaaatcaaaatacgtgatcgccatcctgtctgccaattccgtggacaaggagtggccaaaaaaggaactcaacgcggttcttgcaagagaaattgccgaaggcgatgttaagctcttgactctggtaaaagaggaggatgaaaagatagtcgcagaaagtttaccactgttacgggacaagttgtatatggcttacacagataatgcctctgaggttgctgcaagggttcatgcactgctggaccgctga

SEQ ID NO: 7633 - RNA, 1608 nt, synthetic construct
  source 1..1608: mol_type = other RNA
atgctcagcctctctagtgccaacaaagaggaaaatgaaacaattcctgaactgcccaagttggagcctcagccctaccaagcagggaagaatctgaagtggggcaataaggagctgaagaaccacccgatcacctctaagatcgacattaacgtaatctgcaagaagattgagaacaaatccattgtaatcacttcagccaacgacgtcgcgaatctacttgaagtgccagtgggacaattgttgttcatcctatacaacaagaaggacaattacaggacgttcgagataaagaaaaagaatggcaagtccagaataattaacgccccacagggaggcctgagcatcctccaggagaaactgaaaccagttatcgagtacttttataggccaaagaaacccgcccacggcttcattaagaacaaaagtatcctaaccaacgctgagaagcacaccaaaaagaagtatgttgtaaacgtggatctagaaaactactttggaagcgtgaccttcgcccgcgtctatggaatctttaaatccaagccctttaatttcagccatcctgccgcatccattcttgctcagctgtgtacaaaagacggtaagctgcctcaaggtgcctgcacatcaccgattctggcaaacctcgccagtgctagcctggataagcacttaacccagcttgctcggcgcaaaaacataacttacacacggtacgcagacgatattaccttttcatttaatcagcagcaggtccgagagatcatcaccctcgacaatgagaacaatttcgaactcggggaagcagtcatcagcgtgattgaaaaatccgggtttagcatcaacacttcaaagttcagggtgcagaaaaggaatgaacgtcaaaaagtgacaggccttgtggtgaatgagaaggcgaacgttgaaagaaaatacctccgcgtgactcgtagcctggttcacaagtggagggaagacaaactgacttccgccctgttgttcgtgactaaaaaaggcttcaaggctaccaacaatgagcatgccatatctattttcagaaatcacatctatggccggctgtctttcattaaaatgattcgaggggacgactttcccttatatttgaagttaatggctgagatgtcccatcacgatccactgaaaacgaaggaaggtcttagagcgatgcgcgaaacagagacatatgatgtgtttatctgtcatgcgtcggaggacaaaatctcgatcgccatacccatttacgaggagctgactgagctgaatatcagtacctttattgaccatgtcgaaataaactggggagatagccttatccagaagatcaactctgcactcgtgaagtctaaatatgtgatcgccatcttgtcagctaattctgttgataagcattggccaaaaaaagaactgcactcagtactcgcacgggagattgccgagggggaggtcaagctgcttacgctggtgaaggaagctgatgaggctatagttgctgcaagtctccctctgctctccgataagctgtatataacctacaaagataaccctgccgaggtcgccgacaaggtcagagcattgttaaataaatga

SEQ ID NO: 7634 - RNA, 1608 nt, synthetic construct
  source 1..1608: mol_type = other RNA
atgttgaacctgacaactactaataaggaagcaaaaggtctggccccacagctaccaaacgtggaacccaatccaaacactatcgggaagtccgtgacatgggaaaacaaaaaactgaagaactaccctatagcttccgagtccgacatcagaactatctgttctaagattgaaaacggctccatcagtattacttcaaccacagacgtcgctaatttactggaagtgcctattgggcagctgctctatatcttataccagaagaaggacaactacaagagcttcaagataacaaaaaagaacgggggcgtgagaatcatcgacgccccttgcggtagcctcagcattctgcaagagaaactcaagcctataatcgagtatttttaccgaccaaagaagtctgcccacggcttcatcaaaaataagagcatccttactaacgcagaaaaacacattaagaagaagtacgtcatcaacattgatctggaagattattttggcagcgttacattcgctcgggtgtatggaatctttaaatccaagccttttaacttcagccacagtgccgcatctatactggcgcagctttgcaccaaggatggaaaactgccccaaggcgcctgtacatcaccggtgttggctaatctggccagtgctagtctggataagcatctcactcagctggcacagaagaaacagattacgtatacccggtatgccgatgatatcacgtttagcttcaaacaaaagcaggtgagagacatcatcatcaaaaacaaggagaatgatttcgagctgagcaaaaccatcgtcgacatcgtagaacgcaatgggttcaagatcaatttcaacaagtttcgcgttcaaaaaaagtcagaaaggcagaaagtgacaggactggtggtgaacaagaaggtcaatatcgaaaggtcttaccttcgcgtcacgaggtccatgatccacaaatggcgtaccaatcgctcagagtccgcgtcactgtttagtattcagaagggctacacctctaaaaataaggacgaggagatctccatttttcggaatcatatctacgggagattatcatttatcaggatgattcgaggaaatgatttccccgcatatcttaaattgatggcagagatgtcccaccatgacaccgttaaaacccgggagggtttgcgagccatgaaggagactgagacatatgacgtgttcatttgtcacgccagtgaagataaagagtccatagcgacccccatttacaatgagcttgtcaagctaaacattgctaccttcatagaccatattgaaattaagtggggtgattcgctagtagataagattaactcgtctttggtgaaatcaaaatacgtgatagctattctcagtacgaattctattcggaagcattggccaaggaaagagcttcacagcgtactgtctcgtgagattaacgataacaaggtcaaactcttgcccctgataaagaaagacgacacaggaatagttctgagcgagctgccgctcctctgcgacaaattatacgttacctatgacaacaatcccgaggaaatcgccaatatgattcagagcagactcggcaaatga

SEQ ID NO: 7635 - RNA, 1644 nt, synthetic construct
  source 1..1644: mol_type = other RNA
atgagtctccacataaagatcctcctaaacaatctcacatccactaatcacgccgacttgctgccaaatctgccccaggtggagccgcagcccaatttgagcccttctaagacggagtgggataacaagaagctgagtaataggtccttgctgaccgacgatgagcgcaataagattttaagcggtatagagaactccaaaatcattatctcatcgcctaccgacgtcgctaatcttctagaggttccaaccggacagctgctgtatatactgtacaagcgcaaaaacaactaccgctctttcattgtcaaaaagaagaacggaaagaaccgcatcattaattccccttacagtggcttggccatcctccagcagcgttttaagttgatccttgactacttctatagaccaaagaagtcagcccatggcttcatcaaggacaagagcattatttcaaacgccgagaaacatatcaaaaagaagtacgtcgtgaatctggatctggaagattattttgggaccatcacatttccccgaatctacggaatatttaaatctaggcccttcaacttctcccatccagctgccaccgtactggcacagctgtgcacacacgagggtaagcttcctcaaggcgcttgtacttctcctgtgcttgccaatcttgtatcggcatcactggacaaacagctgacgcaactggctaaacgtaagaatataacctatacacgctatgccgacgacattactttttccttcaagcaaaacggaattaacgaagtgataaaactgtccgaggatgaaaagtacgagatcggggatcagctgataagcattatcgagaagaacggctttaagatcaatcaggataaattccgagtccagaagcggaataataaacaagtggtgacagggcttactgttaatgacaaggtgaacatcaacaagaaatacatcagactgaccaggagcatgattcataaatggagtcaagataagaccacagccgcccttatgtacacggctactcacggaatcaaaacccgggacaatgatcacgccattagtattttcaggaatcatatctatggcaggctgtcctttatccggatgatccggggcaaaaacttcagcacctacttaaagctcatgtctcgaatgtctcattcagaccccaagaaaactaatgaggggagaagggcaatgagtgagacagaaacttacgacattttcatatgtcacgctagcgaagacaaagaattgattgcaattccgctgtataaggccttatgcgataagaatatccccacctttattgaccacgtagaaattgcgtggggggactctctcatcgataaaataaacaacgcactcgcaaaagctaaatatgtggttgctatcttaagcgagaactcagtggagaaaaagtggcctaaaaaagagctcaacagcgtgctcgccagagaaatttccaacggtaaggtcaagctgttgacactggttaagaaggaagatgaagaggctatcgccgacaaaatcccactcactcacgacaaaagatatatggtgtacgatgataatgcggactttatcgcggatgaagtccggaaaatgctagataaccaggcatctattaaccagtga

SEQ ID NO: 7636 - RNA, 1605 nt, synthetic construct
  source 1..1605: mol_type = other RNA
atgcacaatttcgccctcgctaataagaaaagccccgactttataagcgaactccctcaaatcgagcctaagccctacagtaatggacacaagatcaagtggatcaatcatactctgactagtaccgaggtcactccaccggacaatctgatcaagatttgtatactgatcgaatccggagagattgccattacctcagtgagcgatattgccaatctgctaggcgttcccgcgggtcagctgctgtacattctgtaccggaagaaagataactacagaacctttgagatcgagaagaagaatggaaaaaagcgcgtaataaatgcgccatgcggtgggctctctatcctgcagacaagactgaagcctgtgctggagtatttttatcgcccaaaaaagagcgcccacggcttcattaaaggcaaatctattatcaccaacgctggcatgcacattaagaaaaaattcgttgtgaacatcgacctcgaaaattattttgagtccatttctttcgctcgcgtctacggcatctttaaatctaaacccttcaatttcagccatccagccgccaccgtgttggcacagctctgtacgcataatggcaagctgccacagggggcttgcacaagtcctatattggctaatattgcatccgcctccctggataagcagctgacacagtttgcagggagaaagaagatttcttattcacgttatgcagatgacatcacatttagcttcaatcagcgtaacatcgacattatcaagaagaacgatgacggcagttattctctctcggagacaattgacaacataatttccaaaaacgggttcaaaatcaactacgacaagtttcgagtgcaaacacgaaataccaggcagagcgtgactggacttgtggttaacgataaagtgaacattaacagaaggtacattcggattacccggagcatgatccacaggtggacagatgacaaattaaaatacgctctgcttttcgccaccgagaagggttatcaagcaaaggataataaccatgcgattcagatctttcggaaccacatctatggaaggcttagcttcatcaaaatggtgcgggggaaggactatcctggttacctcaaattgatgtcatacatgagtcacaacgacccgctgaagactcaggaagggctcagggccatgaaggagactgaaaatttcgacgtttttatctgccacgcctcagaagacaagaaagacatagccattccaatatacgatgaattgacgaagttgaagatctcagcttttatagatcatgtcgagattaaatggggagattcccttatcgaaaaaatcaacgcagccctggtaaaatccaaatacgtcatcgcgatcctctctgcaaattctgtcaacaaggaatggccccaaaaagagcttcgcgctgtgcttgcctccgaaatcagctcaggcgatgtaaaactgttaacgttactgaagaaggaggacaaggaagtcgtgaacttgagtctccccttactatcggacaaattctatatggtctacgataacaaccctgaggtggttgctaataacataaagtccctactgcagagatga

SEQ ID NO: 7637 - RNA, 1632 nt, synthetic construct
  source 1..1632: mol_type = other RNA
atgtccctccatgataagctccttatgcacaacctggcattagcaaacaaggaaaacgccgatgtcattagtgaactcccgcaggttgaacccacaccatataaaaacggaaataaggttaagtggcgtaacaaaaagctgaataacaaggcggctattgaacctgactctttgatgaagatctgtatgctaatagagtctggcaaacttctgattacatcagtatcagacgtagctaaccttctggagatccctgttgggcaactgctgtacatactttatcggaaaaaagacaactacaggacctttgagatcgaaaaaaaatccggcaagaaacggatcatcaatgcaccagtgggtggactgagcatcttgcaaactaaactgaagcccgttatcgagtatttttatcgccccaaaaaatccgcacatggattcatcaaggggaaatccattataactaacgctaacatgcacataaagaagaaatacgtggtcaatgttgacctggagaactattttgagagtatcacgttcgccagagtgtacgggatctttaagagcaaaccattcaattttggtcaccccgctgcaaccgttctggcccaactgtgcactcataatggtaagctgcctcaaggcgcctgcaccagccctattttggctaaccttgcttcgacatcactagacaagcagctgactcagctggccggcaggaagaaaatttcatacagtagatacgccgatgatattacgttctcttttaatcaggagaaggtcattgacattatcgagcgaagtgaagacggatcttatatcatcggggaaacgatcgacaatatcatctctaagaacgggttcaagattaatcacgagaaatttagagtgcagacaaagaatactcggcagtcagtcaccggcttggtggtgaatgagaaagtcaacatagatcgcaaattcatccggattacccgctcgatgatacacaggtggaaagaagacaaagtgaaatacgcgttactcttcactaccgagaagggatatcagaccgaggacaacaaccaggccatcgagatatttcgtaatcatatttatggcaggctgagctttatcaagatggtcaggggcggtgattatcccggatacctcaagctcatgtcttatatgagctacaatgatccgtccaagacaaaggaaggggtgagagcaatgaaggaaacagaaaacttcgatgtgttcatttgtcacgcttcagaagataaggaggatatcgccatgccaatctacgaggagctaagtaaaatgaagattagcgccttcatagatcacgtggagattcattggggcgactcccttatagagaagattaacagcgcattggtgaagtctaaatacgtgatcgccattctgagcgcggacagtgtgaataaggagtggcctcagaaagaactccgagctgtattggcctccgagatttccgaaggcaagaccaagctcttaaccctggtcaagaaaaacgatgaggaaatcgtgacaaaggcgctgcccctgctccaggacaagctctacatggtgtacgacaataatccagacatggtagccgaaagcatcaaaaaacgcttacagtcctga

SEQ ID NO: 7638 - RNA, 1608 nt, synthetic construct
  source 1..1608: mol_type = other RNA
atgtacaacctagtgagcgtgaataagaaaaatcaagatatcgtacctgagctgccgcaggttgagcctgtgccctataaaaacgggaacaagatcaagtggcgaaacaaaaagcttaaaaacaagaccatcaccaactgcgaaaacttaatcaagatctgcaaactgatcgagtccaacgagatactcattacatcgtccaatgacattgcaaatttgctagagatccctattggccagttgctctacatattgtaccacaagaaagacaattacaggacttttgagatcgagaagaagtccgggaagaagcggatcataaatgccccaaatggaggcgtggcgattcttcagggcaggctgaagcctattatcgaatacttttatcgccccaaaaaatctgcacacggtttcattaaagggaagagcattatcacaaacgccagcatgcatacaaaaaagaagttcgtggtcaacatcgacctcgaaaattactttgaatcaatcaccttcgctagagtatatgggattttcaagaagaaaccgtttaactttgcgcatcccgctgcaactatactcgcccagttgtgcactcacaacgggaagctgccccaaggcgcttgtacaagtccaatactggccaatctcgcaagcaccagtctggataaacagctgacgcagctggcttctagaaaaaatatcagctatagccgctacgcggatgacatcactttctcattcaatcaatccaacgtcttcaacatcatcgtcaagaacaataagggtaattacgaggtttctgagaatattgactccatcataagcaaaaacggcttcaagataaatcacgaaaaattccgcattcaaactaagaataccagacagtccgtgacaggtttggtcgttaatgagaaagtgaacattgatcggaaatacatccgtatcactcgttctatgattcatcggtggaaggtcgacaaagtgaagtatgctctgctcttcacaattgaaaaggagtatcagaccaaagacaacaatcaggcaatcgagatctttaggaatcacatttatggacggctctcatttattaagatggtgaggggagaaaactatcccggatatcttaagctgatgtcctacatgagtcataatgatcccctcaagaccaaggagggcttgcgggccatgaaagagacggagaattttgatgtattcatttgtcacgcctcggaggataagaatgacattgccattccagtctttaaccagcttgatagaatcaacatttctgcctttattgaccacgtgcagataaagtggggagatagtctggttgaaaaaatcaacagtgccctggttaagtcaaaatatgtgattgctatcctgtctgccaacagcgtcaacaaagaatggcctcagaaggaactacgagccgtgctggcttcagaaatatccgacggcaacatcaagcttctgaccctgattaaaaaagacgatgaggaaatcgtgaaaaccgctttaccactgcttagggataaatactacatggtatacaatgagaacccagaagtgatcgcagacaagataagagagctcttacatcgctga

SEQ ID NO: 7639 - RNA, 1608 nt, synthetic construct
  source 1..1608: mol_type = other RNA
atgcacagcctcacatttgccaataaggagaatccggacagcattcccgaaatccctcaggttgagccagagccctacaaagacggtaaaaacgttaagtggcgcaacaagaagctgaagaataaaagtaccattgaccatgaatccctgatcaatctatgcaaacttattgagtcaggaagtattgttatcacctcggcgtcagatatcgccaatttactggaaattccagtaggccagctgctgtacattttgtatcacaagaaagacaactaccggacttttgaaatcgagaagaaaaacggcaaaaagaggatcataaatgcaccaaatggcggcgtgtctatcctgcaagagaaagtgaagccaatcattgagtatttctatagacccaagaaatccgcgcatggattcataaaagagcgctcaatcattaccaatgctttcatgcatacaaaaaagaagttcgtggtgaacatcgacatcgaaaactactttgactcaattacattcgctagggtgtacgggatttttaaatccaaaccattcaacttcgctcaccctgctgccactgtattagcccaactctgtacgcacaacggaaaacttccccagggcgcttgcacttctccaattttagccaacttggccagtacgagccttgataaacaattgacccagctggccggtcgcaagtcaatatcatattctcgctacgcagatgacattaccttcagtttcaatcagaagaaagtacctgatatcattgaacagaacgacgatggcagctatgaaatctccgaagccctggagggtattatcctaagaaatggctttcgagtgaattctgacaagtttcgtgtccagactaagaacacaaggcaatccgtcactgggctcgtcgttaacgataaagtgaacgttgatcgcaaatacatccgaataaccagatctatgatacacagatggaagtacgataaggtgaagtacagcctattgtttacaactgagaagggttacaagaccaaggataacaagcaggcaatggatatctttcgtaaccacatctatggaaggctctccttcattaagatggtcagggggaaggactatcctgggtatttgaaactcatgagttacatgtcgcataatgaccctctcaaaacaaaggaagggctgcgggctatgaaggaaaccgagaattttgacgtcttcatctgtcacgcatccgaggataaggaggacatcgccacaccggtctatgacgagcttacgaagatcaatatcagtgcatttatcgatcacgtggaaataaagtggggggattccctcattgaaaagataaactctgccctcgtaaagtccaaatacgtgattgctatactcagcgcctctagcgtgaacaaagaatggcctcagaaagaacttcgggcagtgctggcgagcgagattagcgacggagatgtcaagcttctgaccctggttaaaaaagacgatgaggagatcgtgaagaccgcactgcccttgctgagagacaaactgtatatggtctacgaggagaatcccgaggtggtggctgaccgggtgcgaactctgctgcatcggtga

SEQ ID NO: 7640 - RNA, 1653 nt, synthetic construct
  source 1..1653: mol_type = other RNA
atgcagctgaggaaacaaataattgcgttcaacgagaaatgccgggccgagggcctggatgaagataggctcatcccactgcttaaagacacagagccatccagcgtaaaagtgggaaatactgtcatttggaacaactcctttaaaggaaacgtgtttagtttaacggaacaggaagtgtcaaaggtatgtgctgctatttcaaggggggacgtgaatattgaaagtgtgcaggatgttgccaatctgctagaggtaccagtgggaaatctcatccatctcctgtacagatcctccagtattaagtacaagtcatttaccatcccaaagaagaatggcggtgagcgaatcatccttagcccccagggcggcatcaaaattctgcaagagagagcaaggaaatatctggatgcattctatcgccccaagatttcggcccacggatttatcctaaataagggcatcttcaccaacgccgagaaacacgttaagaaaaagtatgtcctgaacattgacctgaaggacttctttgagagtatcacgttccctagaatttacggcgtgctgaagaagcatccgttcaatatgggccgccccgcagcagctgttttggcacagttatgcgtgcataacgggaagatgccgcagggagcccctacaagtcctgtgctttctaatatcattgctagcgccctagacaagacactagtgagactggccgggaagtataggatgagatacacacggtacgctgatgacatcactttctcctttaaccagtctccaccactggatatcgcaaagaagatcgaggacaccgggggatacgaactcggcgatagcctgcgccatgctatagagaacaacggcttcaagataaatgaagagaagtttcgattgcaactcaagactgaacgacaggttgtcactggtctgaccgtcaacgagaaagtgaatctggatcgtaagtatattcggcttaccagagcaatgatagacgggtggggaaaagacaaagtccaggccgccaataaataccataaaatccggtatgggaaatgtgataaaaacgacgaattcgcggttgaatccttccgcaaccacatctacggcaggttatctttcatacggatgattcgcggtgccgaatggcctctctatctcaagctgtccgcctggatgtcctctaatgacgataaccccacaattgaagggcgccgggctatgaaggcgatggagatgtttgatgtcttcctgtgtcacgcatctgaggacaaggaatcaatcgtgatgcctatctacgacgagttgtgcaaactgcacatacacgcatttgtagataccaaatacatcgagtggggagatagccttacagagaaaataaacggagctcttgccagaagcaaatttgtggtggcggtcctctcttcgaattcagttgaaaaaaggtggcccctgaaggagctgcacagcgtgttagcccgtgagatcgctgaaggcgacaaaaagttgctcaccttagtgaaagacggcgacgaggaacttattaaggctaagctgcccttgctcgccgataagctgtatgccgtctacaagggtgaccctattgagatcgctcacggtttgagctctttgctcactgggaagaaatga

SEQ ID NO: 7641 - RNA, 1632 nt, synthetic construct
  source 1..1632: mol_type = other RNA
atggccttcaattcaaaatgcaagaaagagggcttggacgaagagcagttcctgcccctgctgaacgacaacgagccaagctctgtaaaagtcggcaattctttcctgtgggataatagggccaaccggaatgctttctctctgactgaacgagacatctccaagctctgtgttgcaattagcaagggtgacatcaatatcactgaggtccaagacgtggctaacctgttggaagtccctgttgggaatctcatttacctcctgtaccgcacctccagcgtcaagtacaaagagtttaccattccaaagaaaaacggagatgaaagaaagatcctgtcacctcaggggggcgtaaaaatactgcaggaacgcgcgaagaagtattttgatgccttctaccggcccaagattagtgctcacggctttattctgaacaaggggattcttaccaacgccgagaagcacgtaaagaagaagtacgtgttgaatgttgatctgaaagatttcttcgaaagcataacattcccgagaatttatggtgtgctgaagaaacatccatttaatatgggacaccccgccgccactgttttggctcagctctgcgtacataatggaaaaatgccacagggtgcccctacctcccccgttctttccaacattatcgcctctgccttagacaaaaccctggtgcggctggccggcaaataccgtatgcggtatacaaggtacgcagacgatatcaccttttcgtttaaccaatcacctcccagtgagatcgctaagaaaattgagaacactgatggatatgagctgggagactcacttcgccatgctatagaaaacaacgggtttaagatcaatgaagacaagtttcgccttcagtccaagactgaaaggcaggtggtgacaggcctcacagtcaatgaaaaggtgaatctggagcgtaagtacatcagactaaccagagctatgattcacggttggggaaaagacaaagtgactgccgccaagaaatatcataaaacacggtacggcaactttgataaggatgacaactatttggtcgcgaacttcagagatcacatctacggtcgactgtcattcatacgcatgatcagaggggctgagtggcctctctaccttaaactgagtgcttggatggcaagcaatgacgacaaccctacgacagaggggcgacgtgccatgagggcaatggaaatgtttgatgtgttcctctgtcacgctagtgaggataagaacgacatagtgatccccatttacgacgagctctgcaaactggatgtgcatgcgttcgtcgataataaatatattaggtggggcgattctctgaccgagaaaatcaacagtgccctagcaaggagcaagtttgtggtggcagtgctgagccgcaattctgtggaaaaggagtggccattaaaggagctcaattccgtcttagcacgggagatcgccgatggggacaagaaacttctaacgttattaaaggaaggcgacgaggagctcatccaagcaaaattgccattgctggccgataagctctatgcagtgtatacgggcgacccgataaaggttgctcaggacctgaaagcgctactttccgacggagaatga

SEQ ID NO: 7642 - RNA, 1653 nt, synthetic construct
  source 1..1653: mol_type = other RNA
atgggcctgcgcgagaagattgcgtcatttaacaacgaacttaattacggggtcgactataaagatagcctaattccactcctgaagaacaatgagcctctggccatacatatgggtaataaggtgctttggaataacttcttcaagaagaatgagttctcgctgaccgacatcgacgtgtacaaaattactacggccatctccaagaaaaacatctacattattagccctcaggatgtcgcagctcttctggaggtcccagttggaaacctgctgtacctgctctacaaatccaactctaataagtaccgggagttcacgataccgaaaaagaatggagataaaaggactattctctctccccaagggggagttaagattttgcaggagcgcgctaaaaagtacttggacgctttttatcgcccaaaggcaagcgctcacggtttcatcctgaacaagtccatcttcactaacgcggagaagcacgttaagaagaagtacgtgctgaacgtggacatcaaagacttctttgagtccataacctttccccgaatatatggcgtgcttaagaagcaccccttcaatatgggcaacagcgcagctgctgtcttcgcccagctttgtgtgcacgaaggcaggttacctcaaggggcgccgacttcaccagtagtatcaaacattatcgcctcgagcttggacaagaccctcgtgcgactcgcaaggaaatataaaatgtcctacacacgctatgctgatgacataactttttcctttaaccagtatccccctgtggggattgccagaaaaatcgatggaacaaatgactttgaactgggggattctttgagaaacgccatcgaatccaacggattcaaaatcaacaatagcaaattccggctccagtcacgggccgaaaagcaggtggtcaccggtttgaccgttaatgagaaagttaacatcaatagggactatatcaggacaaccagagcaatgattgacgggtggggtaaagacaggttccaagccgctaagaaataccacaagattcggtatggcaaatgcgataagtctaatcagtcagctattatcagcctaagaaaccatatctatggccggttgtcttttattcgtatgatcagaggcgccgaatggcctctatacctgaaactgatcagtcgtatggcgaataatgatgattcccccacagttgaaggaaagcgcgccatgaaaatcatggaaatgttcgatgtattcctttgccatgctagtgaagataaggatgacattgtggagcccctgtacgaggagttagtgaatctacgagtgaacgcatttctcgataccaaatatatcaagtggggtgacagtctgatagagaagatcaatggcgcactggcaaaaagtaagtttgtgatcgccgtactcagccggaattctgtggaaaaaaagtggcctcttaaagagctgaacagtgtcctcgccagagaaattacaggagaagacaaaaaactgctcatacttgtcaaggatggggatgaggaattaattaaggacaagtttccactgctggtggacaagctgtacttggtctataagaacaatccagagataatcgccggcgagttactgtctctcctggccggcaaacagtga

SEQ ID NO: 7643 - RNA, 1641 nt, synthetic construct
  source 1..1641: mol_type = other RNA
atgcttctgaaacagcagatcattgccgctaattttatccgtggcgagtctggaaaagcgttcctccccactttgctgtatgttgagcctaaaagtattaaaacaggctcgaagtacaagtggatgaatccacgatctataagggcctactcactctccgaaaatgacattcactccttgttgtcggcggtgctcacaggcgaaatcgaaatcaagactgccaatcacgttgcggagatcttagagatccccgtgggtcagctgatatacatcctctacaaaaagaccacagaaaactacgtagagttcgaagtgaagaaaaaaatgggtggagtgagaaaaatctactccccccaaggttccgtgaagatcatacagaatagggtcaagaagattctcgacttcttttaccgccctaaagccgccgctcatggattcatcaaggagaagtccataaaaaccaacgcaaagaagcatatagggaagaagtatgtgttgaacattgacctgagcaacttctttgagtccattactttcgctcgcatctatggggtattcaaagcccggccgtttaatttcggccacgatgcagcaagtatccttgcccatgcttgtacatacaacggggttctcccacaaggggccccaacctcacctaccctctctaacatagtagctgctagcctggataagaagctggtaaccctagcccggagattcaaaatccagtacacacgatatgccgatgacatcacttttagctttaatcaaaagccacctgaagatcttgtcaaggtgctggatggggaaggactctgcgaagtgggcgacctgctgaacgaggtgatcgagtcctgcggatttaaagtgaatagtaagaagacgcgcttgcagagtaaaacccagcgccaggaagtaactggccttgtcgttaataacaaggtgaacgtgaacagggactatattcggatcactcgaagtatgattcatgggtggtgcaaagatagagcttttagcgctagaaaacacttcaacattacagatgagtgttcagttgagaaagagaagaacatcattgagtcttttcggaaccacatttacggcaggctgtctttcattcgtatgatacggggcgtggactttccctgttatcttaaactcatggcctatatgagccataatgatcctaaacagacaaaggaaggcaagagggccatgaaggaaacggaaacctatgacatttttatctgccacgcaagcgaggataaggatgagatagctgtccccgtctacgacgagctgaacaatctgtcaatcgtgaccttcattgaccacctgtcaatcaaatggggtgacagcttagttgacaagatcaataatgccttagcaaaatctaagtacgtgatcgcaattcttagcaagaacagcgtcgagaaaaactggccaattcgcgagctgaattcagtcttggccagagaaatcaaaggagggaaggtcaaactactaaccctcattaaggcgtctgatgaagagtatgtgcaagataaactgcccctgctggccgacaagctgtatatggtttacaatggaaacccggcagaggtggcatccagggtcagagacttactgggccacccttga

SEQ ID NO: 7644 - RNA, 1635 nt, synthetic construct
  source 1..1635: mol_type = other RNA
atgcttctgaaacagcagattattaccgagaacttcattagggacgaaaacgggaaatccttgctgcctgccccaagttacgtggagccaaagagtatcaagtctggcaacaagtatcggtggatcaaccctaagagcatccgaaagtactccctgagtgagagcgagatccactccctccttagtgcaattttaaccggcgaactcaagattaatacggtgaatcacgttgcagagatactggagattcccgtcggccatctcatctacatcctctacaaaaaaatctcgagcaattacgtggaattcgaaatccctaagaagatgggaggggtccggaaaattaaagccccgcatggaagtataaaaattattcagggacgggtaaagacaatactcgactttttctacagaccaaaaaccgcagcccatggcttcattaaggggaagtctatcaagagcaacgccaaaaaacacatagggaagaagtatgtactgaacatcgacctgtcaaactttttcgaaaccatcacatttgcacgggtctatggtgttttcaagagccgcccttttaatttcggccacgacgctgcgtcagtgcttgcccaggcctgtacttataacggtgtgctgccacaaggagctccaacctcacctgcgttgtccaacatcatagctgcttctctagacaagaaactggtgaccctcgcaagaaaatttaagatccagtacaccaggtatgccgatgatataactttttccttcaatcagaagccccctgaggatttggtaaaggtgatagatgggggtgctctgtgcgagatcggcgacctcctgaatgagattattgaatcctgcggctttaaggtaaacttaaaaaaactgcgcttgcaatcccggacacagcgacaagaggtgacgggacttatcgtgaacaataaggttaatgtcagccgtgactacatccgtatcacacgcgccatgatccacgggtggtgcagagacagcacgcttgccgctaggaagcacttcaacatcactgatggccagggtgaggacaaaagcctggtgaacagctttaggaaccatatatatggtcgcctatcgtttatcaagatgattagaggcgccgagttcccgtgttatctcaaactgatggcatatatgtctcacaatgatcccaaacagacaaaggaaggaaaacgcgcaatgcaggagacagagacttacgacgttttcatctgtcatgcgtctgaagataaaactgaaattgctatccccgtctacgaagagctgtcaaaattagggatcgtgacctttatcgatcacttgtctatcaagtggggagactccttggtcgagaagattaataatgccctggttaagtctaagttcgtcattgccattctctccgaaaattctgtcgagaagaaatggcccattaaggagcttaatagtgtgctgtcaagggaggtcaaaggagggaaggtgaaactactgactttgattagagactccgatgaagagtatgtgcaagaaaaactgccactcttaagcgataaactttacatggtttacaagggcaatcccgtggatatagcttcaaaggtggaagacctgctgcgaaactcatga

SEQ ID NO: 7645 - RNA, 1587 nt, synthetic construct
  source 1..1587: mol_type = other RNA
atgctgacgtttaacaaactgcagtttaggttgcaggctaccgagcctacacggctttataataactactgggtcaaatggctcaatccttctcttagccccacgctttcccgaaacattgaaaccagccgtgagttaatcctggggctgcagagcagcaacgatgtcgccaacctgctggagattcccgtaggccagctcctgtacattctctatacgctggagccaaagtacaagagcttcacagtgaccaaaaagagcggtaagaaacgcctcattgattctccaaatgagtccattaaaatcttgcaggacaaagtgcgacctcttatcgaggcgcactacagggtaaagaagcccgtgcacggatttgtgggtggaggcaagggaatcgtgactaacgccatgcaacacaagaaaaaaaactacgtgcttaacatcgatttgtcagatttcttccattcagttaacttcggacgcgtgcaaggaatatttagaaacgccccctttaacatgggcagcgccgctgcaacagttttggcccagctgtgtactcataataagtgcctgccccagggggcttccacttctcctgttctgagtaacctggcagcaagcacattggatcgcaagctcgtgcagctggctaagaaattccacctgacctacaccagatacgcagacgacataacattttcatccaataagccattcagtggcaagatcgttgaaaatcgaaaggaggaaagtggactagaaactcatagggtaggcaaactattagagcagattattaccgattccgggttccaggtcaatcacacaaaaactcggctacaatataagtcgcagcgccaggaggtcactggattggtggtaaatgagggtgtgaatgttaatcgtaagttcatcaggaagacccgggccatgattcacgagtggtcaaatgatctgatctctgcagaggcaagatttatcatgcagaggtataacgtgagtgacagtgaagttgggaatgaccgggatggctcaatcttcaaacgggctgtgtatggtaaccttagcttcatcaaaatggtcaagggggaagaacatagtccctatctgaatctgtgtaggaaggtgctggaactggacaatgaaccaccatcctttatatccaagttaaaagacgtcctcgacatgtacgatgtctttatatgccatgcgagagagaacaaaaatgaggtcgccatcccgctctatgaagccttaaaatcgaaaggcatcaataccttcatcgactccagtgccattaactggggggactcactggtgtcaaaaatcaacacagcgttacaaaaggctaaatacgtgatcgccatcatatctgacgattccctcaacaagtcttggcctatgcacgaactgcggtctgtgctgtccaccgagatacgcagcggcgagatcaagctccttccgctcatggtgggcgacgctgacgctttgatttctcaaattcctctgctcgccgataagagatttattcacttcgaggacaacattgatgacgtcgttgaagaaattcagaagctacttaaggattga

SEQ ID NO: 7646 - RNA, 993 nt, synthetic construct
  source 1..993: mol_type = other RNA
atgtctaatctggcagccacatccctagataagaaactcgtccagatcgctaagaaatttcacctgacctacactaggtatgccgacgatttaaccttcagcagtaacaaaccctttcctagcatcttggtcgaacgcaaaacccaggataacgggcaggataagcaccgagtggggaagttgctcgaacaagtcatcaaagatgccggctttgagatctcccatgacaagacacggctgcagcataaatcacagaggcaagaggtgacaggactggtcgtgaacgagggggtaaatgtgaacagaaagttcgtgcggaaaactagagcaatgatcaacgaatggggaaaagatttgcgagcagccgagatccggtttattaagcatagatatcacgtgaccgactccgaaatcaatatggagaatctcgatggctcaatatataagagggcaatctacggaaacttgtctttcattaagatggtgaaaggcgaagagcactctccataccttaacctctgcaaaaaggttcttgaactggaatccaaccctcccgagttcataaaaaagttaaaaggggtgttcgatatgtatgacatctttatatgtcacgcctcggaaaataagagtgatgtagcgctgccccttcatgctgctttggcggagcgcggcataaacgccttcgtggattgcttcgagattaaatggggagacagcctggttgccaagattaatactgctctgcaaaagagtaagtacgtcattgccgttatttcagaagagtctgtgaaaaagagttggcctatgaaggaactgaatgcagtcctttcaagcgagattggtagcgaacagacgaagctcttaccactcatggtaggtgacgacgagtccctcctgaaacagctgccgcttctgggcgacaagctgttcgtgaactttgacgacaatatcgaggagattgctggtaaggttgacagcctactgcgtggctga

SEQ ID NO: 7647 - RNA, 1596 nt, synthetic construct
  source 1..1596: mol_type = other RNA
atgtccacccccctgggctcacttttatttaacctcgaaagctttgagcctgagaaaattccgaacaagaagacctattcctggaaaaatcctaaactcagtcccacgttaacgagagatctagaggtggctaaaactcacttcgtaggactccagactgacaacgacgttgccaatattctggaaatcccggtcgggcaactgctccacatcctgtactatcagaaacagaactacaattcctttaccattaagaagaagtcaggcaaaactaggcttatcgatagtccaaaagcctcaatcaagatactccaagacaaggtgaaaccgttgatcgaggcccattacagagtcaagaaacccgtacatggcttcgtcggggatggtaagggtatcataaccaacgctttccaacaccgtaagaagaactatgtgctgaacattgacctgcaggatttttttcacagcgtcaattttggccgcgtccaggggatcttccggaacactccttttaatatgggaatcccagccgcaacagttctggcacaactctgtacccataatgggagactccctcagggggcttcgacatctccagtgatcagtaatctggcttctacatcactagacaaaaaattggtccagatagccaagaaattccatctcacatataccaggtatgccgacgatctaacattctcttccaacaaaccattccccaccatactggtagagagagagatcgacgaaaatggtaaagaaatccataaagtcggaagactgctggagcaggcaatcaaggatagcggctttgaagtgtctcatcacaagactcgccttcaacataaaagccagaggcaggaggtgaccggcttggtagtgaacgagggcgtgaacgttaatcgcaagttcatccgtaagacacgagctatgattaatgactggtccaaaggcctggcgcaggccgagataaggtttcttaagcagcggtaccaccttaccgattccgagattaagaccgacgggctggatgggtccattttcaagcgagcagtctacggacacttgagtttcatacggatggtgaagggagaagagcacagcccctacctgaagctttgcgagcaggttctggcactggactccaagcctccagagttcattcggaagctgaagggcgtgttcgatatgtacgatgtttttatttgtcacgcgtcggaggataaggctgaagtggcactgcccctatatgacgccttagccaagagggagatcaaagccttcattgattgctttgctattgactggggagacagtctcgtgtctaagatcaacactgcgctgaaaaagtctaaatacgtcattgcagttgtgagcgatgaaagcgtgaaaaagagctggcccatgaaagaattaaatacggtgctggccgctgaaatttcttcagaagagacaaagttactgcctctcatggtgggagacggcgaagaattgctgaaagaaatcccattgctgggtgacaaattgtttgtgaacttcaacgacaatatcgacgagatcgccgataaggttgagaagcttctccagcgcagctga

SEQ ID NO: 7648 - RNA, 1311 nt, synthetic construct
  source 1..1311: mol_type = other RNA
atgcaagagaaaatcaagcccctgattgaagctcactaccgcgtcaaaaaacccgtccacggcttcgtcggaggcggcaaaggtatcgtttctaacgctgaacagcacaaaaagaaggattatgtactgaatatcgacctccaggactttttccatagtattaactttggtcgcgtgcagggtatcttcaagaataccccgttcaatatggccacccccgccgcttcagttctggctcagctctgcacgcataacgggcggctgccacagggagcatgtacatccccagtgatctcgaacctggcagcaacttctctggacaagaaactcgtgcaaatcgccaagaaattccacctaacttatacaaggtacgctgatgatttgacatttagctccaataagccgctaccctcaattcttgtggagaagattgcggaagacaatgggcaatacaaatacaaagtgggacgaataatcgagcaggccattattgactccggatttaacatcaatcacaataaaaccaggcttcagcataagagccagcgtcaagaggtcaccgggttagttgtgaatgaaggcgtgaacattgaccgcaggtttatacgaaagacgagagctatgataaatgaatggagaaagaacctgctggaggccgaaatccgtttcatcaaaaagagatacaatctgagcgactcggagataaagaataggaagcttaatgggtctatctataagcgggctatttatggcaacctcagcttcatcaaaatgatcaaaggcgaagagcattcaccatatcttacactgtgtaagcaggtgttggagctggacaacaatcctccttatttcgtgcggaaactgaaagggatttttgatatgtacgacatctttatctgccacgcctctgaggacaaagataaggttgccatacctctctacgacgagctaattaaacgggacatcaacaccttcattgattgctttgcaattaagtggggtgattccttggtcagtaaaatcaacactgcgctgaagaagtctaagttcgtaatcgcagtgatatccgatagcagtgtaaagaagagctggcccatgaaagagctgcatgccgtcttatcaagcgagattggctccgaagaaaccaagttgcttccactcatggttggggatggagaggccttgctgaaggaactccctctgctcgcagataaactgtttgtggctttcgataacaacatagaggaaattgccgacaaagtggagactcttttaaagaagtacaacctctatgacatcagtcagagatga

SEQ ID NO: 7649 - RNA, 1596 nt, synthetic construct
  source 1..1596: mol_type = other RNA
atgaccaaactcatggacttcctgtcttttcactccaatgcttttgagcctactaagtcctccaagaacgccggctatacctggatcaatccgtccttgaccccacatttgactagagaattagacttcgtgcagcgccagtttctggggctccagtcagacaatgacgtcgccaatattctggaaatacccgtcggccagctgctgtatatcctttactctcagaaggacacttatgttaactttacggtgaaaaagaagtctggcgagaaccggaacatagaaagcccctgctcgagcatcaagattcttcaggataaggtgcgccccttgatcgaggcccactacagagtgaagaaacctgtccatggattcgtggggaacggcaaaggcatcatttctaatgctgagcagcacaagaagaagacatatgttctcaacatagatctcaaggacttctttcacagtgtgaatttcggcagggtccaggggatcttcaaaaacattccctttaatatgggtacaccagctgctactgtgctagcacagctgtgcacgcacaaacgaagactgccgcagggggcctcgacatcacctgtcttgtcaaacctggcctccactaccctagataaaaagttgacaaagatcgcaaagaagttttacctgacctacacacgttatgctgatgacatcacctttagcagcaatgagccttttagtcaagcacttctggaaaaagacaaactggatgacggacaatatatctacagggttggaaatgtgctcgaggcagccgtgatctcttcagggttttccataaaccataagaaaacacggcttcagcacaagtctcaaagacaagaagtgacggggctcgtggtcaacaagggcgtgaacattaacaggaagttcatccggaagactcgcgccatgattaatgagtgggataagaacttgatcgaagctgaaaaacggttcatcaaagtgagatatcacgctcaggagacagagatcgacatgagtaaactcgatggttcaatctacaaacgggctgtatacggtaatctgtcttttattaggatggttcgaggcgaagatcatagcccatacctcaccctttgcaagaaagtgctcgagctggaccataaccctcccgccttcattaacaagcttaagggaatcttcgagatgtatgatgtgttcatttgtcacgccagtgaagataaagagagcgttgcgctgccactgtacgaaagtctggagaaacgcaatattaacgcatttattgactgtttcgcgataaattggggtgatagcttagtcgcgaagattaacactgcactacagaagtccaagtacgttatagcaattattagtgaggacagcgtcaaaaaatcctggcctatgaaggagctgaatgccgtactgagcgccgaaatcgccgccgataaaaccaggctcttgcccttaatggtgggagatggagaggctctcgtacgtcaactgccacttctggcggacaagttattcgtaggctacaaagacaatatcgaggaaataaccgacatgatcgaatcactactgaccgagaaatga

SEQ ID NO: 7650 - RNA, 1590 nt, synthetic construct
  source 1..1590: mol_type = other RNA
atggccactacattctcatcattgagtttctacctggtgtcttttgaaccaaagaaggtaccctataagaaatctattgtctggaaaaaccctaatctgtcttcaacgctgactcgggacgcaaacgtggccaaagaaaaatttattggcttgaagaccgacaatgacgtcgctaacattctggaagttccagtgggtcagctcctgcatatcctttacagccaaaaacaaaactacgatagcttcgtcatcaaaaagaagagtggcaaatctaggatcattgagtcgccaaaaacctccgtgcgcatactacagaacaaggtgcgacctctcatcgaggcgcattacagggtgaagaagccagttcacggtttcgtgggtgggggcaaatctatcgtgagtaacgccgagcagcacaagaagaaaaattacgtgctcaacattgacctggtcgatttcttccactcagtgaactttgggcgagtgcagggcatctttcgcaatactcccttcaatatgggaatacccgctgctactgtgctggctcagctgtgtacccacaatggccggttgccccagggggcttctacctctccggtgttaagtaacctggcctcgaccacactcgataagaagcttgttcagatcgccaagaagtttcacttaaaatacacgcgatatgcagatgatcttaccttcagttccaacaaacccttttccagcattctggtagataaggagatacaagaggacggacagtataaatacaaggcaggcagagtaatcgaacaggccatcaaagagtccggttttagcattaatcacaataagacacggttgcaacataaatcccagagacaggaagttactggcctggtcgtgaatgacggcgtgaacattaaccgcaagtttatcaggaaaacccgtgccatgatcaatggctggcgtcaggatttactagaagcggagcgcagattcataaaaatcaggtatcatgccgcagagtctgacatcgacgcgagcaaattggatggatcaatcttcaagagggccgtttacggaaacctgagctttattaaaatggttaagggggaggagcatagcccttacctaaccctgtgcaagcaggtgcttgccctcgataataaccctccagagtttgtcaagaagctgaagggggtcttcgacatgtatgatattttcatctgtcacgcttccgaggataaagccgaagtcgctatccccctgtataattccctcaaggaaagagacatcaacacattcattgactgctatggacttatgtggggggacagcctcgtggccaagataaacacagcccttcagaagtccaagtatgtcattgctatcataagcgaggacagtgtcaagaaaacatggccgatgaaagaactgaatgcagttctgtcagcagaaattggcagcgaagagactaaactgctccctcttatggtgggagacggggaagctctgttagagcaactgcccctcctccgggataagctgtttgtatcctacgacgataatatagaggaaattgtaggaaaagtggaggcattgttgatctga

SEQ ID NO: 7651 - RNA, 1584 nt, synthetic construct
  source 1..1584: mol_type = other RNA
atgaatcaagccaactttgtgtttagggatttcgaaccaaaaaagttcagctattcaggcaaccagtattgggtgaatccatccctgtctcacgagctggccggagacattgacaacgcgatacagcaatttatcggcttgaaaactagtgccgatctggcttcaattctcgaagtccccgttgggcagctgctgcatattttgtatgcccagaacaaccagtatacgagctttgaggtgaagaaaaagagtggtaaaagcaggcttattgagtccccccggaacagcatccgcatactccagaataaggtccgccccctgatagaagctcattatcgggtaaaaaagcctgtgcacggttttgtgggcggagggaagggtattgtgtcaaatgcagagcaacacaagaaaaagaactacctccttaacatagacctgcaagacttctttcacagtgtgaactttgggagggttcagggcatcttccgcaatacacctttcaatatgggcaagagcgccgctacagtccttgcccaactctgcacttacaatcaaagactccctcagggagcctccacctccccagtcctgagtaatttagctgcagcatctctggataaaaagctggtgaaaatagctaagcgtcatcacctaacttacacccgctacgccgacgatattaccttctcttcgaataaaccgtttagcacaatgctggtggaccgagaaattttggaagatgggacatataagtacagggcggggaaactgatcgatcaggcggttgaggactctggattcaaaatcaaccattccaaaacacgagtacagcacaagagccagcggcaggaagtcacaggactagtcgttaatgacggcgtgaacgtcaatcgaaagttcattagaaagactcgggccatgatcaatgaatggagaaaagacatcctagcagcagagatccgtttcatcaaagagagatatcatgccgatgaagcagaaatagacgtgtcaaaactggatggctccattttaaaacgggctgtatacggtcacctgtccttcattcgcatggtgaagggcgaggagcactccccctacctgaccttatgtaaacaggtccttgagctggacggcaatccacctgattttgtcaaaaagctcaaagggatctttaatatgtacgacgttttcatctgccatgcttccgaagacaaggaagccgtggccaccccactgtacgaaagcctcaccaaattgggtatcaacactttcatcgatagtgaggcaatcaagtggggggattcactggtgtctaagattaacaccgctctgaagaagtctaagtacgtggtggccgttatctcggaggagagtattaataaatcttggcctatgaaggagattaacgctgtactttcactcgagatcggagaggaaaacacgaagttgttgccccttatggtgggggacggcgacgcgttgctcaagcagctgccgctcctaggagataagctttttgagagcttcaataacaacgccgaggagatcgctaggaaactggcagaaagattacagaagagctga

SEQ ID NO: 7652 - RNA, 1473 nt, synthetic construct
  source 1..1473: mol_type = other RNA
atgactcagacaaactttttcttcggcgattttgagcccaaaaagtattcataccgcggcaatcagtactgggtcaatccttcgctatcgcatgagctcacaggcgatctggacaatgctatccagcagttcattggactgaagaccagtgctgatctggcttccgtccttgagatacctgtgggccagttgttgcacattctttacgctcagaacaatcaatacacctcttttgaggtgaaaaaaaagagtggcaagtgccgcctgatcgaatcccctagaaattctattcgcattttgcagaacaaggtgaggcctttgatcgaggcccattatcgggtaaagaagcccgtccacggctttgtaggaggaggaaaggggatcgtttccaacgccgaacagcacaagaagaagaactacttactcaacatagatctccaggacttcttccacagcgttaacttcgggagggtgcaaggtatcttccggaatactccattcaatatgggcaagtccgcagccacagtgctggcccaactctgtacatacaatcagcgtttgccgcagggggcctcaacgtctccagtgctgtcaaatctcgcagcagcttctttagacaagaagttagtcaaaattgccaagaggcatcacttaacctatacccgttatgcagacgatataacgttttcaagcaataagccgtttagcaccatgctggtggatagagagattctcgaagatggcacttataagtatcgcgccggtaaactaatcgaccaagccgttgaggacagtggcttcaaaataaaccactccaaaactagggtgcagcataagtcccagagacaggaagtgacaggtcttgtggtcaacgacggggtgaacgtgaataggaaatttattcgaaagactcgggccatgataaacgagtggagaaaggatattcttgcagcggagattcgattcattaaagaacggtaccatgtagacgaggcagaaattgatgttctgaaattggacgggaatccccccgacttcatcaagaagctgaaaggaatcttcaacatgtatgacgtctttatctgccacgctagcgaagataaagaagctgttgctacaccactgtacgagtctctgaccaaactcggcatcaacacctttatagacagtgaggcgatcaaatggggggatagtctggtcagcaagattaacaccgctctgaaaaaatccaagtacgttgtggccgtgatcagcgaagagtctatcaataaaagctggcctatgaaagagatcaatgccgtgctttcactggaaatcggagaggaaaatactaagctcctgcccctgatggtaggggacggagatgccctacttaaacaactcccactgctcggtgacaaactgtttgagagctttaataacaacgccgaggaaatcgcactgaagttggcggaaagactgcagaagaactga

SEQ ID NO: 7653 - RNA, 1479 nt, synthetic construct
  source 1..1479: mol_type = other RNA
atgaataccgacacctcatcagacataagtgtcacaacttcatttgagcccaagcgtataattgcctacaatggccaccaatggatcaaccctaaactctcccctaccattctcagtgatcagcttaaggctgctgaaaagatcatcggtctgaaggaggcttctgacgtcgccaacatcctcgagataccagttggtcagctgctctacatcctataccagcagaataagaagtatacctcattcaccatcaaaaagaaatccggaaaggagagactaatcgaaaaaccaaacaactccctgcaaattttgcagtccaagatcaaaccccttatagaggcccactatcgggtgaaaaaaccggtgcacggcttcgtttctggagggaaaggcattgttagcaacgctgaacaacataaaaagaagaacttcatcctgaacatcgacctgctcgacttttttcactctgtgaacttcgggcgggtgcaggggatctttcgaaacatcccttttaatatggatgtgccggccgccacaatactcgcgcagctgtgcacttataatggaaggttacctcaaggggcctctacttcccccatcatttccaatctggctgccgccacactggacaagaagctggtacagatcgccaagcgcttccatttgacttatacccgttatgcagatgacattacatttagtagcaaccgagaatttcccgcggtaatcgtccaacgggacgtgaatacccaagacaaattgaagtacatcgtgggccctcttctggagagagcaattacagacagcggattccatgtgaatcacaataaaacacgcgttcagcataaatgtcagaggcaggaagtgaccggtcttgtcgtgaacaatggggttaacattaatcgccagctcatacggaacactagggcaatgattaatgaatggaggaaggatctgcagtcagctgagattagattcatcaaacacagataccacgtcaacgagaatgatattgagatcaacaagctagatggcagtatctataaacgggcgatatacggcaagctcagcttcattaagatggtgaggggagaggatcacagtccttacctgaaactgtgcaagcaggtactggagttagactcgaatccaccaccctttatcaaaaagctcaagggcgtgttcgatatgtatgacgtctttatttgtcatgcatgtgaggataaaaacagagtagccattccattgtaccatgcattagaaaagaaaggcatcaagacgttcattgattgctttgctattgggtggggtgacagcttggtcggaaagattaacacagccctgcagaagagcaaattcgtgatatccatcatttctgaagcatctatagataagagctggccaatgaaggagattcacaccgttcttagcatggaaatccgcaatactaaaacgaaactgcttcccctgatcgtgtga

SEQ ID NO: 7654 - RNA, 1578 nt, synthetic construct
  source 1..1578: mol_type = other RNA
atgcagcaacctttggagttctcggagtttgaaccaattaagttcggcaacggcgacgaaaccatctgggggaatcctacgctgtcacctaggcttacccgggatcacaaggtggcagagacactgcttctgaatctcgagtccgacaacgacgtcgccaatttgctggaaatccccaccggccagctgctctacatactgtacgagaaaccaaagcgatataccatattctccattaagaagaagagtggcaagccgcgtctcatcgagagcccaaacagttctatccgcatattacagaacaagcttcgtccacttttggaggcccagtataaaataaagaagcctgtgcatggcttcgtaggcaacgggaagtccattatcagcaatgctgagcaacacaagaaaaagaactacctcctcaacattgacttactggacttttttcattccgtcaatttcggacgggtgcagggcatttttaggaatactcctttcaatatggggtacaaggccgccactgttctagcgcacctctgtactcacaacaaacgactcccacaaggggctcccacaagccccgtgcttagtaatctcgcatctaccactctcgacaaaaagctagttcagctggccaaaagatttcagctgacctacaccagatatgccgacgatattactttttcatccaataggccttttccacccctcctggtagaaacaatccacttagaagacggtacaagccatcaccgagtgggaaaggcactgaaacaagccgtcgaggacagtggtttcgctgttaaccccaataagaccagagtgcagcacaggagtcagcgccaggaagtgacaggcctgatcgtgaatgagggtgtaaacgtgaacaggaagttcattagaaacacaagagccatgctgcacagctggcggaaagatctgattgaggcggagttgacctatctgaagaaccgctatcacgctgttgatgtcaacaagtcgaacctgactggcgatatcttcaagcgggcaatctacggccgcctgtcattcattaaaatggtcaaagggcaggaacatggaccctatttgaatctatgccggcaggcactcgaacttgacaataatccaccgaagtccattgctaaactgaaaggggtcttcgaaatgtttgatgtgttcatttgtcatgcgtctgaggataaagaagctatcgcactccccctttatgatgaactgaatacgctgggtgtgaaaacttttatcgataaggttgagattcagtggggggactctatagtgggaaagatcaactctgccttacaaaaaagcaagtttgtggtcgcaatcatctcagagagctctattggaaaagcttggcccctgaaagagctccatgccgtgcttgggatggagatcggtagcggagataccaaattgttgccgctgatagtaggaaacgaggaagagctgttaatgcagctgcctctgatcaaagacaaggcttacctgccttacacgaacaactgctcagaaatcgccaaaatcctaaaggataaattggacacatccaattga

SEQ ID NO: 7655 - RNA, 1572 nt, synthetic construct
  source 1..1572: mol_type = other RNA
atgcaactgactcttgaatttctcgatatctctgaattcgagccaaaaaggattgaggctagctggagtaatcccaggttatctcctacgctaaaacgggagcgcgatgccgtggcgcagcgtttaatcggaattcaaaccgataacgagctggccaacctgttggaaatcccagtaggtcagctcctgcacattttatacgaggaaaagaagcgctaccatgagttctacatcaaaaagaagtcaggacagcttagagttatagagagccctaacaagagtctaaaaattctgcagcacaaggtcaaacccctcatcgaataccattatagagtgaagaagagttgtcacggatttgtcggcaacgggaaaggaatcgtgagcaacgcagaaaagcacaaaaagaagcagtacgtcctgaacattgatttgaaagacttcttccatagcgtgcacttcggtcgggtgcggggcatattcatgaatgtgccctttaatatggggaactcagccgcatccgtgctcgcacagctgtgtactaaccattctaggttacctcagggggctcccacatccccggtgctatccaatttggcggcctccagtctagacactgctttgacaaaaattgccaagcggtaccacctgacttataccagatatgctgatgacattaccttttcatctaacaggaagttccccctggccattgtcgaccgttttgaaaccgacctgggaaaggtagaatggcgggtggggtcattacttcgtcagagcatcgaggaatcagggttcaccgtaaacgattccaaaacacgagtccagcacaggtcccaaaggcaggaggtaaccggtctggttgtgaatgacggcgttaatgtctcacgcaagtttattcggaacacgagagctatgcttaactcctggtccaaagatctggtggaagccgaacgaagatttctgatgacacgctatcatatgagcgaatctgaaatcgacagtaagaagctggacggtagatatttcaagaatgctatctatgggcgcctctcttttatcaagatgattcgaggcgaggataacagcagctacctcacactctgcaaaaaaatcctggagctggagcccagtccacctaaaagtatcgccaagcttaaggagaggtttgagatgtatgacgtcttcgtgtgccacgcctcggaggacaaagatgacgttgcgatcccgttgcatagagcgctcgaagataaaggcatcaaagcattcatagactgctttgagattaagtggggcgactccctggtggctaagattaataccgccctgcagaagagcaaatacgtcgttgcaatcatatctcaacactcggtgaataaggcttggccaatgaaggaactcaatgccgttttgtccagcgagatagactcaaagcaaactaaactcttgcctctgatagtgggcgaccagaatgcccttattgaggagctgccactgcttgcagataaactctttaaggtgttcgatgatgacatcgatcagatcgcatctgagctggagatgcgcctgaaatga

SEQ ID NO: 7656 - RNA, 1566 nt, synthetic construct
  source 1..1566: mol_type = other RNA
atgatgacacttttcagggacgactttcaaccaagaaaaacccgtaaccaatttggtgaatcgagctggttaaatcccaaactgaatccatatctaacggccggccaagaagaggtgaatcagaagctgaagaatttaaatgacgtcagcgatgttgctaacctgctggaactgcctactggccagctcacctatatactgtacaacaagaagccggcttacaaaactttcggcattaaaaagaagagcggtaaagtcagaataatcgacagtccaaacaattccattctgatcctacagaacaaaatcaaacccgtgatcgagagctattaccgggtcaaaaagcctgtccacgggttcgtcagcggacgatcaataatcagtaatgcagagcagcacaagaaaagcaagtacattttgaacctcgatctaaaggatttcttccatgccgtcaactttggacgggtgaaagggattttcaagagtaccccatttaactttggagacaaggcagcaaccgtcctcgctcagctctgcacctatcagggacggttgccgcagggagcacccacatcccctcttttatctaatctggccgccacctcgttagaccgcgagcttgtacacctcgcgaaaaggtttcatatgacgtacacgcgctatgccgacgatattactttctcctccaataaaaagttcgacgagcagatcgtgaccttcctgatcgagaaggagtgttttgaggtgggggttctgctgaggaaaaagatcgaggagtccggtttcgaaatttctgaaagcaagactagagttagccatcgctctcagcgtcaggaggtgacagggctgaccgtcaacgataaggtgaacgttcctcgcaaatacattagagaaactcgggccatgctacactcttggggccttgggctcctggaagcggagaggaagtatctgtctttgaaaaaaggatggacttccgaaaagcttaactctacaaaactcgatggctcctactttaaaagagccatctacggcaggctcggtttcatcaagtccatccaaggggaggactcaagtccttatttgtcactctgcaagaaggccattacactggacagtaaccctcccaaatttattcaggttgctaaggaaaagttggacatgtacgacgtgtttatatgtcacgccagtgaggataaagaagctatagtgtttccactggaaaaggccttagtggcaaaaggcgtgaaggtattcgtggattcatctgtgatcaaatggggagatagtctggtggataaaatcaatcatgggcttcgagtatcaaaattcgtcattgcggttctgtcccccgctagcgtaaataaagcttggcccaagaaagagattaacgcaatcatgtcaatggagataaaggccgagaagaagaagcttctgccactgctcgctggctctgacgacctcatcaatgaatttcccttgatgagcgataagctgtacaagaagttcgataataacgtggacgaaattgtggatggcttgtgcgagatgctgcaggagacatga

SEQ ID NO: 7657 - RNA, 1407 nt, synthetic construct
  source 1..1407: mol_type = other RNA
atgaaagatatcgacgatctggcacgtgtcctggaggtccccaagggaaatctggtgtatattgcgtatacaagaggactgtcagcgcagtacaagacgtttgaaatcagaaagaagtcaggagggactaggattattcacatgcctaaaggggggttgcgagtgctgcagcagaagctcaaaaagatcttcgatttccttgatcgtaaacccaaatgctcccacgcttaccataaaggcaagtccttccttaccaacgccgtggagcacaagaaaaagcgctttgtctttaatatggatctagaggaattctttcctagtattcattttggaagagttcaaggggtactccgcgccgcctataaaatgccaccttctgttgccaccttcatcgcacacttatgttgctacaacggttctatcccacaaggcgcacccaccagcccaagtattagcaacctggtgagtaacaacctggacaaaaagatattagccttggccatcaagcatcacgtgtcctatacacgctacgctgatgacattaccttcagctatcgatacaggaatttcccacctgccatcggacacttcgcggcaacaggccaacttttcggccccgccgctgttggagccacattagagcagctcatcaaagatcagggtttccaagtgaaccataagaaaactcggctgcagtacaaccactaccagcagtccgttaccggggtgattgtgaatcagttcccgaatgtccgaagaagaaaggttctagaggtccggaagctgatttatctctggaggacgtttggcctggagaaagcagagacttttcgcttcgagaaggctgagggtggagattactttagggccgtgctcttcggcaatctggcatacctcaaaggggttaggggcgagaatgacaaaattgtccggagcttttgtagggacatcctgcggatcaccacaaaggtgccaaactgggtacgcgtggcagcggaagaatttcaggtgaaggacgtgttcctttcacatgcctccgaggacaaggtggctgtagctaagccccttttcgatgcctgccaggctgtcggcatctcagtgttttacgacgctgaagatataaagtggggcgactctgttatcgaaaaaattaatcacggtctgggggaggccaagattatagtaccggtcatctcggagacttttttggaaaagaaatggcctgtgcgggagctgaatgtcgctctcagccggttcatgaaggacaaagcaagaatcttgcccattatatataacatcgaccacctcgacgattaccctttgctgagcgactttcattataaaaagtgggaagataacccagctgaactggtggcccttctaaaggaacgtctgaactctatatga

SEQ ID NO: 7658 - RNA, 1509 nt, synthetic construct
  source 1..1509: mol_type = other RNA
atgaacgtcttcatctccagcctggaggacccgattgtgtctcttcgcttcgctcacagtgtgcaggacgtcgcatctgttctcggcctggatccagcccgctttttctacgtggtccagaatgcagataacgggtcttactacaaacagttccagatccctaaaaaaaaagggggaaagagggatattagcaaacccgtgcgtggactggcccttgctcaggatcgactcgccgcgattctggctcagaagtactcgcccaagcaatacgtgaaaggatacgtgaagggagagagtttcctgaccaatgcccaatatcacgaaagacaacgctggatcctgaatatcgacatcaaggattttttcccttccattaacttcgctagggtaagggggttattcatgtcaagctatttcgggtttaacgaccgagtggcaacaatactagctcggataaccacttttaatgacggattgcctcagggcgcgactacgtccccaatcatagcgaacctcatcgcccataatctcgataagaaacttctctctattgctatttctgagaggctgcgctattcacgctatgccgatgacatcacgttcagctctaaccagaagacagttcctgcatcagttattcgcagctgggaaccactacatggcgagcggagcgtggaactgggtaacgcaattagggaagcttttcggagtgcccggtttgaagtgaacgaagaaaagactagaattctgttctcgtctgagagacaggaagtaacaggtctgatcgtgaatagaaaggctaacgtttggaggggggatgtggccttactccgtatgaaactgcacagtgccagagtccacggcgcccagaacgcagcaaaactgtggctgaaaaccacagacaaccctgaccatttttggcgacacattgagggctggctggcttacatctctcaggtcaggggtcgagacgacccggtaactgcaaaattatgcaagatggctgtactaagtgggctgaagggagccgagtggatcgaaaagtacgctgatatggtgagagagttcgatgtgtttttgagccatgccaccgaggacaagccaaccgtcgtgaagcttaagagaaagttggagagcctgggtataaaggttttttttgacgtcgattccatacagtggggcgacagcatcgtggagaagattaaccacggccttttgaaatcctcattttttgtgccatttctgtccgacacattctccgcaaaaggctggaccaataaggaactcaactccgcaattgccatgaatatcaaccggaaaggccgtatcctccccatctgtgaggccaatttctcaattgccgataattatccccttctcaatgagactctgtatcaacggtggcctgaggatcccgcgttggaagcggccttcgtcaccagtgtcgccgatcagatattgaagatcgttcaacaggagaaatccaagcccaatgacctgtcagactga

SEQ ID NO: 7659 - RNA, 1533 nt, synthetic construct
  source 1..1533: mol_type = other RNA
atggtcaagagcgaaggccaggcgctagagactagagagactcccattaataatgccctactccagctcaggatggcccattcagtgaccgatgtagcatttagtctgggactggaaccaagtaagtttttctacgtggtgcagaacgctgacaacggacgttattacaaggaattccagatacctaagaagaaggggggcatgcgacacatagcaaaaccagtccgcggcctcgctttagcacaagaccgcctggccgcaatcttgcgcgataaatatgaaccaaagcccttcgtgaaaggctacgtaaaaggccagagtttcctcacaaatgccagatatcatgagcgtcagaagtgggtacttaatatcgacattaaggacttcttccccagtattggctttgcgcgggttagaggactgtttatgagttcttacttcggcttcaacgatagggttgcgaccatccttgctaggatcaccaccttcaaggacggcctgccacagggggcaaccacttcaccagttattgctaatatagtcgcccacaatctggacaaaaaactcctggctatcgccgtgaaagagcggctgcgctatagccggtacgccgatgatataacgttttcttctagccagaaagcagtacctccttcagtggttaggggttgggagccgatgcatggtcctcggacagtggatctaggtggggccgtcttggaggcctttcggtcagcccggttcgagataaatgacgagaagacgcgaatccttttggcctctgagaggcaagaagtgaccggcctgattgtgaacagaggcgcgaatgtctggcgccgtgacatcagcttattaagaatgaaattgcactctgctcgcgtgcatgggcctgagaaagcagccaaactctggctgaagacaactgaatcgcccgttcatttttggcaacacattgaaggatggctttcctatatctcccaggttcggggaggtgatgaccctgttacggctaagctgtgtaagatggcagtgcttagcgggttcaagggaaccacatggattgaggcatacgctgagatggtgagggaatttgacgtgtttctgtcccacgcctccgaagacaagcccaaggtgcgaatcctgaagaacaaactggaatactacggcattaaggtgttctttgacgctgatagcatcgagtggggggacacaatcgtcgagaagattaatcacgggctcctgaaatcatcctattttgtccccttcctgtccaaaacattctcgagcaagggatggaccaacaaagaattgaactctgccatcgccatgaatgtcaaccgaagaggaaggattctgccgatctgcgacggtgacttctctattgaggaaaactacccgcttctgaacgagacattgtataaaacttggcccagcgatccaaccgaagaggatcagtttgtcacttccgtggctgatgagatcctcaaaagagtgcaggataagcaatcccagcaaaacgatctcagcgggtga

SEQ ID NO: 7660 - RNA, 1506 nt, synthetic construct
  source 1..1506: mol_type = other RNA
atgaccataacactggggctggacgatccactcctgctcctgagactggctcactcaatccaggatgtagccttcgctttaggcctcgagccggccaagtttttctacgtggttaagaattccgacaacggccgctattacaaacaatttcagatccccaagaaaaagggaggcatgcgcgatattgctaaacctgtcagaggcctcgcactggcgcaggacaagtttgcagcaatcctcgcccagaagtatgaacccaagcagtttgtaaaaggctacgtgaaaggtcaaagtttcctgactaatgctcagtatcatgaacggcaaaagtggattctaaacatagacatcaaggacttcttcccatcaatctcttttgctagggtgcgaggccttttcatgtcctcctacttcggattcaatgaccgagtggctactatccttgccagaataactaccttcaacgacggactcccccagggagcctccactagtccaatcatcgccaacatcattgcacataacctggacaagaaattagtcgagatcgccattagggagaggttgcggtacacacgctatgccgatgatataacattctcaagcagtcagaaggcggttccgtcatccgtcgttaaaagctgggaacctctgaatggagctcgtacaattgcattgggaaatgacgttatcgatgcctttagatctgcccggttcgagattaacgatgagaaaacacgtatcctgttcccctcagagcgtcaagaggtgaccggccttatcgtaaatcgaaaggccaatgtgtggcggagagatatatcgctgctgaggatgaagctacattctgcgcgcgtgcatgggcctagtaaggctgcaaaactctggctgaaaacgacagaaaatccagttcacttctggcaacacgtagaggggtggttgagctacgtgggacagattaggggccctaacgatgcagtcgtggcaaagctgtgcaaaatggcggtgttaagcgggcttaaagggtctgaatgggtggagcgctacgccgacatggtcagagagtttgacgtgtttctgtcgcacgccagcgaagacaaaccaaaaatccggaagttgaaggacaaattggagagctatgggttaaaggtgttctttgatgaaacctctatctcttggggcgacagcattgtggaaaaaattaaccacgggctccttaagtcttcctttttcgtcccctttctatccgaaaccttttccaccaagggttggactaataaggagcttaacagcgccattagcttgaacataaataggaagggtcggattctgcccatttgtgacggcaacttttcagtggagaataattaccctctgctgaacgaaaccctgtataaaaagtggcctacggatgctgctcaggaggaggaattcctggtcagtgtcagtgatgccatcctcaagaaagttcaggacgcccaggcaacctccaacgatctctctggttga

SEQ ID NO: 7661 - RNA, 1518 nt, synthetic construct
  source 1..1518: mol_type = other RNA
atgagcgatccccaggcaaaagtcgatctgattgatctgactgccgacccaatgtttcgcctgttaaccgcccacagtgtggtggatgtggcccacgcacttcaccttgaccccgcgaggttcttctacgtggttcagcatgctcaggacggcacctattataagagtttttctatcgccaagaagaaaggcggtgttaggcacatctccgccccgaagaaaggcctgagactcgcccaagcgcgacttgctgcggtgttgctgaaagcctataagccaaagcctttcgttcatggatacgttaagggccagtctttcttgacaaacgctaaactgcatcaacggcaacgatgggtgctcaatctcgatatcaaagacttctacccaagcattacctttccccgtgtccggggtctattcatgagcagtgccttcgggtttaacgatcgggtggcgacgatcctagcacgcattaccacaacctcaaatgggttacctcagggggcccggactagtcccgttatcgcaaacatgatagcatatactctggacagaaagctgatcgagctggctacgcgccaccgtctcacatacaccaggtacgcagacgacgtcacattgagttcttccagaaaagaagtgcctgccgatgtcgtcaaatcctggtcccccccttttggggaaaggcagttggacctgggaggcgtcttgagcgccgccttccagacagctgggttccagatcaatgatgccaagacccgcctgtcatttcagtatgaacgccaggaggttacaggcgtagtggtaaatcaaaaggctaatgtctggcgcaaggatatctccaggatgcggatgattttacattccgctcgaaagcacggagctgctcaagccgcaacggtctgggtgggcaaagacgcaaacgccgacagattttggagattcgtggcgggctggctctcttttttcgcacaggtgcggggaagggatgaccctgtagtggccaagctgtgtaagctggctgtgttcgctggtcttaaagggatcgagtggattgagaagggggctgatatggtaagagagtttgacgtgtttctgtctcacgcttcagaggataaggagagagtacgtaaactcaacgatcggctggttgacctgggtgtcactgtgttttttgatgaaagcagcataggatggggagattccatagtggaaaaaatcaaccatggccttctgaaatcatctttcttcgtgcccttcctgagcgattcgttcgcaagaaaaggttggacaaataaagagttgaactcagcaattgcaatgaacatcaacaggaagggccgaattctcccaatcaaggacattgggttttcgcttgaggacaattacccgctcttaaatgagactctctaccgcacttggccagccggaggcgaagacgaagctgcctgcagcctggccgacgagattctcctgaaggtccagaccgcccacgaaataaggtccgacctaggatga

SEQ ID NO: 7662 - RNA, 1446 nt, synthetic construct
  source 1..1446: mol_type = other RNA
atgcaggacgttgctttcgcactcaatctggacccagctaaattcttttacgtggtccagcatgcggatgacggcagctattatcgcgagttcgttatccctaagaagcgtggtggtgtgaggtcgattagcgcaccacagaaggggttggccttggctcagaccagattctacgagctgcttcttgagaaatacaaacccaagccattcgtgaagggatacgtcaagggggagagcttcttgaccaacgcgaagtatcacgaaaaacagaagtggatcctgaacatcgatatcaaggacttttatccatccatcacctttgctcgggtatacggcctttttctgtccccgtatttcggattcaatcgccgcgtttcagcaatcctcgccaggattacgacttaccggaatgagctccctcaaggcgcgcgcactagcccaattatagccaacattatagcatccaatctggataagaaactggtaagtctagccgccgatttaaagctgaaatacagtcgatatgccgacgatattactttcagctcttcccaacgaagaattcctgcaggattagttaaggggtgggaaccatcttttggagatagagaaattaagcttggcgctgctctcttggaagcctttaacggcgctggcttcagagtcaatgatgctaagacacggctgttgtttagctacgagaggcaggaagtgacgggcttggtggtaaatcagcaggccaacgtgtggcggaaagacataagccgcctgaggatgatcattcacagtgcacgaaaacatggaccccgcgaggccgcctcaatatgggtgggaaaaaacgcctctgaggaagaattctggcaatttctctgcggctggttggcttacgtagcacaggttcgtgggcagtccgatcccgtggtcgccaaactgtgtaaactggccgtcattgccggtctaaaggggcctaagtggatagaccgttctgcagatatggtgagggaatttgatgttttcctgagccacgcgagtgaggacaaacctagagtcagacttctctatgagaaactggtggaagtgggggtgaccgtctttttcgacgaagactcaattgcctggggtgatagtatccccgagaaaatcaatcacggcctactcaagtctaactttttcatcccgtttttatctaagcggttttcagaaaaaggatggacaaataaagagctgaactccgctatctcaatgaacatctccaggaaggggcggatcctgcccataattgacggccatttctcggtggaggagaattaccccctccttaacgagacactgtataagaagtggcctatcgaggtggaactgcaagccaaattcatctccaccacagcagacgagattctgaaaaaggtcgtggctgaaaagctcaagaagcacgacctgggatga

SEQ ID NO: 7663 - RNA, 1431 nt, synthetic construct
  source 1..1431: mol_type = other RNA
atggcatttgctctggggctcgacccagaaaaattcttctatgttgtgcaacacgccgctgacggcacctactaccgcgaatttcaggtgcccaaaaagcggggcggggtgagaaacatatccgctcccaggaaaggtcttgctctggcgcagaatcgtcttgccgaggtgattcgcagtcattatgtccctaagaaatttgtgaagggctatgttcgaggagaatctttcttgagcaacgcacggtaccacgaaaagcagaagtggattttaacagtggacatccaagacttctaccccagtataggtttcgccagggtcagggggctgttcctgtctcggtactttggctttaatgagcgtgtggctaccattttggccaggatcactacatacagagacggtctgccacagggagcaagcacgagccctctgatcgctaacatcatcgcgcacaacctcgataaaaaactcgttgccatcgccgtaaaaggacagctaaagtatacacgatacgccgatgacataaccttcagctcatctcggagagctgtcagttccgacgttgtgcaatcatgggagcctgcattcggccggcgcgaagtacatctcgggcagtctataaccgaggcgtttaaacactcgggctttgaaatcaatcataccaaatcacggatcttgttcccatttgagagacaggaggtgaccgggctagtggttaaccgtaaagccaacgtgtggagacgcgatattgctcggctgagaatgaagctgcacagcataaaacgcttcggggcaaccgaagcagcgaaagtgtggctgggaccaggtggcgacaagcagaagatgtggtcacatgtcgccggcaacctggcctttattcgccaagtccgagggatgacagatcctgtgctcgccaagttatgtaaggatgccgtaattgccggtatgactggcccgtcctgggtgcttcagatggccgagatggtcagggagtttgatgtgttcctcagtcatgctagtgaagacaaagaaaagattaggcgattgaaggacaagctagaagagtgcggagtaaaggtctttttcgacgagacgagcattaagtggggagattctatcgttgagaagatcaacaacggactgttgaaatcctcctatttcatcccgtttctttctaaaacattcagcgagaaagggtggactaataaggaactcaattctgctatctccatgaatgtttccagaaagggaaggattctgcctattatcgactcgaattttagcgtggaggaaaattatcccctgctgggcgaaacattatacaagaagtggcccgccgatgagtcaagcgaggatgcattcattggcgaggtcgccgatgcaatcctgcaccttatcgagaagaaagtcacttccgtggcaacttga

SEQ ID NO: 7664 - RNA, 1533 nt, synthetic construct
  source 1..1533: mol_type = other RNA
atgaagggaaaggatcggggctcatctattctgttgccagagaatccattcagtgaccctatattccgtctgaaaattgctcacagcgtccaagacgtggcatcagccctcggtctagactctgcgaagttattttacgtgatcagacactgcgacgatggccgctattacaaaaagttcaagatccccaagaaaagtggtggcttcagggatatctctcgcccaatcagaggactggccatggcccaagatcgattggctacgatcctcaccgcccactataagcccaaaagcttcgtgaagggttacgtaaaaggggagagctttctgtctaatgctcagtaccatgagagacaaaaatgggtgatgaacatcgacattgaagactttttcccaagcattgggtttgcaagagttcgcggactctttcttagctcctactttggattcaattcgaacgtgagcactatcctggcaaggattactacatttaacaatcagctgccgcagggggcctctacttctcctatcctggctaatatcctcgctaacaatctcgacaaaggcatcctctcaaccgccattcgcggtcggctgcgttattcccgctatgccgacgatatcaccatctcaagttcacagagacacgtgccctcccttattgttaaaaactgggagcccgataagggtaagagagagattagagtcgggaacgacatcgttgacgcctttaagaaggcccatttcaagatcaatgaaaaaaaaacccggatccagtttacctatgaaaggcaggaggtcacagggttggtggtcaacaaaaaggcaaatgtgtggcgaaaagacgtgtctaagatccggatgaaactacattccgcaaagaaatacggagcggaaaacgctgctaagctgtggctgggcaaggacaagtcaggcaaagatttctggatccatatagaaggctggttagcgtacattaggcaggtcaggggcgttgatgatcctgttctggccaagctctgtaaacaggccattctttccggactgaaggctagtaagtggatccagaggtgcagcgatatggtgcgggaattcgacgtatttttaagccacgcatccgaagataaagaaaaggtccgaattttgaagaatgcccttgaaattaggggcattaaagtattcttcgatgaagactccatagagtggggggactccattgtggagaagataaatcacggcctactgaaatcatcgttctttatccccattttgagcgataagttctctaagaagggatggacaaacaaggaacttaatagtgcgattcacatcaacataaaccggaaaggccgcattctcccgatagcaatcaacggattttccatagctgagaactatcctctgctgaatgagacactgtacaaggtgtggcccaacaacgagattgagcagaatatattcatcgaggaggtcagtgaccaattgctgctcaaaatccagaaaacccatagcgagtccgccgggcttgggtga

SEQ ID NO: 7665 - RNA, 1494 nt, synthetic construct
  source 1..1494: mol_type = other RNA
atgagcgtgtttgatgatcctatcactaaactgcgcctggcacattccgtgcaggacgttgcatttgctctgaacctggacccagccaaattcttctatgtgattcagaattctgagaacggaagttactacaagaagttcgagatcccaaagaagagcggcggggtgaggcagattagccgaccactgcggggtttggctttggcccaggatcggctgtcagctgttcttactgctcattataaaccaaaaagcttcgtcaaaggatacataaaaggggagagctttttcacaaatgctaagtaccacgagaggcaaaaatgggtcctgaaccttgacatcaaggatttctttccttcaatccatttcggcagagtcagaggcctgttcatttcccagatgttcggctttaatgagcaggtttccaccgtcttagcccgcatcgtaacctttgagaatggtctgcctcagggagcatctacatcccctatcatagcgaatatcattgccaacaacttggataaacagcttatagccattgcggccaaagagcgtttgcgatacacgcgttacgcggacgatatcaccttcagtagctctcagaaaactgtaccctcggccctgattaaactttgggagccagacaaggggaaccggcagataaccctcagctctgccgtgcatgacgccttccgccaatccaatttcgcaataaacgaggataaggtacgcatccaatttccgtatgagcgccaagaagtgacaggcctaattgtcaacaagaaggccaatgtctggcgccgtgatgtgtcgaaactccgaatgaaaatccatgctgcacggaagcacggggctgaatcagccgcgaagatttttatcggagaaagcgcagacggcgaaaaattctggcaacacatcaccggttggctcgcatatgtgaggcagattcggggtaacgatgaccccgtggtggccaagctgtgcaagcaggccattctggccggcctcaatggagctgaatggatcagacggtacgcagatatggtcagggaatttgacatttttctgtctcacgcctccgaggacaaggagaaggtgaggaaacttaaagacaagcttgaaggcaaggacgttagagtgttctttgacgaatcatcaatttcatggggggatagtatcgtagagaaaatcaaccacggcttgctgaagagtctctatttcgttcccgtgctctccgagacatttgccaagaagggatggaccaataaggaactcaacagtgcaattcagagcaatattgggagaaaaggaagaatcctacccatcgtgatgcctgggttctctgttgctgaaaactatccgctattaaatgagacgctgtacaggtcctggcccgctcaagagcagaaggagggcgagtttctggaagaaatatctgaccagatactcctgaagatccagaagagtcaccacgaaaaaactgatttaggttga

SEQ ID NO: 7666 - RNA, 1497 nt, synthetic construct
  source 1..1497: mol_type = other RNA
atggcactaccagagaatttcgatcctgaacaggcccacttgttccttggatttgcttactccatccaggacatcgccagcgcactgcacatgaggccggatggcattttccatatcactaagacaagcgaagatggaggctactatcgttcttttcgcattccaaagaaaaatggaggcgagaggagcatcgaccaacctctacgcggaatggccatggcacaggagcgattggccgccatcttacgggcgacctacgtgccaaagtcgcatgtgcatgggtatgtttgcgacaggagcttcctgaccaacgcccagtaccatgtcggtcaaaagtggattctgaacgtagacatcgaggactttttcgggtctattaccttccccagagtgcggggcttgtttcagacctacttcgggtactctgaccgggtggccaccacacttgcccgcatttgcacataccagggtaagctcccacagggcgccaaaacatcccctgttctggctaacctcattgcgcacaacctggataaatctttgctagctatcgcgactaagcactcattaagattttcccgatatgcagatgacattactttcagtacgagtcagagaaggttccccccttccctggtaaccgcctgggaacccctgtatggtgatagggagatccagctcggtgggcccctgaaggacgcattcatgaaagctggtttccgcatcaatcaaacaaaaacacgcatccaaaggtacgatgagagacaggtggtgactgggctggtggtgaataagaaagccaacgtttggcgatcagacataaaaagacttcggatgaagttacactctgcccataagtttagcgcagacgaggcggctaagatatggataggaccgtccgccacgcaggaagacttcgttgcgcacgttgaagggtggctggcttttatacgtcaggtcagaggaaagaacgatgccgtgctcagtaaattatgtcaacaggctgtagtcgctggcgtcacccagcaggcatgggtcaaagagctggctaagaccgtgcatgagtttgacgtgttcctgtctcacgcatcagaagataaacccaaagtacggttgcttagagacgccctggaacacctgggcgtgaatgtttttttcgacgaagatagcattacatggggagactccatcgtggaaaagatcaatgaggggctcctgcgctcaagttttttcgtgccctttctgtcagagacttttgcagccaaggggtggactaacaaggagcttaacagtgccataaccaataacgtccaaaggaagggccggattttgccaattacggatgctggctttgaggtcgaggataattatccacttctcaacgacatcctctataaaagctggcctgctgaaggccctgagcaatccgcccagattgaagaactggcagatcagctcctggctgtgatcgagaaaaataagctcaaagcacagtga

SEQ ID NO: 7667 - RNA, 1497 nt, synthetic construct
  source 1..1497: mol_type = other RNA
atggggctgcccaaccatttcgatccggccacagctcacctccttattggtgttgctcatagtgtgcaggatgtcgctggtgcccttatgatgcgtcctgggggattgctccgtattcttaaaaacaccgagactggtgagtactataaaacgtttgagatccctaagaaacggggcggcacacgaactatcgataagccattgcgcgggctggcaatggcccaggaacgatttgcagccgtgttgctcgaggtttacaacccaaagccatttgtgcacggatatgtcagcgggagatctttcctgagcaacgcccagtatcaccagaggcagagatggattctgaatatcgacatcgaggacttctttgggtccatcggattcgcacgcattagagggatcttcatgtcaaaacttttcggctacaatgacagggtcgccacaatcctcgcgcgaatctgtacctaccaagatagattgcctcaaggggcaaagacatcacccgccttggccaatctcatcgcccacaacctggacaaggagttaattgctctggccgcgaaagaaaatctccgtttttccaggtatgcggatgacataaccttctctagcagcagcaaacgcataccaaggaccctgatcaaagcttgggaacctgaatatggcgacagggtggtagagctcggcgaacggctggaagaggcattcagaggaagcagtttccagataaatcgggacaagacccgcgtgcagctgtttggcgaaagacaggttgtcactggcctgattgtgaatcaatgccccaacgtttggcggaaggacgtcaaaagattaaggatgaagctgtactctgctaagaagtacggattagagcaggcagcttctctttggattgggctcgatgccaagcctgaagccttttggtcacacgttgaaggatggctcggctacattaaacaggtgcggggagagggtgatcccgtgctatccaaactgtgcaaacaagctatggaggcaaatccaaaaagtagtgactggatccaggagcacgcccatatgattcatcagtttgacctgttcctatcacacgcaagtgaggacaagccccgcgtgaagaagctacacgacaagctggtggtactgggagtgaaagtcttcttcgaccaatcctctattagctggggcgactctatcgtggagcagattaacatcgggctcatgaaatcgaacttttttgtcccgttcctttccaacacgtttgctgaaaagggctggactaatcgggagttgaattccgccatatccataaacatcaaccgaaagggcaggattctgcccatatgtgaccatgattttcacgtaggccgcaactatcccctactggccgatatcctgtacgaatcatggccaggtcctgatgccgatgaagaggctaagctgaatgagatcgccgataagttactggcagctgcggaaaaggcaaaacatagccagtga

SEQ ID NO: 7668 - RNA, 1461 nt, synthetic construct
  source 1..1461: mol_type = other RNA
atgctccttggcgtcgcgcacagcgtacaggacgtggctcatgcactgtcgatgccggcgggaggcttgttttacgtgctccaaaacgcagacaacggcaaatattaccagtcttttgagataccgaagaaaagggaaggtacccgccctattgacaagcccgttagagggctggctctggcccaggaacgactggctgccgtgcttaaacagtcctacaggcctaagtcatttatccatggttatgtaaccgagcggtccttcctcactaatgcccggtaccatgagaagcaaaaatgggtgctgaatattgacatcgaagacttcttcggaagcattggattcgctcgaatccgcggcttgttcatgagccaattcttcggcttcaaccacagggtggctaccatcttagcccggctaacaacgtacaaggatgcactcccccagggggctaggacaagtccaattctgtcaaatatcattgcccacaacctggataaacatcttgtcgagatcgctgtgaaagaacgactgaagtattcacggtacgctgatgacatcactttttcttctagccgcaggaagattccaccatcattggtcagaacctgggagcctgagtatggggaccgggaagttatcttgggggaaaaaattactgatgcatttaagaccgcgcattttaggatcaaccccgataaaacacgtattcagctcttccgagagagacaggtggtgacagggctgatcgtgaacgaaggcgtaaatgtctttagaaaggacatttcccgcctacgcatgaaactccattccgggaaaaagtttggactggaacaggccgcaaaagtgtggatcggtcccactgccacagtgaaggattactgggcacatatagagggatggttaggccacataaagcaggtccggggtgacgacgatccagtgctcagcaagctgtgcaagcaagccgccgacatcaaccctgcagctcctgagtggataatacggcacgccgaaatggtgagagagtttgacatttttctgtctcacgcaagcgaggataagccacgtgttagaaaactaaagaaaaaactggaggccgtaggaattaaggtgttcttcgacgaagaaagtatcacctggggagattctatagttcagaggatcaaccacggcctcttaaagtccacgttcttcgttcccttcttgaccaatacctttgccgccaagggctggactaatagagaacttaatagtgcgatcagtgccaacgttaatcgccagaaacgtatcctgcctatttgtgaccacgattttcacgtcgggaaaaattatcccatgctcgaggatgtcctttataaaacgtggccaaaggctggccccaaggaggacgagtggctgaacgccattacagatgagttgcttgcactggtcgaaaaggtgaagctggagacttcctga

SEQ ID NO: 7669 - RNA, 1524 nt, synthetic construct
  source 1..1524: mol_type = other RNA
atggccaataggggggcgcgcatagaagtgaagaatgaagaacaggctcttctacttccctccgaggaggagaaagccttattttcgctgcagtatgcccactctatacaggacgtggcatttgccctggggctagaccctgccaagttcttttatgtggtaaagaattgtgactcaggtgaatactacaagagtttcaccattcctaagaagaatggcggggagcggaagattagcaagccactcagagggttagcccttgcgcaggtgcggttgctgatcatccttaagcacgtttataagccaaagggttacgtgaaatcttacgtggagggagagagcttcctgacaaatgcaaactaccactccaatcagaagtgggtgctcaacttcgatattgaagattttttcggaacaatcacctttccacgtgttaggggactgttcatgtccaaatttttcggttttaatcccagggtatctactatcttagcaagaatttgcacacacgagggctcattgcctcaaggggcacctacgtctccgatcctgtccaacattataggcaatgctctggacaagaatctggtcgctctcgcccgggaatacaagctgaaatacacccgctacgccgatgacataaccttcagcagttctcagaaactgccaccaggagccgtaattagtttgtgggagcctaaattcgggaagagagaaattaccctcggcaaagatattcgggaggccgtcaaaaatgccggattcaggatcaaccccgagaagacaagaatacaatttccatatgagaggcaagtcgttactggcctagtcgtcaacaaaaaagcgaacatccgtcgggctgatatagcccgactgcgtatgaagatccatagcgcacagcgctttggcgcggaatccgcagccaaggtttggctcggtcccaacgctactgcttcatctcttcaaagccacatcgaaggacatctgtcctacgtgcgccaggtgcgcgggaaagacgacgtcgtgctggccaagctgtgtaaatctgcaataatcgccggacttgctaacgccacgtggatgaaagctcaggcagacatggttcgagaatttgatgtgttcctgagtcatgcatccgaggataaagagaaatatggcaagctcaacaaagctctcaaggctgtgggcgtgaagacttttttcgatgtcgacgtgattcagtggggggactcgattcccgagaaggtgaattttggtttgctgaaaagcgactacttcattcccttcctgagcaacaacttcacccgaaagggctggactaacaaagagctcaattcagcaattagtatcaacatcaaccggaagggcaggatcttgcctattatcgattccgacttttcagttgatgataattatccgatcctcgctgaaaacttgtataagaagtggcccgagaaagagagcgaggaagatgacttcattgaggaaatctgcgccgaaatcacaaaaagaatcgtaagatga

SEQ ID NO: 7670 - RNA, 1521 nt, synthetic construct
  source 1..1521: mol_type = other RNA
atgaagtcaaaggagcgcggcagctcccaggtgaaagcaagcattgtctttcacaccgatttccgattgattcaacttcgcgcagcacattcagtccgagatgtggccctcgctctcggattagatccgaaaaaatttttccacgtcctgaaacataccgacgatggacggtattatcgcgattttgagattcctaagaagactggcggttaccggcagatctccaagccggtgaagggactggcactggcacaggaccgcctgtcaactatcctcgatcacgtgtacaatcccggctcttacgtaaaagcgtttgtaaagaaaacctccttcgttgagaacgcccggtatcacaaggcacagaggtggattctaaatattgacctcaaagacttcttcccatctatatcctttcctcgggttcgggggctgttcctcagcacactttttgggttcaatgagagagtggccaccatattagcccgtatctgtacctacaaaggatctctgccacagggggcctccacatctccaaggctggcgaatattatagcgaagtcgctcgacaaaaagatcctggagattgctaaaagtcatcagctgaagtatactcggtacagcgatgacatctctctgtccagcagtaagaaagtgatccccacgctggtggtgaagaactttcacgacaaccctgacggacgagatgtgattctgggcgacggattgaagaacgctgttcggtcaagtgggttcttcataaacgcgtcaaaaactaggctaatgatgccaaataaccgtcaagaagtcactggtttagtcgtgaataaaagggtgaatgtccgccgaacagatattgccaagcttagaatgaaaatccattccgtgaagaaagtaggcttcagtgaggctgctaaagtttgggtggatggtaacgaagctcaactgaagaaccacctcgtagggtggctcgcccacattaggcaagtcagaggtccgtccgaccccgtcttggctaaactttgcctgcaggcccatgaggcagggcttacagaaatcaagtggatcgaggagctggccgacatgtcaaaggagttcgacgtgtttctgagtcatgcttccgaggataaagaaagagtaagaaggctacaggccgagctggaggaacgtaaggttagcgtgttttttgatgagtcaaccataaaatggggcgacagcattgtggaaaaggtcaaccacggcctccttaagagcacattcttcatccctttcttgacggaaacgtttagcaagaaaggctggaccaacagggagctgaattctgccatccagatgaacatgactagaaagcgcaggatcttacccatcaagagtccagattttgacgttgactcgaaatatcccttgctgaatgacacactgtacaagacctggcctagagatcccgcagacgaggccgctttcatctctgaaatttccgatgaactcgtggccttgatcgaaatggaaaagagctctgtttga

SEQ ID NO: 7671 - RNA, 1482 nt, synthetic construct
  source 1..1482: mol_type = other RNA
atgaatgaactcgatttatgtctgttccaacttaagatcgcgcactccgtgaaggatgtatccttcgcactgaaactggacccagaaaagttcttttacgtgcttcagcatactgacgacggcagatactaccacacgtttgagattccaaaaaagaatggaggaaagcgcgctatcgccaagcccttgcgtggtcttgctcttgcacaagacaggctggcccccctgctgcaccacgtttataatccgggcccccacgtgaaagctttcgtgacaggttcatcttttgtcagcaatgcctcttatcacaagggccagcggtggatcttaaacattgatctctccgacttttttcctagcataacctttcctcgcataagagggttatttcttagcaagctgtttggcttcaatcccaacgtgtctacaattctggctcgaatttgcacgttccagggcagtctgcctcagggagcaagtacaagccccgtgctcgcaaatattattgctaattcgctggatcgcaagttcttggaaatagccaggagtgaaaaaatcaaatacagtcgctattcagacgatattactttttcaagctcgaagaagtccattcctaaatgcctggtgaagagcttccatgaccacgaggatggcagagagataatcctcggcaacgacttgcaggatgccgttagggccgctggcttctctctcaacgatcagaaaacccggctgatgaccccaaataatcggcaggaggtcactgggctcaccgtcaacgagagagtgaacgtcaggagatcagacatcaaccgactgcgtatggtgattcacagcgcaaagaaggttgggttcgaggaggcgtccaaggtgtggcttccagacggaaagaacaatttacgggagcacattctagggtggcttgcccatatccgccaggtaaggggtgcctcagacccagtattggccaagctctgtctacaggcacatggcgcgggactgacaaaggtcgggtggattgaggagctggccgatatgtccaaggactttgacgtgttcctcagccatgcctcagaggataaagaccgagtgaggaaattgtctgatgcgctgaccgccggcggtgttaaggttttcttcgatgagagcagcatcaaatggggggacagcatcgtcgaaaaggtaaaccatgggctcctgaaaagtcgtttttttatcccgttcctgacaaccactttttcaaagaagggatggacaaacaaagaactcaattcctctatatccatgaacatcagtcggaaaggaagaatattgccaatcaaatccgaggatttcgaaatcggtgatcggtaccccatcctgaacgaaactctatataaaacctggcctaaaagttccgttgatgaaaccgcattcatccaagaagtcgtggactctattatcaaactgattgaggaagacaaagctgctccttctgtgtga

SEQ ID NO: 7672 - RNA, 1518 nt, synthetic construct
  source 1..1518: mol_type = other RNA
atgcgagtagataaggtgaagtccgagggaagggctgacacagtcaagtctgaggcggaggttctgtttagcctgcagacagcacactccgtcaaggacgtggcctacgctttgggccttgaccccgaaaagtttttttacgtggtgcagcgggccgacgatggccactattacgacactttcaaaatccccaagaaaagcggcggcgaacgggacattgcgaaacctaagaaaggattagccctcgcacaggctcgtctggttcccatccttagcttcgtgtatagccctggtgaatgcgtcaaaggatttgtaaagggcagcagttttttagacaacgcccattatcaccatgcacagagatgggttcttaatattgatctgttggactttttcccatcggttacgtttgcccgagtgagaggcctctttatgtcgtcactattctcctttaatccccgggtagctacaattctggcaaggatatgtacctttcagggagggttaccacagggcgccaccacttcccctattctggcaaacttaatcgctaaatctcttgataaacgcttgacaggactagccagaactcaccgcttgaagtactccagatattcagacgatatcacactctcttgctccaaagcatacgtccctaagagtatcgtctctgagattatcgaaatcgacagtgcttgggaagtgcagctggggagtgaacttaaagatatcattaggcattccggcttccgggtgaatgacaagaaaacccggctaatgaggcgcaataatcggcaggaggtgaccggcctcgttgtgaatgaaaaggctaacatccgcagggcggatatccaacgcctgcgaatgaaaatatattccacacgtaagtacgggcaagctgaggcctcactgctctggctcggggacagcagcaagtctataagtatgcacctggtcggctggctggcctatatacgccaagttagagggcaatcagatccggttctggccaagctgtgtcagcaggtcgtggccgccggaatcagcgacatcgagtggatagtccggctcgctgatatgacgaaggagttcgatgtgttcctgtcccatgcgagcgatgataaatctaaagtgcgtccattgtacgagtccctcaactccgccggggtcaaggtattcttcgacgagagctcaatcaaatggggggattcaatcgtggaaagggtgaaccacggtttgctcaaaagtaggttctttgtgcctgtgctgagcagtaccttttcacgaaagggttggactaacaaagagtctaactcggccattgcaatgaatatttctcgcaagggtagaattctgcccattaagttcagcgagttcgacctggacgggaggtatccaaccctgaacgacaccctctacaagacctggccggaagattctggtaaagaggacgatttcatcagagaagtgactgacgatctgattgcacttgtagagcaggataagcagcttggatga

SEQ ID NO: 7673 - RNA, 1479 nt, synthetic construct
  source 1..1479: mol_type = other RNA
atgaagctccttaatccttccagccggagcattgcaaagcttaactcactcgatgagttatgtaatctgctggggattaataaaggccatctgctcttcatttgttataagcgtcctgacgaactaaaatacaaatctttcgagatgcgcaaaaagcgagggggcttccgcaaaatcgatagcccccagaaaggactgagggttattcaaggcaaactcgcagagttactcgaagaaaatgtcgagtttaaaacctgcgtgcaagggtttgtgaaggagagaggggtcttggagaacgcgaccctgcacaaaaagagtaactgggtcctcaacgttgacatcaagaacttcttcggctctattaactttggtcgcgtgcgcgccgtgtttgtcgctaagccttttgagattcaccccgacgtagctacggttatagcccagatctgctgctttaagaattacctgccacagggggctgctactagcccaatagtgtcaaatatagtggcatccacactcgataaccagatcatcagaagaatcagaaaccaccggttgctgtatagtagatacgctgacgacattacaatctctgctaagcgggtgtttcctcgagaattggcctacatatccgagggcaggactatcgtgggggaggatctggttaacatcttcagcagagcctccttcgaaatcaatcagaaaaagtcacggctccaatccaaatattctaggcaggaagtcaccggtctgattgtgaataggaaagtcaacgtgcccgccgaatataaaaataaactgcgggctgccatacaccattgggtcgacgatcccagggaggcggagaggaagtactatgtggacattcttggccttacaccggaggaggccgaactgactgatgatggctcaaaacttcgacgcaatatttatggtcgtctgagttttctgaacatggttaagggaggagatgacccaacatacatcaagctgattttgaaaatggcagagcatgatcctctgccaccaaaatttgtgaagaacatcaaggcagagtacaagatgtatgatgtattcctgtgtcacgccagcgaggataaagccgacatcgtagaacccctttaccaagaattaagtaagatcggagtccatgctttctacgataagaaagaaatcggttggggcgactccctggtcggcaccatcaataaggcgttgttaaagtctaagtatgtaattgcagtgatgaccgacaactcggttggaaagtcttggccccagcaggagatcaactccgtgctcaatggcgacattagcggaggaacgaagcggttgctcccgctaatattcggggacaaggagaagattctgaataacaacttcctgatgaatgacaaactatacgtggaatggaaggacaaccctactgaaatcgcccagaaagtgcaggaattgctggcccagaagtcgaatgagtga

SEQ ID NO: 7674 - RNA, 1476 nt, synthetic construct
  source 1..1476: mol_type = other RNA
atgaagttgttatctccattgaaccgctctatagccaaactatccagtctggatgaactctgcgggttgcttggggtgcagaaggggcacctgttgtatatttgctacaaaaggagcgacaatgcgaagtataaaagctttgaaatgcggaaaaagcgcggtggctttagaaagattgactctccacagaaaggactccgggttattcagaaccagctggctggacttctacaggaaaatattgagttcaagagctgcgtcaagggattcattaaggaacgtgggattctcgacaacgcagcacttcataagaaatctgactgggtgctgaacgttgatattaaagacttcttcggaagcattaacttcggcagggtgagagccgtgttcattgccaagccgttcgagatccaccccgatgttgctaccgtgatcgctcagatttgttgtttcaataattacttgccacagggtgcagcaacttcccctatagtcgccaatattgtagcttcaacactggataacaggatcataaaacacatccggaaccaccgcctgctgtattcacgatacgcagatgatattacaatctccgctaaaagaatctttcccagacaaattgcctacataaatgatggccagaccatcgtgggtgaagacctggccagcattttcgcgcgcagcggatttgagattaatgagaaaaagagccgtcttcaggccaagtttagtagacaggaggtgacaggcctgatcgtaaataagaagctgaacgtcccagctgagtataagaataaattacgaacggccatacatcactgggtggacaacccggtagaagcggaacggaagtactatatcgacatcctcggcctgagccctgaggaagccgagttaactgaggacggatccaaactcaagcggaatatctacggtaggctgtcttttctggccctggtgaaaggggctgacgatcccacgtacgtgaagctcatcctgaaaatggccgagcatgactccacacctcctaaattcattaagtccataaaggctgagtataaaatgtatgacgtctttctgtgtcatgccagtgaagataaggaagagatcgtgaagcctctgtacgacgagctggaaaaattgggcgtccacgcattttacgacgcaaaagagatctcatggggcgattcactcgtcgggaccatcaacaaggcccttcttaaatccaagtttgttatcgctgtcatgactgacaactcagttggcaaggcctggccccaacaggagatcaattccgtactcaatggtgatatcagtggcgggaccaagaggctcttgcccctgatatacggcgacaaggattcgatcctgaacaacaacttcctaatgtctgataaactctatgtggaatggaaaggaaatccagaggagatcgcacagaaggtgaaggatttacttacccaaaaagcgcaatga

SEQ ID NO: 7675 - RNA, 1488 nt, synthetic construct
  source 1..1488: mol_type = other RNA
atgaaattgcttaatcccccatcgcgcagtattttaaagctgaactccatcgacgaactgtgctctatcctaggggtccagaagggacacttgctgtatatctgttataaacgctctgacgatcttaagtaccagtctttcgagatgcggaaaaagaggggcggcttcagaaagatagatagtccacaaaaaggtttacgcgtgatccagaaaaagctggctgagatctttgaggaaaatatcgagttcaagtcatgcgtgcaaggcttcatcaaaagcagaggaattctagaaaacgcagccctacacaagaagtcaaattggatcctgaatgtcgacatcaaggatttctttggttcgatcaactttggacgggtgcgtgcagctttcattgccaagccattcgaatttcatcctaacgttgccaccgttgtggctcaaatctgttgcttcaagaattaccttcctcagggcgctgctacaagccccattgttgcaaatattgtggcctcaactctggataaccggatcctcaagtacattagatctcagcgtctgatttacagcaggtacgccgatgatataacaatctcagccaagcgagtcttccccaatgaggtggcccacatcaacgacgggaaaaccatcataggagaggatcttgcaaacatcttctcaagggcaagctttgaaatcaatgaaaagaaaagccggctccaaagcaaatattcccgccaggaggtcactggactgatcgttaataaaaaggtgaatgttcctgccgagtataaaaataaactgaggaccgccattcatcactggatagacgacccagtggatgccgagcgaaagtactatattgatgtcctgggtctgagtcccgaggacgcagaactgacaaaagacggctccaagctgaagcagaacatttatggtaggttgagttttctctccatggtaaaagggaaggacgatccgacctacatcaaattagtgttgaaaatggctgagcatgaccctagcccacccaagtttattaagtccattaaggcggaatacaagatgtacgacgtctttctgtgtcacgcttccgaggacaaggagaagatcgtggagcctttgtatcaggagctcagtaaaatagggatccacgccttttatgacaccaaagagatagggtggggcgacagcctcgtgggagtgattaacaaagctctcctcaaatccaaatatgtaatcgcggtaatgacggattcaagcgtcgggaaagcgtggccccagcaggaaataaattctgtgctgaacggagacatatccggcgggactaagagactgcttccgctgatttacggcaacaaggataacattctgggcaacaatttcctcatgaatgacaagctctacgtagaatggaagaataaccctgatgaaattgcaaaaaaggtgcaggagttgctgacacataacgaatctcttaactctagatga

SEQ ID NO: 7676 - RNA, 1476 nt, synthetic construct
  source 1..1476: mol_type = other RNA
atgaagctgctgaaccccccctcacgctcaatcctgaaattatctagccttgactctttatgtgagctcctagaggtgcaaaaaggtcacctcctgtacatctgttacaagcgggccgatgatctaaagtaccagagttttgagatgccgaaaaagagggggggcttccgcaaaattgacgtgccgcagaaaggccttcgagtgattcagcaatccctcgccaaactgctcgaggaaaacgtcgaattcaaaccttgcgttcagggttttattaagaagaggggcattctagagaatgctaacctccaccgaaagagtaattgggttctcaatgtcgacatcaaggatttctttggttccatcaacttcggccgggttagagccgtgttcattgctaaaccttttgaaatgcatcccgacgtcgccacagtcatagcccagatttgctgctttaataattatctccctcagggggcagcgacatcccctattatatcgaatatcgtggcatctaccctggacaatagaatcattaagcacatacgctcacaccgcctgatctattctagatatgccgacgatattagtatctccgcgaaacgtgtatttcctcgtgagatcgcccacatatccgagggcaaaactattataggtgaggacttgtcaaacatcttttctagggccaggttcgagataaacgagaaaaagtcccggttgcaatcaaagtacagcaggcaagaagtgaccggcctgatcactaataaaaaggtgaatgtgccagccgagtataaacataaactacggaccgctattcatcattggattgacaatccagtcgaagccgagagaaagtactatatcgatattttgggcctgaaagtggaagatgctggactgaccggagacggcagtaagctgaaacggaatatatacgggagactcagctttcttgcaatggtcaaggggagcgatgaccccacttacgtgaaactgatcttgaaaatggcaaagcacgaccctagcccaccaaagttcatcaaacccctgaaagagcagtaccagatgtacgatgtattcctgtgtcacgccagcgaggataaggcagagattgttgaacccctttataacgaactcaataagcttaacatccatgctttctatgacgcgaaagagatcgggtggggagatagcctgatcggcacgattaacaaggcactgcttaagtcccgctatgtgatcgctgtcatgacagataagagcgtaggaaaggcttggccacaacaggaaatcaattctgtgttaaacggagacataagtggagggacaaagcgattgctgcccctgatccacggagacaaggaaaccattttggggaacaacttcctgatgaacgataagctctacgttgagtggaacaacaatccagctgaaatcgcacagaaggtgcaggccttactggcccagaaggctgaatga

SEQ ID NO: 7677 - RNA, 1467 nt, synthetic construct
  source 1..1467: mol_type = other RNA
atgaaactcctgaatccgccatcaagatcgatccacaaactggactccctggacctcctctgcaatctgctgggggtgaaaaagggacaccttttgtttatttgctacaaacgagccgacgagaagaagtataaaagctttgagatccccaagaaacgtggtggactgaggaaaatcgactcaccacagaaaggacttcgtgtgattcagcaaaaactggctgaattgttgactgaaaacctggagttcaaaccctgtgtccagggctttatcaaggggcgggggatcctacagaatgccatactgcacaagaagagtaactgggtgttgaacgtggatattaaggactttttcgggtccatcaattttggcagggtgcgcgctgtttttattgcgaagccctttgagattcatccagacgtggccacagtgatcgcccagatatgttgtttcaataactaccttccccagggcgcagcaaccagcccagtagtttctaatatcgtggcgtccatcttagataatcggatcattaagcacgtccgatcgcacaggctcatctattctcgctatgctgatgatattacattgagcgccaagagaaatttccctagggagatagctcacgtgtcagatggtagaacaatcataggagaggacctggccaatatattctcaagagcaagttttgagatcaacgagaaaaagagtcggctgcaaagcaagtatgatcggcaggaggtgacggggctaataaccaacaaaaaggtcaatatcccagctgagtacaaaaacaaggtccgggccgcaatttaccattggatccaagatccgaaggaagccgaaaggaagtacttcatcgatattctaaagctcaatcctgacgaggtcgaacttacggaagacggcagaaaactgaaacataacatctacgggcgcctgtcttttatcgcgatggtcaagggtaaggacgaccctacctatgttaaattaatactcaagatggcagagcatgataaaactccccctaagttcctgaagagcatcaaagaggaatacaaaatgtatgacgttttcctttgccatgcttctgaggataaggcggcaatcgtagagcccctctacgaagccctgactaagattggagtgcacgctttctacgatagcaaggaaattgcttggggagattcccttattgaaaccattaacaaagccctgatcaagagccagtacgtcattgccgtaatgaccgataactctgtggttaaagcttggccacagaaggagattaatgcagtactgaacggcgacatttccggcggcacaaaacgcctcctgcctctgatccacggcgacaaggaaaagatcctcaacaataacttcctcatgtccgacaaattatatgtggtgtggcaagagaaccctgacgaaatagcccagaagattaaagccttattggcaagttga

SEQ ID NO: 7678 - RNA, 1467 nt, synthetic construct
  source 1..1467: mol_type = other RNA
atgaagctgttaacccctccgaaccgtagcatctataagcttgcttccctcgaccggttgtgcgaactgctgggggtaaagaagggcaacctattgttcatttgctataagagggcagatgctctgaaatacaagagcttcgagatcccaaagaaacgagggggccttaggaagatcgacgcaccccaaaaaggcctgagagtggtacaaaataagctggccgaactgctaaacgaaaacctcgagtttaagaactgtgtacaggggttcgttaagaaacggggaattctgcaaaacgccatgctccacaaaaaatcaagttgggtgctgaacgtggatatcaaggatttcttcggtagcatcaactttggccgggtccgcgctgtctttatcgcaaagccttttgagatacacccggatgtggccactgttattgcccagatctgttgctttaataactatttgccccagggcgcagcgacctcacccatagtttccaatatcgtggcttctaccctggacaataggatcattaagcatgttaggagtcaccatctaacctattccagatacgctgatgacgtgaccattagctcacgacgggccttcccccgcgaaatcgcacacattattgacggacagacaattgtgggagaggagttatcgtcaatattcgctcgcgcgcgctttgagattaatgagaagaagagtagattgcagtccaagtacgatagacaggaggtgaccgggctggtaactaataaaaaagtgaatgtccccgccgagtacaagaacaatgtgcgtgccgccatttaccagtgggtcaaggatccaaaagaagctgaaaagcactattacatcgacgtcttgggcctgaaacccgaggatatttcattaacggacgatggttctagactgaaacataatctctacggaaggctttccttcatcgctatggttaagggcaaagacgaccccacttacgtcaagctcattctgaagatggctgaacacgacaagtctcctccaaaattcttgaatgcgatcaaggaagaatatgagatgtacgatgtgtttctgtgtcacgcctccgaggacaaagagacgatcgtggagcctctgtacaatgagcttaaaaaactcggagtccatgcgttttacgatacaaaggtgatagcctggggagatagcctgatagaaacaataaacaagggcctcatcaagtctaaatatgtcgtggccatcatgacagaaaactctgtgattaaggcctggccacagaaagaaattaacgccgtgttaaacggggacattagcgggggtactaagcggcttctgcctcttatccatggtgacaaagagaagatactctcttccaattatctcatgagtgacaaactgtatgttgagtggaaagaaaatccagaggagatcgcaaaaaaaatcaaagacctcctggcaagctga

SEQ ID NO: 7679 - RNA, 1491 nt, synthetic construct
  source 1..1491: mol_type = other RNA
atggccctcaagctgctgaatccaaccgccaaccccctgttcagactcaatagtttggacgctctctccggactactagaggtgaaaaaaggccatctgctgtacatctgttataagagagccgatgtccacaagtataagagtttcgaaatcccgaaaaaaaacggcgggattcgcaaaatcgatgccccccttaaagggcttcggctgatccagaaccggctggcagcgattttgacggagaatattgaattcaagtcatgcgtgaaggcattcgtcaagggagaaggcatcttcaataatgccgtgctgcataagaagagcgactgggtgctcaatgtggacgtgaaagatttcttcggctccatcaatttcggcagagtgagggctgtctttatcgccaaaccttttgagatgcatcctgatgtggcgagcgttgtggcccagatttgtatttttcaaaactctctgccacagggggctgccacctcacctgtagtagcaaacatcgttgctagtatgctggacaacaagatcattaaacacatcaatggggtgaaatctgggcgcctcgtgtactctagatacgccgatgatatcacaataagtgcaaaacgattctttccttctgagatcgcccacttaagcgaaggtaaaaccatcgttggagaatctctggtgaacttattttcccgctccggctttgtgataaacgactccaagagcaggctccagcccaaaatcaaccggcaggaggtcactggactggtggtaaataagaaggtcaacattcccagcgagtacaagaacaaactccgatccgcaatcagccagtggatactgaacccaaaggaagcagaacggaaatattttgtcgacatcctcgggttgaatgaatccgaatttgaagcatctgctactggtgagaatttgaagcgcaacatctacggtagattatcattcatgtcaatggtgaagggaaaagatgaccctacatatctcaaactgatcctgaagatggccgagcatgatgacagccccccgaagttcgtgcgtcttataagggctcaacacaatatgtatgacgttttcatttgccatgcctctgaggacaaagcagagattgctgagccattgtaccacgcactgactgccctgggtctgaatgtcttttatgacgccgagagtattgagtggggggattcgcttatagagacaatcaacaaaggcctgtacaagtccaagtatgttatagctattatgaccgacaattcagtagttaagaagtggccacaaaaggagataaacgctgttctgaactcggatattagcggcggacagaacaggttactacccttgatccacggcgatgcggagaatattctctccgccaattttcttatgagcgacaagctttacgaagtctggaaaggtaacgccgaagagattgctggaaaagtgaaggtcaagattgaaggcagggcgcgttga

SEQ ID NO: 7680 - RNA, 1473 nt, synthetic construct
  source 1..1473: mol_type = other RNA
atgaaattagtcgagcctgataaaaatccactcctaaagctcgccacacttgacgagctctgttcccttctgaatgtgaaaaagggtcaattgctgcatatatgttacgaccggagcggacccgccaagtacagcagtttcgacatgaagaagaaacgtggcggagtccgcaaaattgaggtcccattgaaggggctgggcctggtgcagaagaggctgtctattctcttgtctgatttcatcgcctttaaaccctgcgtcaaaggctttgtcgagggcgaaagcatttgcactaatgcatcactccacaagaaatccaagtggatcctgaatgtggacatccaggacttcttcgggtctataaattttggccgcgtgcgagccacgttcctggcaaagccatttgagatgtcaaacgaggtggcgacagttatagctcagatttgtaccttcgaaaaccacttaccccagggtgcacccacgtcaccggtagttgccaatataatcgccagcatgttggataacaaaatgctccgcctcgcacagaagtatcggctgaggtacagcagatacgctgatgatatcacactcagtagccctagaggttttcctggcgaggttgccaccgctaccgaaggcagaactatcctaggcgaggagctgaaattgatctttgacaaagcccgttttactatcaatcccaataaaagccggctgcaggcaaaaaattcgaggcaagaagtcaccggactaattgtgaacaaaaagctgaatattcctgctgagtataagcataagttacgaactgccatcaagcactggaccagtgatcctgaggaggctgaaagaaacttttacctgaacataaagggcgaggaccccgctacatttgccgtttctaaggggggagaacggttgaaggggaacatttatgggaggctcagtttcatctccatggtcaaaggctcagatgaccctacatatatcaagctcgtgctgaaaatggcggagcacgacacccaaccgccaaaattcatccagaaaatcaagtctgaacataacatgtacgatgtgttcttatgccatgcctctgaggacaaggatgctatcgtgaaaccactttatgacgaacttaaggaactgggactgtccgtattcctagacggagaagagattggatggggtgacagtctgattgatataatcaataaggcgctgcacaagtccaagtatgtgattgccgtaatgactgagaactccgtggataagaagtggccgcagaaggagattaatgccgttttgtccaacgagattaagcacgacaagaacaaactgcttccactgatccatggggacgctgaagaaattctgggtaaaaacttccttatgtcagataagctctacaaaaaatgggaaggggaccccaagaaaatcgcacaagatgtgctggctcttctgcagaaaaacgcatga

SEQ ID NO: 7681 - RNA, 1470 nt, synthetic construct
  source 1..1470: mol_type = other RNA
atgaaattggtgaaatcagacaaaaatccacttttaaagctgagtaccctggatgacctttgtagcctgctgtccgtcaaaaagggccaactgctctttatatgttataaacgttccgacaaggcgaagtattccagctttgacatgaagaagaaaagcggcggggtgaggaaaatcgaggtcccaattaaaggcctcggattgatacagaagcgactgtccgtccttctgtctgagttgatcacattcaagccatgtgttaagggctttgtgaagggggaaagcatctgctctaatgcaagtcttcacaagaaatctaagctggtgctaaatatcgatgtgcaggattttttcgggtcaatcaacttcggaagagtccgcgcaacctttatggccaagccattcgagatgagtaacgaggtcgccaccgtagttgcccaaatctgcacattcgaaaatcatctaccccaaggtgcgccgacctctcccgttgtggccaacattattgcttctatgcttgataaccgggtgctccgcctcgcccagaagtacaggctgaagtactcgcgctatgccgatgacattactctcagttctcctcggaaatttccgcccgaagttgctgcaacagtagagggtagaacggttctaggggaggagttgaaaacgatttttgagaaagccagattcgtgatcaatcctaacaaaacaagattacaggccgctaacagccggcaagaggtgactggcctgattgtgaataaaaaactgaacatccctaaggagtataagcacaaactccgtgctgccatcaaacactggataagcgatcccgtggaagctgaacgcaaattctacgttgacattaagggagaactgtccgaggagtttgtaagtcaggggggcgagcgactgaagaataatatttatggacggctgtccttcatgtcaatggtgaaaggtatcgatgacccaacctacattaagttagccctgaaaatggcagagaatgataatcagcctcctaagttcatcaagactatcaagtcggaacacaacatgtatgatgtgtttctgtgccacgccgctgaagataaagaaactatcgtcaggcccctgtacgatgaattgaagaagctcaacctgaacgtcttcctggactccgaagagatacattggggggactccctcatagacattatcaacagggccttgcacaagtcaaagtacgtgatcgcagtgatgtcagagaattctgtagaaaaaaagtggccacagaaggagattaatgcagtgctcagcaacgaaataaagcatgacaaaagcaaactcctacctctgattcatggaaacgctgaggaaatcttgggcaccaatttccttatgagcgacaagctctacaaggagtgggagaacaaccccgaggaaattgcacaggcggtcttaaagcttctgcagaaagctggttga

SEQ ID NO: 7682 - RNA, 1473 nt, synthetic construct
  source 1..1473: mol_type = other RNA
atgcgtttggtagaatctgataagaacccacttgttaaacttagctctctcgacgcgctctgtgcccttctgaatgtgaagaaaggccagctactctacatatgctatcagcggtcaaataaggcaaagtacgactcattcgaggtgaagaagaagagaggtggtgttcggaaaattgaggtcccacaaaaagggttggctgtggtgcagaagcggctctgcaaactgctaagtgagtggattgagtttaagccttgtgttaagggctttgtgacaggcgaatctatttgctccaacgccctggtgcacaagaaatcaaaatgggtcctgaatgtcgacatccaagactttttcggaagcattaacttcggaagggtgcgcgcagcattccttgccaaaccctttgagatgtcttcagaagtggctagcgtagtcgcacagatctgtacattcgagaatcatttaccacagggggctcctactagccccgtagttgccaacatcattgccagtatgctcgacaacaaaattctaaggctcgcacagaaacaccgactgcgttactcccggtacgcagatgatataaccttatcctccctgagatccttccctggggaagtggccaagctgcttgacgggcgcacttttgttggagaggagctcaggctggtgttcgaaaggtcacgctttagtatcaacccgcagaagagccgattgcaagctaaaaatagcagacaggagatcaccggcatcatagtgaacaaaaagctcaatgtgcctatagaatacaagcagaaattgcgcgctgccatcaaacagtgggctctggatcccgaggccgctgaacgcaacttctacattgatattaaaggcgaggatcctgaaacctttaaagtcatcgaaggcggcaggagactacgggataatatctacggcaggttatccttcgtgtcgatggtgaagggctgtgatgatcccacatatattaatttggcgctcaaaatggccagacacgacacccacccacccaagtttatcaaaaaaatcgaaggggagcacaacatgtatgacgtcttcctgtgccacgcttcggaagacaaggatgccatcgtcaaaccactgtatgatgagctgaaacggttggggcttaacgtgtttcttgatgacgaggagattggatggggtgacagcctggtcgatattatcaataaggcattacatcgaagcaagtatgtaatagcggtgatgactgagaactctgtcgacaagaagtggccgcaaaaggagataaatgctgttctgtcttccgagatcaagcatgacaagagtaaactgctccctttgattcatggagacgccgagattatcctgggaaagaatttcctgatgagtgacaagctgtataagaagtgggaaggtaaccccgaaaagatcgcccaggacgtgctggccctgctgagaaaaaagacgtga

SEQ ID NO: 7683 - RNA, 1467 nt, synthetic construct
  source 1..1467: mol_type = other RNA
atgaaactaatcgaaaaggaagagaaccccctgcgcgatatcaagtccatcgatgatctgcttagcgttctgaacattgagaaaggcaaactgttttacgtactctacgaggtgggcgtggacaagaggtataagaagttcagcatccctaagaagcgtggtggagagaggcccatttcagccccaacaaaaggcctgaggctcgcccaatacaggcttttcaagcttctgacggacaatattgagttcaaacagtgcgcaacagggtttgtctcgaagcgcgggatcattaaaaacgcaaaagtgcacaagggtaccaaatggatcttaaacgtggacatagaggacttttttgggaccattaattttggacgcgtgagaggagtgttcatgtcaagcccatttgatatgcctaaacaggtcgccaccctgatcgccaagatttgcacttttaataatgccctgccacagggagcccctaccagtcctgtgatcagcaatataatcgctagttccctcgacaataagctcttacggttaagcaagcagtacagactgaggtatacaagatatgccgatgacattacactgtccggcttcgggcagcctccgcaagacatagcgaagatcgtggagcagaagaccgtactatctgagaaattggtcgctgccttcacaaagtcagggttcaaggttaatgaaagcaaaactcggctgcaaaaaaaggtggtccgacaggaagttaccggactcgtgatcaactccaaagtgaacgtgccagtcgagtttaaaaaaagtttgcgggcagctattcatcaatggtgtgataaccccgaggaagccgaacggaagttcttggcctctactggcaaaattaaagaaggcgaggaagttactcaggggggtcagatcctgaaaaggaacatctatggccgcttgtcatacctcgctcaggccaagggcaacgaggacccgacctacatcaagttggccatgaagatggggagagcggaccccgaaccccctaagttcctgagacgaatcatggagaagtatcacgagtaccaggtgtttatatgtcacgcaagcgaggacaagactaagattgcctctccactttatgaagcactggaggagcgagagatttctacgttcatcgacaataaagtcattgaatggggcgattccctagtcgatacaattaaccatgcgctttataaggctaaactcgtcgttgcagtggtaagtgagaactctctgggtaagtcctggccccaaaaggaaatcaatgctgtgctcgcatcggaaattcagggtgaatctaagctcttagttctggtagatggagatggacaagagctgctgggccggttgttcctgctgcaggataaactctaccgccagtgggaagataatccagacgagcttgctgacgaaatcgctcgtatagctatgaaaatacagtga

SEQ ID NO: 7684 - RNA, 1695 nt, synthetic construct
  source 1..1695: mol_type = other RNA
atgccccccctgcctgattacgcctctactgagctcctgctgggactgaagaccagaaaagatctagcctcctggctgggagtgagcgatcgggcattaaggtatatgctctatcggctgggcgatggcgacaaatacagcactttcagtatcagaaaacgaaacggggggttgagagagattcacgccccaaaaaaggcccttaagtacctacaaaataaggtcgcgcatgcgcttgccggtgtggttcccgtgcgacagatcgccaagggatatgtcccaggcaggagcatctacgatcacgctaagatgcacagatcaaaaaagtgggtcgtgctcgtggacttgaaatcctttttcccttccattaacttcggccgcgtcttgggtctattacgagctccccccttctctcttgaaaacgaggttgcagtagctgtcgctcagctgtgtacaagggctggtgaactgccacagggtgcaccctcatccccagttatctcaaatctcatctgtcgaaaactggatagacagctgcttgagctcgcaaagcaggcagggtgtggggtaagccgctacgccgacgacatttgcttctctacaaatcggaagagggtgagtgtggaaatatgcgactttgttaacgaacatggatgggtgcctggggccggattgaaacaactgatatgctcaaacggcttcgaaattaacttcagtaagttccgcgtgcatgaaggtcgggatcgcaaactggtgaccggactggtggtcaataaaggcgtatccactcccagcaggtggcgcgatcagctgaggagttcacttcacgtgattgataaatacggagaggccgcaggagtagaaatcatatccggctggacctccggcttttttcgcaaggagcctggggacgtcctgagaacaattagggggaagctgggctatttaaaatggatcgacaaggtggcaaatcaccttgctaccgatgccctgaggcgcaattttccctctttggccagtttaatgcctatcagcaacgacggagtctcatttcgtatcatggctgagggcccaacggacttgctgcatctggaggccgcgctcgactatctgcgcaagtcggggggcttcctggatgtaagaccacggttccagaacttcttaggcgacgttggcgattctgagctttgggagactcttctccggatagctaaggccgatgtgaatgaactgaccattggagtgtttgattgcgattcacctgcttttatgaagaaaacgtctctggttccgggcggtaacatccagctagggccgagggtttacgcgttttgcctcgcaccgcctggaacatctatcagcaacaatttctgtatagagtccctctattctcgtagcgacgcgaccctcgtcgacggaagtggcagacggctctttttcggggacgagttcgactccgcctccggcttcagccacgatggcttgtacaagtgtctgcatccaaaaaagaaggctattgtggttagcgaccaagtggcacgagtccacgatggggccagcgtgctcctctcgaaagctggttttgcatctcaggtgaaggacaaagccccaccttttgacgtggtcagtttcgacggttttagacccacatggttggggatccgtgcactggccattgctgccgtgcggaagtga

SEQ ID NO: 7685 - RNA, 1689 nt, synthetic construct
  source 1..1689: mol_type = other RNA
atgccacctcctagcagtacagttgaagtgttcctgtcactgaagacgagggctgatttggcctcttggcttggcgtgagtgatcgggccctcagatacatcctgtatcggctcgaagaggctgagaaatataagaccttcttggtgcgcaagcgtgacgggggatttagagagattgacgcaccaaaacccgccctaaagtatctccaggagaaaattgcgtccgcactgatcgaagtgatgcctgtacgtcaaatagccaagggttatgttccaggcaggagcatttacgaccacgccaaggtccatcgcacaaaaaggtgggtggtgctagtggatctgaagcagtttttcccgtcgatcaacttcgggagagtgttagggcttttaagatctgcccccttcaacttggagcaggaagtagccgtcgcagttgcgcaactttgtacaaaagcaggtgctctgccccagggcgctccatcttctccggtcatctccaatctgatctgccgaaaattagatcggcaactgctggagctggcgaaaaatgccggctgttccgtctctcgctacgccgatgatatatgcttgagcaccaatcgcagacaggtgagtaagagtatctgcgagatccttcccgaacacggttgggtccctggggtcggtttgaagcaggtgatttcctccaacggcttcgaaatcaacatctcaaaatttcgggtggcatctggcagggagaggaaactggtcaccggactggtggtaaatcggggcgtcagtgtgccaagacgatggcgagatgagcttcgcagctcactgcacgtcgttagcaagtacggcgagttgcggggcgccgagatcatttctcagtggaattcgggcttcttcagaggggacggatcaaatgctctgcggaccattaagggaaagcttaactacctggactggatcgatcgcgtcgcgaggcgttctgctatcggggctctgagacgacagttcccttctctcggaacactaatgcctcggcccaggggcggcataccatttcgagtgatggccgaagggcccaccgacctcctccacttaaaagcggcttttgaccggtttcgggatgacggacacctctttgacatcctgccccggttccagaatttcagcggggacgtaggggacagtgagctgtgggagactctgcgacgcatagccaaagccgacgtgcatgagctcactgtgggcatctttgactgcgattccccagcttttcttaggaaatcttccctcgcacccggaggacacgtgcaagtgggagagaaggtttatgcattctgtctggccgctcctaactcctcactctcaggtgagttttgtattgaaagtttgtacagccgcgaagacgctaccatgttggacggcagtggcagaaggctcttttttggagatgaattcgacgcaactaacggactgtcacatgatggtgagttccgcaggttacatcctcagaagaagtccatagtggtgagcgatcaggtgacgcgcgttagcgggggaggtagcgttctcctgtcaaaggccaattttgcctccctgattagcgaaaaggttccgccattcgatagagtaagctttgaaggcttcaaggaaacttggcgtgggattagagagctagtcattgcaaactccaggaaatga

SEQ ID NO: 7686 - RNA, 984 nt, synthetic construct
  source 1..984: mol_type = other RNA
atgtccgttaagagtcggtctgacttagctggctggttgggggtttccgagagggccttgcgctatattctgtacaagcttcccgacgagcggaagtattcaacattcgaaattaaaaagcgcaacggcaatgcccgggtgatagatgcaccgtccccagcattgaagtttctgcagagcaagctggcagaaaccctttctgagatcgccccgccccgtcagctcgctaaaggttacgtgagggaaagatccatcttcgatcatgcgaaagtgcaccggtctaagagatggctagtgctcgcagacatcaaagatttttttcccagcatcaacttcggcagggtgggagtatttcgggctgccccattttcgttcggtcacgaggtcgcggtttgcctcgctcagctgtgcaccaaaggtggacagctgcctcaaggcgcccctacatcccctgtcatatctaatatcgtgtgcagacgcctagatagagaattactggagttgagtaagcgaagccgttgttcagttagcaggtatgccgatgacgtctgtttcagtactaacactagggacatctccgctcgcgtggctgacttcgttggggaagcaggatgggtgccaggcctggaactgaaaagcgtgtttcagcgcaatggattccaaattaatcctaacaagttcatggtccggtgtggccgagagaggaagctcgtaacggggcttagcgtgaactcaggggtcagtatcccccgttcatggagacgacagctccgctctgcccttcatgtgatcagaaaatatggcgaggtccccggggactccattgtcctgtcatggaggccagcctttcaacgcgggagtgctgtgaatattggccaggtaattcggggtaaagtgagatacgcccattggatagataggctggccgggagaggctctgttgaggcactgcaccggaactaccgagcgggaagcatgggatga

SEQ ID NO: 7687 - RNA, 1695 nt, synthetic construct
  source 1..1695: mol_type = other RNA
atgggcccgctgtcactgagccctgaagccattgccttttctggcctaaaaactcgggccgagctcgctggatggttaggccttacagacaagaagctctgttaccttctctacgtgctacccgcaacacagaaatacattactttccaggttgccaaacgggatggatctagccgaaccatcgatgctccccaccctgccctgaagcagattcagagaaagctcctgagtgttttccgcgaactggctccggctacaggggttgccaaaggatatgtcaacggagtgggggtcatcgaccatgcacggctgcaccggagacagcgacacgtcgtattggtggatcttgaaaacttcttcccatcaattacctttccacgagtgagaggtgctttgctgggcaagcctttcctgtttcccccgaaagtggccacgtgcatcgctcagttgtgttgcaaggacggagttttgccacagggagcgcctacctcacctgtgctgtccaacttaatttgcaggtctttggatcataagctgcttgcactggccaaagcaaaccgttgccgggtgtccagatatgctgatgatatctgcttctcgacgtccctggttgaggtcccctccatcatcgccactctttatgacggtaattacctggtagggccagccttgatcgcagccattcacgccagtggctttaccatcaatcagaagaagttcaaagccaagtcccagcgaacccaacagctcgttacagggctggtcgtcaatcgcggggtgtccctgccaaggagatggaggcgtcagctgcgcgtgctgcttcatctcgcagacaagaagggtgctgcacgggcaaccgagatcgccagtgcctggaccaagccagtagcgtttagacgtggctcggggagtatagaacagttagtgcgcgggaaaaccaattacgctcaacatgtggacttgaggtgtgacaaatctttcagtgagtctatttataggaactatggcggtgtgcggaagctcatgcccagaccactgagaggcatagctttcagggtcatgacagaagggaagactgacctgttgcacctggaatctgcgttaaagtggttccaggagagagctgagtttgcagagttcaaaccccggtttctcaatttccctggcgacattggcgacgtagagctgctcaaaactttacagcgtatagcaaaaagcgacgttcccgaactaaccgtcggcgtgtttgattacgacaatatcaaggacatgaacaaaattgggctcgcccccggagcgcatctgcaactagggagccgcgtctatgccatgtgtctgggtgagcctgctggtttcacgggaacaaggttctgtatagagaacctttaccaaaaaaaccagctcgtagctatgacatctgaggcgaggagggtgtttcttccagaggatttcgaccaagatggtatcagcctagacggcctgtttaagcgagcccaacctcgcgctactgccgcgatcgtctcagataaagtggtgaggctcagcgatggctttagcgcctcactgagcaaggccgaatttgcagagatgatattccgctccgtgcacccttttgatcagatcgatttttccggcttcggacccacttttaatgcactgcgccggattgtggaagaagtgagcctcgccggatga

SEQ ID NO: 7688 - RNA, 1692 nt, synthetic construct
  source 1..1692: mol_type = other RNA
atgggaccgcacagctatagtccaggcgcacttgcttttttaaaccttaagacacgagctgatttggccgggtggttgggactgaccgataggaagctctgctacctgctctacgcactcgatgcctccaaaaagtacacttcctttcagattgccaagaagaaaggaggggtccgcactattgatgctccccacccggccctgaaatacattcagcgtaaactgatgcacgtgctagtggaactagccccaccaacaggcatcgctaaagggtacgttgcgggtgtgtccaccatcgatcacgcatggctccaccgacgccaacggcatatcatcctggcggatctggactccttcttcccaagcattacgttccagcgcgtgcgtggtgcactgttggccaagcccctgagcctgaccgcaaaagtggctacctgtattgctcagttatgttgcaaagatggagctcttccccagggggcccccacatcacctgtattctccaacctgatttgtagatctctcgaccacaaattattagcccttgctaaagctcatagatgtaaagtttccaggtatgccgacgacatttgcttctctactgaccttaaagttatccctaccacaatcgccagctgggtgggtgataggtatctagccggaccctcccttatcagcgcagtgtcttcgtccgggttttctctcaacccaagtaagttcaaggtgcggtccaaagagtctcagcaactggtaactggactggtcgtcaatgacggcgttagcctgcctaggcattggcggaggcaattgcgggtcatcctgcatttatcatcgaagaggggcctggtgcgcgcaaaggagattaccgacggctgggcacgacctgctgcttcaaggtgtgaggcagattcactcgaacactttatccgaggaaagacttattttgcgcagtacgtcgattttcggtgccggagaaagtttagtgagagcatataccgaaattatagtggaatgagaaagcttatgcctagacctctgtctggggctagctttagggttatggcagagggtaagactgatctgctgcacctggaggtggccctgaagtggttccagagtaatggggaatttacagattttcggccacgtttcgtcaattttcatggcgagacaggcgacgtcgaactcatgaagacactcgaacgcatagccaaatctgacatacccgagctcacgattggcatcttcgactgtgacaactcaaagttcatgctgaagaacggcctcagcccagccacccatcagtctctgggcgggaaggtctatgccatgtgcttgggcgcacctctggcgctgaccaagtcaaccttctgcatcgagctactgtaccccaggagccaactcctcacaatgaccagcggagggagacgcatctttttgcccgacgaattcgaccttaacagtggcctgacccctgacggtctatacaaaaataaattccccaaagccacggccccgatagtatcagaccacgtggaacgcgtggtggatggtttctccgccttgttgtctaaggctgattttgcagatatggtccaccaggccgtgcatccattcgatgctatggactttagtggcttccgggccactttcgacgcggtaagaagagtggtggacgaggtttattcgtga

SEQ ID NO: 7689 - RNA, 1656 nt, synthetic construct
  source 1..1656: mol_type = other RNA
atggctctgtctagcaggcaggatcttgctaagtggctggggctgactgaccgcgaactacggtatgtgctttatgcgctgtcctctgacaaaaagtacaccacctttactatcaagaaacgcacaggtgcagaccgggttattgaagcaccccacccagcgctcaaaaatctgcagaggaagctccttaccgcgatctccgaaattgccccggcgagtggcctggccaaaggctatgtcctaggacgctctacgattgaccatgcatggctccataggagaaagaggtttgtaatcctcgcagatctgaaggaattcttcccaacgatcacctttcggagagtgcgaggcgcccttcttgcaaagccgttccaattgccgtcggctgtggccacttgtgttgcccaactctgttgtaaggatggcgtcttacctcagggtgcccctaccagcccagtgttgtcaaacctgatctgccggagcttagaccacaaattgctgcagttggccaagaaacacagactggccgtttctcgctacgttgacgacatctgttttagtacatctcggcctaccattccaggtaatattgctgtcccacatggtgccgagtgggaagctggccctgagctcactgaggccattcgtgtctccggattcgagttgaaccacagcaagtttaaagttcgatctcgcgagactacccaactcgtaaccgggctagtcgtgaaccacggtgtgtcgctcccacgtagatggcgtagacaacttcgggtgctgctacacctggtgaaaaagcatggagaaaagaaagcaggggagatagccgctagctgggtcaggccaactgcctccaggagaggctttgcgagtatagagcaggtaatacgagggaagtcacattttgcccagtacgtggatcgccgatgtaaccgcgcttattccgacgcactgttccgaagctacccaggacaacggagactgcttcccaggcctcttaggggagtgcagctgaggttaatggccgaggggaagacagacttattgcacctcgaggctgcccatcgggcctttaatactgccggcgaatatgcccacattagacctaggttcgtcaactttccctcagacacaggcgatgtcgagctgttaaagacactgaatcgcattgccaaatctgacatcccggagctcaccatcggcgtgtttgattgcgacaatcccaaattcatgaaggacgctggactccagcccgctggatacgtgcagctggggtccaacgttttctgcatgtgcctggcacctcccccatcccttgctggagtgcccttctgcatcgagctgctgtatgaaagagatgaactgtgcgcaatgacgacagatgccagacgggtgttcctccctgatgaatttgaccaggcaaccggtttgtcacacgacgggttgtaccggagaacaaatcccaaaaaatcagcactggtagtaagcgatcaggtggttcgcgtcagtgacgggtacagttccctgctggggaaggctgatctcgctacactagtgagccagcaggtgcctcccttcgaggagatgaacttcggaggctttcagcccaccttcgatctgatcggcagcatcatagatatggtgcatggccgttga

SEQ ID NO: 7690 - RNA, 1734 nt, synthetic construct
  source 1..1734: mol_type = other RNA
atgtcagcatcacctccacctattaaaaaaacttcgctgctgagtcctaacgcaattgccttcagatctatcaaatcaagaagcgagctggccaattggattggtatcaaggagtccacgttgatttacatcctatatcgtctgcccacttctaaaaagtacacagacttcctgatccctaagcggaacggtggcaccagaatgatttctgcccccagaaaggctctcaaatacgcacaaaaacgaatctcctcggtgttatacgacatatcaccaccccggaacctgagcaagggctacattccgggacgagggattttcgaccatgcctataggcaccgtcgccgctccacagttgtcaccgccgatatcaaaggcttttttcccagtatcaattttggcagagttagagggatgtttgccgcagctccttttggcctgccactggacgtggcaactatgctggcacagctgtgctgcaaggatggagagttgccccaagggagtccaagcagcccagctatcagcaacatcatatgcaggtccctcgatctggatctagccggcttcagcaggaaacacaggataacagtcacgaggtatgcggatgacgtgtgctttagcactaatatgaggaagaatctctttcccctggtggaacggaatgacctactgggcgaagtgccaggaggagaggtcagtcgtattttcgagaaaaacggattcgagcttaacctgaagaagtttaacttgtccaagtctaactcccggcagatgatcaccggactgatcgtgaattcccacgtaaatgtgccgaggcagtggaagcggcagttacgcacgctgttgcatttaaggtcacgcatggaggatgcgcaggctactgaaatagccaacacatgggctaggcctcaggctagccggaaaggtgtcaccgagtctattgatcatcttatccgagggaaggcctctttcgctgcgtatatagactctaggtccggcactcggcacattgctagcttgcacagggggtatccaaaactgcgtcaaatgctcccccgaatgaatccttcattccctgtgcgcattatggcagaaggacccaccgacctcttacacctagaggcggcgctgcggcactgtagtgacagaatcgatttctctaatgttgctttgagacttcacaactaccagggcgatgttggggacaccgatatgatcaagacactccatcgcatcaataaggtcgatgtggaagaactgaccatcggaatttttgaccacgacaaccccagcttcctgaaagagataagcctcaacgaggggagtcatgtccggcttgggcgcatggtgtttgccgcttgtctttccagaccgaaattcgtgaccggtaattactgtatcgaaagtctctatcggcgaattgactcctccagagtcacttcggaaggccgacggctgtatttctccgatgagttcgatgctgagggcctccattcacagggtgttctgagacgccagtacccgaagaaaaccgccctggtgctctctgaacgcgtgtttgacccaaaggatcccaacgtatcacttacattaagtaagacagactttgcagccatggtaaacgccggagccgccccattctctgatatggacttctctgggttcttgcctacccttgcacatctccgcaagatgatcgacgaagccatgtactttagcggcaatagctga

SEQ ID NO: 7691 - RNA, 1737 nt, synthetic construct
  source 1..1737: mol_type = other RNA
atgccttcctctccccccgtgaaaaaaaacagtcagcagttgtctgacagagcactagagttcaaggccatggctagtcggtccgacctggcacagtggattggcataaaggaaaagactctactgtatatcctctacaagcttagtgattcggagaagtacaaagactttacgatctcgaaacgtgatggaggtacccgtctgatcagtgccccattgaaagcgctgaaattcagccaaaagaggatctcagcgatcctgcaggagatctccccacccaggcacctggcaaaagggtacgttcctggaaaaggcatattcgaccacgccttcttgcacaagcaccggaagaccgtggtaacagcggacataaccaacttcttcccttccataaattttggaagagtgagggggatgtttctctcccccccgttctcacttccaacctctttagccactatgttagctcaactttgttgtaaagatgggcagctgcctcaaggttccccctcttctcccgccatctccaatatcatttgccgctccctggatttagaacttctggaattctccaaaagacaccggatttctgtgagccgctatgccgacgacatctgttttagtactaacatgaggaaacccattttcgggctgtatgaaattaactcacagtttggcaactttccgggaacagagctctccgatatcttcactcgcaacggcttcaccctgaacatcaagaagttcaaggtgtcgaaatccaatagtaggcagatggtgacggggctgattgtgaatgacagagtcaacattcctcgggcctggcgaagacaattacgggtcctcctgcatctgcgtagccgcatggaggatgcagcaactaccaaggttgttaattcatggagctcccctttaccctcacgcaagggcgagacaagtagcattgacaatctaatacagggaaaggccagctttgcagcttatattgacaggaggtctggtacgaatcatataggcggcctctaccgaagctatcctaagctgcgcggcatgttgccacgggtcacgcagacatttcccgtgcggattatttctgaaggcccaactgatcttctgcacctccaggctgccctggagcattacggttcaaagctcgacctgagcaacattagcattaagttccataattaccagagcgaccagggggatgctgatacccttcaaacactgaggaggatcgctaaggtagatgtcgaggagctgactatcggaatcttcgattacgataatcctaagctcctccgagatctttccctggacgccgggggctatgtaagattggggcgaatggtcttcgccgcatgcttggctcgaccggctcaaactaacggcatgtactactgcatcgagagcctgtatagaagagatcaggcctcacggaccacaaccgaaggaagaagactatttttcgctgacgaatttaaggaggatggatcaagtcaggacggctcactgcgccgggagcatccaaagaaaagtgccctcgtgctttctgaacgagtctttgatccagcgaaacctgaggtgtctctcaccttgagcaaaaccgactttgcctctatggttttcacaaaggctgcaccatttagcgacatggactttagcggttttctgcccacactcacactgttgaggcgtatggtggacgaagccatgcgctaccagggaatcaaatga

SEQ ID NO: 7692 - RNA, 1725 nt, synthetic construct
  source 1..1725: mol_type = other RNA
atgcccgtcaaaccaccaagcttgtcgaacagaagcctccagttcttggccattagaacaagggcagacctggctaactggatcggcctgtcagagaaggcgctgctatatatcctctacaaattgagtccagagcgcaagtataccacctttctcatcaagaagcgcaacgggcagtttcgccggattagtgcgccccagaaggccctcaaattctcccagcaccagatttctctagcaatccaagaaattactcccccacgacacattgctaaagggtatgtgaagggcaagagtataagcgatcatgcacgccagcatgttcgcaaaaaaatcgtggtgataagcgacctgaagaacttctttccatccattaacttcggccgagtgagggggttattcctgagcccgccttacagttttcctacagacatcgccactattcttgcccaaatttcatgtaaggacggagaactgccccagggatcaccgtctagtcccgcaatcagcaacgcaatctgtcggaaacttgacaggcagatcttgcagctcgcctctagaaatcgggtgtccgtgagccggtacgctgatgacatttgcttctctagcaataagaagatcagcctttcaatctgcgacacctcactgataaccggagatgtcgctggtcaggccctgaggggaatcatccaaaataacggcttccaggtgaatgatgccaagttccacagaatcccctataatcaacgacagatggtgaccggtctggtggtaaacgaaggtataagcataccacgtaagtggcggcgccaactgcgggcaattttacacttgcgaagcaaatttgatgaccctaggtccactgagattgtgaattcctggtcatcacctcaggccagtcgcagtggcaaaattacgtctgttgaccatctgataaaaggtaaagccagcttcgctaagcatattgataggacaagtggtagacgtgtcgtcgagtcattacacagaggctacccaagcctgtccgaactgtttcccagggtgtcccccgaattcccagttcggataatgaccgaaggctctaccgatctcatccacctggacgcagctctccaacgatatgaaaagcagcttgaactgttcaatatctctataaagctgcacaattacatcggggacacgggagatgtggacgtgttgagcactctccgaagaatcgcgaaagtcgacgtcgacgagcttacaattgggctgtttgattgtgataaccctcggctcatgaaagagatctccctcgaggccggctcctacgtacggcttggaaggatggtattcgcagccgctctggctcctcccaactcttccaccgtgcctcctttctgcatcgagtccttgtatccgcgcgagcagtctactcgtaggacaaaagaaggacggcgtctttttttcggcgatgaatttgataagtccgggaagttcattggggaggacatcaatagagagtttcctcagaagaccgccgtagctctctccgagaaggtctactcaagttccgacccctctacatcgctaacgctgtcgaaagttgactttgccaacatggttagctctggggcccacccattcgaggacatcgatttttctggatttctgccgacattaaatctgcttagggcaatgattgatgatgcgactaggcatcgctacagaggcaaggagagatga

SEQ ID NO: 7693 - RNA, 1584 nt, synthetic construct
  source 1..1584: mol_type = other RNA
atgagtccagaaaaaaagtacaaaagcttccggatttcgaaaagaaatggaggcgaacgggagattagtgcccctacaagcgtcctcaaaaagatacagaaacgtattgctttcggagtcgacggcgtccgcaagaaaagcctgatcagcaacgggttcgaaaaggggcgatccatttttgaccacgcacagccacacaaacggaagtccctggtgattacagcggatgtaaaggacttctttccgtccatcaatttcggcagagtgagaggcgttttcctgagccccccctttggcttcaataataaagtggcaacgttgctggctcaactatgtacagacggtgccagtcttccccagggagcacccagttcaccatcaatcgccaacgttgtttgcgtccaattcgaccgattacttgttaccctcgcaggaaagtgcaggtgtagcgtaactaggtacgcagatgatatctgcttttctacgggaatggctgacgtgcctaagtacattgcagtgcgaaaagacggaaactatgtgccaagccaggccctgatcaagacctttaaagatggtgggttcgagataaacttggataaattccgggtggtagatgggaaggacgccctcgtcacagggttgaagtatcggggaggaatcggcctgcccagaaagtggcgccgcagacttcggactgagctgaatctgctacgcaagtatggcgacggcgccgagaaaatcatagcgtcatggggtggcgttactgaggttgctggcttgcccgagtcccaagggagccctaggatcctcggaaagattggcttcctccgctggcttgatggcaaagctggatcctctaacgccctccgaatggccaggtcttacccccagctcaggaaagaatttcgggcggtaatcccatacgaaaatattgacttactcgtcgagggtgtcaccgataaggtgctgctgctagctgccctgtccgccttgcaggcaaagggcagcttcagtgatctgaagctgaacttccctgagtcagctatgaagggcggcccagacctggaaaaaacagtgcgtctggtagcatctaccggtgcccgccgcaatttgactatcgccctttttgattccgacgattcagaggtgttagctagggcagggctggcgccccaaagtggagtctactatagggccatcgccagcggggtgtatgtgatggccttaaagcctcctccttggatgctggtggaatccttttgtatagagaacctgctcagaaacgacactttttctgtggaagatagccacggtagacggatgtttctcgcgaatgaattctctgagaacggtctgcatcagtctaaggagttctttagaacccgtccgaataagaaagctatcgttgtggactccgacgtgtattccgtcaaatcagggaagtcgatggctttggctaaatatgccttctcagagcttgtggcaaacgggcaggctccagaggaagattactacggctttcatgggacctttagtctgattcaggaagtctcttacgattttgcccttgacaaggtgaggtga

SEQ ID NO: 7694 - RNA, 1584 nt, synthetic construct
  source 1..1584: mol_type = other RNA
atgtcagcagaaaagaaataccgatcattccaaatccgaaaaaagaatgggggtcagagggctataaccgctccaaccgacgtgctgaagaggatacagaagagaattgcatttggcgtagatggagtcagaaaacgcagcttaatttcacacggatttgaaaaaggcaggtctatcttcgatcacgcgcggccccacaaaagcaaatccttcgttattacggccgacattaaggacttttttcctagcatcaactttgggagagtgcgcggcgtcttcttgtctgcgcctttcggctttaataataaagtcgccaccctgctggcccagctttgtacagaaggaaattgcctcccccaaggagctcccagctctccctccatcgctaacgtggtgtgcgtacagctggaccgccttctggtcctcctggcagggaaatgccgttgttctgtcagcagatatgctgatgacgtctgcttctcaactggaagttcgactgttcccaagtatttaagcgtgcgtaaggacggaaaatacgtcccatcccaggccctcctgaagacattcaaggattgtggcttcgaagtgaacttggagaagttcagagtcgttgatggcaaggacgcgctggtgaccggtctgaaatacaggggtggcatcggactcccaaggaagtggcgcaggcgcctgcgtactgagctaaacctcctgcggaagcatgggtctggggcgaacaaaataatctctggttggagtggggttcaagagatcgccggcattaccgaaaaaagcgactgccctgggatcagcggcaagattgggttctcccactggctcgacgtgaaagccgggagtagcagaacgctgcgaatggcaagaagttatccgcagctgcggaaagaattcaaggctgtgattcctcaccagaagatcgatttgcttgtggagggagtgactgacaaagtgctcctgcttgcagccttggccgcccttcaggtgcgaggaggtttttccgacctcagtttcaattttcccgactcggctatgaaaggcggcccggatctagagaagacaatcaggctcattgcctccacaggcgcaaggcggaacttaacaattgctttgttcgactcagacgattcagaggtcctggccaaggtagggctgagccctcaaaccggaatttactaccgggcggtggccgagggtgtgtatgtaatggcactgaaaccacctgattgggtaatctccgaaatcttctgtatcgagaacctacttcgcaaggacacatttgcagtccaggatgctaacggacggcgaatatttctcgcctctgaatttagcgagaacggcctgcatcagagtaaaaatttctatcggattcggccaaataagaaggcaatagtggttgattcagatgtttactctgtgactaccggcgaatctatggccttggctaagcatgcctttagtgagttagttgccgccggggaggctgctggtgaagattacaatggcttccgctatactttttccctgatccaggaggtgtcctacgagtttgcactggagaagtccagatga

SEQ ID NO: 7695 - RNA, 1725 nt, synthetic construct
  source 1..1725: mol_type = other RNA
atggccagcctgtcacctaactcctttggcctgactgacgctgaccttatcaggttcctgtcaatggcttcaagaaacgaactcgccgcttggctcggcgtctccgagagacagttaaaatatgtggtgtacgccatgccgttgcacaagaagtacaaggtgttcaggattaagaagaagaacggaggcgagagggaaattagctctcctaccgacattctgaagcggattcagaggcggatagctagtgcagttgacagcgccagaaccagatccctgatctcaaatgggtttgagaagggtcgttctatcttcgatcacgccaggccacacaagggaagggtcttcgtcattacagcggacataaaggattttttcccaagtatcaacttcgggcgagtgaggggagtattcctcgcccctccctttcggtttaataatgtggtggccactctgctggctcagctctgtactgacggagaatccctgcctcagggtgcaccgtcctctcccagcatagcaaacatcgtgtgtgtccagctggaccgcctcctaatggagctggccaaaaaaagcaagtgttctgtcacgcgatacgcagacgatatctgctttagtaccggtattgcccaggtgcctaaatatcttgccgttaagaacggggatgactacatcccatcccaggccctgtgcaagatactcaacaacaacgggttcgagatcaatctggagaaatttagggtttgtcgtggtaaggatgccctcgttacagggctcaaatatcggggaggcatcggtctaccgagaaaatggcggagaagactgcgaagtgagcttcaagtgagccggaagtacggagctgcagcggccaatattatagcggcttgggacggctcggatgaacccaagcttacaggcgagaacaacgagcttctctgcgtatccggaaaaattgggtttagtaaatggctggatgggaaggtgggcgcccaacgtaccttggccttggcacgatcatatccacaacttcgcggagtttttaaagccgtcatcccacaccgcgaaatcgatctgctggtcgagggcgtgaccgacagaatcctcctcatcgccgccctgttggctctgcaaaaacgcggcctgttcttgagcctgaaattcaatttcctctcttctgcaatgaaaggtggcgctgatctggagaagacagtgaagttactagcagcaacgggcgctaggcggaatctgaccattgcacttttcgactccgacgatggagaaatcttagccaaggtgggcctggtccctgcaagtggggtgtactatcgcgccattgcggagggagtttacgctgtggctctgaaacccccctcttggttaaccgcggaaactttctgcattgaaaatctactccatccagataccttcagcattgaagatgacttagggcggagaatattcttggcaacagaattctcagagcgaaatggatttcatcagtccggcaaattctttcgcgtcaaacccaataagaaggctatcgtagttgactcggatgtgtattccacaacgagcggcgagcccgtggcattggctaaacatgccttttcagagttggtagcccagggggctgcccctagcgaagacttttatggctttcacgagactttttctctgatccaggagattgcttacgaattcgggcttgccgcgggtcgcacttga

SEQ ID NO: 7696 - RNA, 1698 nt, synthetic construct
  source 1..1698: mol_type = other RNA
atggctccgccactttctaaaaaagagatcgtcaatttcctagccatcagcaatagatctgagctggccacatggttatctgtttcagagcgccagctcaagtttgttgtgtacgctctcccaatcgactgcagatatcggaagttcaagattgctaagaagaacggcggaacaagggagatctctgcccctgtggaggtgctcgctactatgcagagaaagatagggtcagcaatcgacagtatacgcaagagaagcctgatctcaaatggctttgaacgaggccggagtatctacgatcatgctaaagcacacaaaggcaagtccaagattatcacggtggacatcgaagattatttcaatagcatcaacttcggacgggtgagaggtatctttctgagcagcccattcttattcagccccacagtggcaaccctactggcccagatctgtactgacggaaagtcattaccccaaggggcccctagctctccctctattgctaacctggcgtgcgtgcgcctggataggatgttggtggagattgcctctaaagcccgttgctccgtttcacgttacgcagacgacatctgtttttccaccgggttgtctgaagtgcctaaattcctggcatacgaagacgatggatcatatctccccagtaacgtactcgctgacatttttaaatccaatggcttcagcattaacaaagacaagttcgccgtcaggagtcgaaataaagcgatggtcaccggtctgaaatttcatggtggaattggcatgccgcggaaatggagacgcaggctccgtagcgaattacaagtatgccggaagtacggagatgaagccgcttctattatatcctcctggacatttggccctaatcgggtgcagctcaaaagtcatggaataagctccgtagcggggaaggttggctatcttcactggctagatggaaagagcggcgctgacaaagtcaggagattggctgagagttatggccaactggcgggtatttttggaccattgatgtccttcggtgaaattgacctgctggtcgagggcatgtcagatgagatcttgctgaacgctgccctccgaaacctccagaaaaaggggatgttcgagggtctgaagtttaacttcctggaactaggcaagaaagggggccctgagctggagaaatctgtgcgccttttggtcactaccggagcccggcggaacctgacaattgccctttttgactgcgacgataacgatgttctgactaaggtcgggctggaacccgccaatgggatcaactttcgaaggctgagcgacggtatctatgtggccgcacttagacccgcaggctggactcagtcggatcagtattgtatagagtcactcttaaggcgagataccttcgagttgtccgatatttccggcaggaaactgttcctttccagtgaattcagtgataacggactccatcactctatgaatttctacaggaccactccaaagaagaagacactggtggtggacagcgaggtctactgtgttcgcaccggggcatcgatggcactttccaagatagtctttgcccagattgtggcatcggggaccggagtggccgaagacttttacgggtttgtagagacgttcaagatgctgtacgaaatccacctgaatcaccgcgttgtggccgtaaaatga

SEQ ID NO: 7697 - RNA, 1686 nt, synthetic construct
  source 1..1686: mol_type = other RNA
atgccgctggaagagcgagaggccgaattcctggcactaaggaccagggaggcacttgcctgctggctgggtatcacagataagcagctgcgatttttgctctacaagaaactcgatcagtcttatcgaactttcgtgattccgaaggcccgtggcggatctagggaaatcactgccccctcaaaatttcttgcccgtctccagcggaagatcgccctggtcgtagctgccatatcacccccccgcggattggcgaaaggattcgttaagggcctgtcagtcctcgatcacgccgcactgcacgctaataagcgctgggtcgtgtgcctcgacctgaagaacttttttccctccatcaattacggtcgcgtgctgggggtgttccgttcgaggccattcgaattccctgatgctgtggccattcccttgtcccagatatgttgctatttagggctgttaccacagggcgcgccctcctctccagctatttctaacgtcgtggccaggcaattggaccggaggctggccgaatttgcccgaaagaacaagctttctgtatcccggtacgccgatgacatctcctttagcacaaacgctagaattgtgcctgtaggccttatgttagaggacagatcaccaggcaatgaaatccttgaactgttggttcaaagcggcttcgtgattaatggcgagaagtttcgggtcaggcatgctagtgagagacagcaagtcaccggactcattgttaacgacagacctcgaatgcctcgtttctggcgcaggcagaccagagtcctcatgcaccttaggagagtgcatggggatgaaaacgccttgagcatcgctaaagactttagatccaaacggaagctgagcgacgtgaaatccatcgaggccttagttcgcgggagagccacatttgcgagccacctggatgatcggttccaaactgacttcgtggaatcccttgcccgtgccttcccagaacagcgcagcgttctggagagccgccggaaggtggcacatattcgcgtggttgctgaggggaaaacggacaaaaaatatattgcacaggcattttcggcattgtctggtcatgacagcaggtataggagagttaagatcgagttctcagatctgccagataagagtgagggatttggggacgtggcgctccggaagcatgtccaggagattagtactgtgcaactaccagtgttcaccatagctctgtttgactgcgacaattcaaaactaatggcagacctaaacctcacagctgctagttacgtcccgttaagtcccacactcgcgatcgcatgtctgccccagcctgcacacgtgtcagatgcagctttctgcatcgaacactttataccagcccacatacgcgctctgagggacagtaagggtcggagaatctttacagtcgatgagtttgattctaccaatggacggcaccgcaccgaatccctgtacagaatccatcctaaacaggcgactctgatcgtggacagcgacgtatttagcatgaccagtgccgagagcgtggcactctctaaatcgcagttctgtgacctggtctgtgagcgggcccctcccttcgaagatttcgattgggaggtgttccggcctgtaattgatttcctgctctccgtttacgagggcgctacgtctcgaagatga

SEQ ID NO: 7698 - RNA, 1692 nt, synthetic construct
  source 1..1692: mol_type = other RNA
atggcaccgcccgacttatccctgcaggctgcctccctgctggcagtgagcaatcgggccgagcttgcggaatggttgggcacgactgataaaagacttcggtacatgctctatggtcgcggaaatattggtctgtataaggtgttcgaggttgctaagagatcaggcggaactcggaaaattgccgcaccgaagccttttttaaaggcgctccaacgtcggctggccgctgtcttcccccttatcagcgctgcccgaggcatcagcatggcctacaccgcagggcgcggcatcatcgagaatgctaaggttcaccgtagaaaaaggtgggtggtggccacagacctggaggagttttttccatcaatcaacctgggccgaattagaggcctgtttctgagcgagcccttcaatttcccaaaggaagtagctaccgtgttggcccaggtttgctgttatcagggggcacttccgcagggagccccaacatctcccgctctctctaacattatttgccggtccctggataggaagctggtcgagtttgcccgccggagtgggatcgccgtgactagatatgccgatgacatagtgttttcgttcaatttcaaagagtgccccgactctctggtaaataaggtggatggcagatggatagtgtctgatattctcagcgaaatcatcgaatcctccggtttcaaagtcaaccataagaaaacacgagtgacacctcggagccagaggcaattagtcaccggcctggtggtcaaccaaagacccgcaatgccaagagaatggaggagacggaacagggtaatcctgaggctgttgcagacctacgggaaagagcgcgccagtcagatcatatccgaatggaaaggacttcgtcgccctggcgcagacgcagaagcaatcatcaggggggccaccgccttcgccagtaacctagacaagaattttaacggtacatacacttcatccctgcgaaggaactaccctctcctctcgcaggttatttcctactctcccgatctagtccccgtggaggtcttgaccgagggaaaaaccgatagactcttgctggaatttgcctatgctcagctcagactccttccagagtttcaggatctgcggctgaagttctcccgactgtccgatactgcgggagacggagcactcgccaagcgactagacgagttagcagctcgcggcgtacggaccttgacgattggtctgttcgacgctgataacgaccaatacttatctaagtacaggatagccgcaggggagttttcagctgtgtcaaagaccagcgactacgtgtactctgggatcatccctaagcccactgacgatgcgccaagtagattttgtattgagcattacttccctcgtgactttatatctaggaccgacgaatttgagaggcggttgtatttccttgatgaattcgacaaaaggaatggacgccacaaaagcctgcctctatataagattagcgagaaatcaacgctcattgttgatgacaaggttttctcaatcatgactgacgatgatcgcaactacgccatgacaaaggcggacttcgctgaaaaagtcgtgagtcgcacaccaccttatgaagacgctgatgtgaattggtttagtccagtcttcaaaatgctgaagaacttcagcctccgctatagttga

SEQ ID NO: 7699 - RNA, 1626 nt, synthetic construct
  source 1..1626: mol_type = other RNA
atgaaggatataaagacctatgaagatctatgcatggtcctcgagataaatcaaggctatttctactccgttctgaacaagatcaagaacaagaagggttatacgaaattctccatccctaagaaaaacggcggtgctagggaaattctggccccgtcacccattataaagagcctccagttgaagatcaaggcctacatcgaaggaaaatatttcccacacacgtgcgcaaaaggctttaaaaagggttgctgcaatgtcgacaacgcgaagatgcacgtcaaacggaattggtgtcttaatctcgatctcaaagactttttcccaagcatcaattttggcagagtgtacgggctgctcatgtcagagccctttaatgccaacaagaaaattgcagtggcactcgcgcatatcctgtgttatgacaatgaacttccccaaggagctccttcttcaccactaattagtaacttaatcgcttacagtctggacaataagctgttggcccttgccaaggagtatcattgcaactatagccgttatgctgatgacatatccttttcctcaaatagcactcatatgcctaagcagctggtggtgtttgacgacctgatccatgaatggattattggtgatgatttacagaacaccattgaatcctgtggcttctcaattaatcacgggaaaacaagactgctgaaaaaaaatcagcgccaggaggttacagggatcatcgtaaacagtaagctcaatttaaacaggaagtattaccgggagatccgatccatattccacaagataaaggttaacgggatcaaagaggtcgccaaacagaaccacgaaaggtacgggaaatgtaaagataacagcgaattcggcctaatcagcttcattaacggcaagcttgcctactataagagcgtggtcggagaggataatccatgctacaacaagctgtgcaaactttacaacaacaccattgagtacaaatacaagaactgtaagtcttcgaaacaggagttgattgataacgctatgttcatcattgagacatcagaaggccaaggaacagcctttttgctcaaagatttgggactggtgacctgtaagcactgtttgggattcaagcacgacgacttctgcactgaggaggagctaatcatcttcaataagcagaatgaagacatcatatacgcataccgagtgtctaaccccgagaatagatttaagctcaagctgaagaagatctttaaagagagcgaccttgctatactggaattgctgactgacgaaattcttcagtactatttctatccgtctaaagagcggctggatattcattctaagaattgcaccctgctgggttttcctaaccactctaaaggttcctcgatttccgagatcaataacatccaagtgagtagcaaaaaagcctactttgggcgcgactactactgtctcgacaaacccatcattacaggaaactctgggggcccactgctcaatgaacagaatgaagtactggggattgcttgcaaaggcgcaggagatatcactagtgcgagtgagactgacttcaatggcgtgatccctattgagttactgtataccgagaaggatgcctga

SEQ ID NO: 7700 - RNA, 2073 nt, synthetic construct
  source 1..2073: mol_type = other RNA
atgacgaagctgccctccatggatcagatcatcgaagccttggtgcgttcatcgccgtctttttttagtaggcgggtgttgggcatgagttatgaccacctgaaggccatagtgtaccctaggccctcataccagagtttcaccataaaaaaacgggacggcaccgacagaactattcatgagccccggaagccattgaagatcattcaggtgaaggtcctggcttttctgaaagagcggtcctcacctctgaaacccgccgtccacgggtttgtggccaaaagatcaatcctcacaaacgcattagttcactgttcaccaaaaaccaagcacgtcttcaacgtcgatctggaggatttcttcccctctattactttttacagagttaggggtgttcttctgcatcacccatttaatttcagccatcaggtggccacggttatcgcccatatctgcactctggataacgtacttccgcagggtgcccctacctctccctttctttctaacttagtttgccgtactatggaccgggatctcacagatctggctcggagatccatggctcggtattcgagatacgcggatgacattacgttcagctttcgcgtgtcaaagaccctgaaacttcctgctgcggtgtgctccgtgaatggcgatggcgatctagccataggaacagagctgcacgacatcatcgttaacaaacaccatttcaagataaacagtgcaaaaactaggctgagtgatagaacaagacgtatggaggtgacaggattgaccattaaccgcttccccaatgtgcctcgggtgttcatcgatcgtatcaggggggcgctgaacgcatgggaaaagcatggttatgaccaggccgacaaggcatggcaggcgaggataacagccgctgccactggcgcgtatgagaagaaaccgtggaaacgccagatcaggactggcaaagctcctgccctgaagaacgtactgtggggcaagttgttatacctgcgcatggtgcgcgggaaggacgatctaatctatactagactggctgaaaggtacaatgcagcagcagcagctaccacagccgccggaagcttctccgcgcctaccttaccggtggagccagtggtgcgagacaaagagactgccctagacgcctgttttgtcgtagactggtatggcgactacaagcaccctgcccttggggatgagatgcccatggcccaggggaccgccttcgtttaccgggaactcgggctcattataacgtgcaatcatgtgttcgaatgggaagggcaggtaggaaaagtcgacaccgtcatcgattacgaaagcccatacctcacaaacaaaattctccaactcattcaacccggtaccaagaagtcctggcccgctaaggtcttgtttagggacaagccaatggacttcgccatactcgctttcgctgaggagcctccccagcacagatatttttccgcaatggacacacccattgagcccggggcacaaggcgttctgatcgggtaccctgcctggaaacagtggaccctgcctgattttaatgatcagaaggtgctcaaccgcacatctccgcatgccggcatgaattccttcaccatcaccggcgccggttccatccgaccaggtaattctgggggaccctttaccgacgacaggtttcgcgtggccggcatggctcaaaggggagcatacatgggaagcggccacgatgaaagcctgtgcttcgaaattatcgatgacctcatcgctaagtataaggcctctcttgtccctccacccgcagccatttctgtgccacctgccgctcccgtcattggtagcggagccccaccagcaactcccccagcaagcattccagtgcttcctgctccaccagctccggcacctcctaatgcgggctgtactcgaacatgtcgctccgccgatgctacaggacccaccgcaagggtacgacgcatgaatcgaactaccgcgcaagctgactatgctattacgagacgacgcttgagccggtcaagtgaccggctgagaagcggaacagcagtctga

SEQ ID NO: 7701 - RNA, 1917 nt, synthetic construct
  source 1..1917: mol_type = other RNA
atggctatactactgggcaccgatcagattacagaagcgttggtgcgtagcaacccgtccttcttttcgcgacgcgttctgggcatgccgtatgatcggctcaaagccatagtatacccacagcctccatataaatcttttatcctcaaaaagcgcgatggcaccgataggaccatacatgagccccgcaaggctctgaagatcatccagaataaggttctcgcctttcttgaggagcggtcaccagcacttaagccaacagtccacgggttcgtcgctaagagaagtattttaaccaacgctatggtgcattgcagtcataaaacccagcacgtctttaatatcgacctggaagacttctttccttccatcacattttacagagtgaggggcgtgctgcttcaccacccattcaaactttcacaccaactcgccactgtgattgcacacatctgtacgctggaaaatgttctgcctcagggagctcccacgtctcctttcctgtctaacctcgtgtgccggtctatggacagagatttggccgatttagccagaagatcattggcccgctatagccggtatgccgatgacattaccttttctttccgcgtgagcaagacattgaaactccccgccgcagtctgctcggtggacatcagtgggaacctgaccattgggaccgagctccacgatatcatcgtcaacaagcaccacttcaaaattaattcagccaagacccgaatcagcgacagggcaaggaggatggaagtgactgggttaactataaaccgatttccgaacgtaccacgcgtgtttatcgacaggatccgcggggccttgaatgcctgggagaagtatggttacgaccaggctaacaaaacctggcaagctagagttacagagggtgctaccggaacgtacgaaaagaaaccgtggaagcggcagacacgagggggccaagtacctgcccttaagaatgtgctgtggggcaagctgctgtacctgcggatggtgcgtggtaaggacgacctgatctacacccgactggcagaaaggtacaatgccatggttgcgacttccaccgccgccggacagttctccgcatccacactgcccgtcgaaccagtggtgcgtgacaaagagactgcactcgacgcctgtttcgtggtagagtggtatggggactataaggatccgacgcttggggaggagatgcccatcgctcagggcacagcgttcgtgtacagggaactcggcctaatagtgacctgtaatcacgtgtttgagtgggcgggacacgtaggcactgtcgaaactgtcattgattacgagtccccctacctgaccaacaaagttctccggctgattcaacccggaaccaaggctagctggcccgctaaaattgtgttcaggcataaacctatggacttcgccatcctcgctttcgtcggagaaccacctcagcaccggtacttctccgctatggacgctccaatcgagcccagtgcacagggagttctgattgggtatcccgcctggaaacagtggacaccacccgatttcaacgacctgaaggtcttgaatagaacatttcctcatgcaggtatgaacagtttcactataagcggagctggctccattcgcccaggtaatagcggcgggccttttacggacgatcggctgagagtggccggaatggcacagagaggcgcctacatgggaacaggccatgatgagagcctatgctttcagatcattgacgaacttatcgcaacatataaggcaagtttactgccacctctagccgccagcacattgggtgctgcagcgcctcccactacttcacctgcgcctatttctcatcccccatctcatcccgcccctccagttcaagatgcccccgcatcagatacttga

SEQ ID NO: 7702 - RNA, 3675 nt, synthetic construct
  source 1..3675: mol_type = other RNA
atgaccacgttgtccgagctaaatcgttgcgacgtggcaactttcatcgacagactgcgtggtatctatgaacacagtccatggattcctgagcgcgctgccactcatcgcccgttcgcaaatgagacagccctcaagcttgcattacaggccgttgtcacacacgctactgagggcgaacagctgggcctcatccgggaacacccagagttggccggcaaagccgctgttgccggagagctcaccatggagtcgacatccgagcaagctgcatccggcctgcacctgtgctccgcagatgaatacgcgaccctgcaccaattaaacgcagactacaacgctaaatttggatttcccttcatccttgccgtcaaggggcccaccggaaaaggccttacccgcagacaggtgatagcagcctttaccagacgactgaagaatcagcgggctgacgaaatcgccgagtgtctgaggcaaataaaaagaatcgccgagatccgactgaacgacctgctgggggtgtctctcgagtttgggcccgctattatgcagtgggcggaaactattgcggcttggtcggatgccgataatgcggcagacgctgattttgatttgacctgtgcttatatgacaccagctcaccgcaggacggctgaccaattgcgcgactggatgaccgatgcagggatggatgctcatatcgacgccgtcggcaatgtagtgggggtttatcgctctcctgtgcccggagcaaagaccctgatgaccggttcacattatgatactgttcgaaacggcggaaaatacgacggtcgactcggaatattgcttcccattgcgattgtcaggcacctgtacttgcggggtgaaacgctgccctttcacttagaagtcgttggctttgctgaggaggaaggagtgaggttcaagtctactttcctggggagtaatgccattactggacatttcgatctgtcactgctagatcaggtggacgctgacggcgtgtctatgcgggatgccttgaccgccgccggacatgacgtcgctagaatacccgccctggccagacagcctgaggacattttggccttcgtcgaggtgcatattgaacagggccctgttctgctgcaaagagatctggccctgggagtggttaccgccattgccgggagtagtcggtacctggttcagctcacaggattggcttctcacgctggcacgacacctatgtccatgaggaaggacgctgccgcggcagcagctgaaatcgtacttttggtggagcaacggtgcgcccaaggccagtcccttgtcggaactgtggggcagcttgaagtacccggcggaagcgtgaacgtgatccccggagcctgtaaactgtcattagacatacgagccgcagatgatgctgtccgcctcgccgcagtacaggatgtgctggacgggatcgccagcatctgcgcagagcgacaggtggcctttgccctcgaaaggattgtggatgcttcagcagccccatgcgcaccccaccttatgcagcagcttggagcagcaattgaacgggcgggcctcccgaggtttgagttgctgtccggtgctggccacgacgctatggccatggccgctatcactgacgtggccatgttattcacacgctgtggtaacggtggaatcagccataacccactggagacaatgaccgccgacgatgccgacattgcagcaagggcctctcacgaagtgaccccaagggcaaccgataggcgactgtataactgggctattatccaggtgcaggaaaaggatactggtggtagattactattcagcattcgcgcatatatggctatccttcccaatatggaccagataattgaaacactagtccggagttccccctctttttttagtcagaatatcctcgggataaactataacgaactgcgcgccattatctatcccagaccaagctaccagagctttacaattccaaaacgtaacggcactgtgcgcacaatccacgagccttcaaagacactcaagattatacagctgaaggtattgaatttcctgcttgagcgctccagtcctctcaagccagcggtgcatgggtttgtagccaatcggagcatactgaccaatgccctggtacattgtagctctaaaacacagcacgttttcaacatcgacctgaaagatttcttcccaagcatcaccttctacagggtgcggggggtcctgactcatcatccatataatttctcacacgaagttgccacagtcattgcccacacctgcactctgaacaattcactcccccagggcgcacccacatctccgtatctcagcaacctggtgtgtcgcacaatggatagagacttaacggagctagcacgtaggagcctggctaggtactctcgttacgccgatgatatcacgttttcctttcgggtcagcaagacctcaaaactgccggcagcggtgtgttcggtggatagtgacggagatctcgtcatcgggtccgagcttcatgacataatcgtcaacaaacaccacttcaatatcaacagtgcaaaaacgagactgtctaatagaacacgccggatggaggtgactgggctcactatcaatcgattcccgaatgttcctagggtcttcatcgaccgaattagaggtgccctcaacgcatgggagaaatatggttacatcgatgctgagaaaaagtggcaagagcgggtgacatctgctgcaaccttggcctacgagaagaaaccctggaaaaggaagacccgagctggccgggttcctgctctgaaaaacatcctgtggggaaaactcctctaccttcgcatggtgcggggaaaagacgacctcgtatacacaagactagccgaacgttataacgctgccgtcttaaccgcgacttcagccgggcctttttccgcaccaaagttaccagtcgagcctgtggtaagagataaggagactgccctggacgcatgctacgtggtcgagtggtatgcggacttcaacgatccgaccattggcgaggagatgccactggggcagggcactgcctttgtgtacagagagctggggctgatcgtgacctgcaatcacgtgctcgaatggaacggcgaaatcaataacatcggcatcacaatcgactatgagaacaagtacctaaccaataaggttctgaagcttatccagccaggcaccaagaagagctgggcagctaaggtgattttcagaaacaagcagatggatttcgccatcctcgcgttcgctgatgagccacctcctcatcggtacttcgccgctatggatgcccccatagagcctgaagctaacggcatgttggttggatacccagcttggaagcagtgggctctgcctgactttaatgaacaaaaggtgcttaataggacaacaccccacgccgggatgaacagcttcaccattacgggcgccggcagcataaggcctggtaattcaggtggcccctttaccgatgacaggtttcgtattgccgggatggcccaacggggagcatacatgggggaagggcatgacgaaaacctatgctttcagattatggacgacttgatttccaaatatagagcgactctccgcattcatgtagcgatacctcccgcctccggcgcgtga

SEQ ID NO: 7703 - RNA, 1944 nt, synthetic construct
  source 1..1944: mol_type = other RNA
atggaccagatcatcgaggccctggttagaaaacacactagcagcttttcccagcgggtgctgggcatgccatacgacgccctgaaggccttgatctacccacgtccctcttaccggtcttttacaatcaaaaagcgcgacggctccgataggaccatccatgaacctcgcaaagcactgaagaacgttcaactgaaagtacttgcttttctccaggaaagaagctctccattcaagcccgctgtgcatgggttcgtcgcggatcactctatcttcaccaacgctctagttcactgttcgcccaaaacccagcacgtctttaacctagacctggaggatttttttccctctattacattctaccgggttagaggcgtgcttctgaaccaccccttcaaattctcgcaccaggtcgcgactgtcatagctcatatatgcacacttgataatatgctcccacagggcgctcctactagcccgttcctgagtaatttggtgtgtcgaaccatggacagggatttgacagagctcgctaggcatggccttgcacgctatacacgctacgctgatgacattaccttctcctttcatgtgagtaagaccagtaagctgcctgcctccatatgcagcgtcgacgatgacggtgccctggtcgtgggaagcgagttaagggccatcatagtcgacaagcatcactttaagattaatgccgccaaaacccggctgtccgatcgcacccggagaatggaggtgacaggcctgacgatcaaccgattccccaacgtcccaaggatttttattgaccgagttagaggtgctttgcgggcctgggaaacttacggctacgaaaacgccgagaaggtatggcatgcgcgagttgctgctgctgccactgggccttacgaaaagaaaccctggaaaagacaaaccagagcaggaggccctcccgctctgaagaacgtgctctggggtaagctgttgtatctccgcatggtgagaggtaaggacgatctcatctacaccagattagccgaacggtataatgccgctgtgcttaatgagcaggctgccggtgccttcgtagccgcaactctgccggtggaaccagtggtcagggacaaatctaatgtgttagatgcctgcttcgtgctggaatggtatggcgactattcatctcctactctgggggaggagatggttggtgggcagggcactgcttttgtgtatcgagagctcaatctgctcgtcacctgttcacacgtgtttgaatggagcgggaagattggaaaagtggatgcagagatcgatatcaatgatccatgcattgcaaccaaaacactccaacttgttcagcccgggacaaaaaaagcctggcccgccaagattctgtttagggataagcccatggacttcgcaatcgtggcctttgaagacccacctccccatcgctacttcagtgcaatggataatcccattgaaccgtccgcccaggggttcctcatcggataccctgactggaagcagtggaacttgccggatatcaacggcctaacggtactgaataggaccatgccacacgccggaatgaatagcttcactatcactggagcagggagtattaggcctggcaacagcggagggcctttcacggatgaccgctttcgtgtagcaggaatggcccaacggggcgcttatattgggcgtggccacgacgagaacctgtgtttcaagattatagacgcgcttatcgccaagtataaagctaccttgccatcacctcctcccttagcgccagcggtgatggctgcatcagcacccgcatcagccgcaccgatcgtggtcccaacgtccacagacgccctaagtgctacaccatccgcagcgggagccacacccatagtgcctccatccgagggagagtcacctcctccggacgcaatttga

SEQ ID NO: 7704 - RNA, 1920 nt, synthetic construct
  source 1..1920: mol_type = other RNA
atggcaattttgctgtccttggatcagatcgtggaagcactggtgagatctgagccggccagcttctcgcgcgatgtgctaggaatgccttacgacagtctgaaggccattatttatccacgccccccatacaaaagctttaccataaagaaacgcgacggctccgaccggaccatctttgaacctcggaagcgactgaaagtgatacagcttaaggtgctggactttctgcaaaagagaagcacacctcttaaacctgccgtccatggctttgtcgccaagaggagcatactgactaacgctcaagtccattgctccccaaagaatcaccacatcttcaatattgacctggaagacttcttcccctcaattaccttttacagggttcgaggcgtgctcctgcaccacccgtttaagttctcccacgaagtcgcaaccgtgatcgcgcacatctgcactttagataaaaccttacctcagggggctccgacatcaccctttctgagtaacctagtttgtcgtaccttggatcgcgatctgaccgagctggcccggagatgcttggctagatattcccggtacgctgacgacatcacattttctttccgaacccggaaaacaattaaactccccgcagccatctgtagtgttgattcggatggtgataccgtgatcggtacggagctacatgatataattgtgaatcagcaccacttcaaaattaattccgctaagacccggctctgcgaccgcaaccgaaggatggaggtgactggccttacaattaatcagttccccaacgtccccagggtgttcatcgacagaatccgcggcgctctcattgcttgggagtctcatggctatgcagccgcgaacaaggtgtggaacgaaagggttactgccgctcgttccggcgcctatgagaagaagccatggaagcgccagacccggcgaggtcaagtgcctgatctcaaaaacgttctctggggcaagctgttatacttgagaatggtaagaggcaaggacgaccttatctatacacggctggcggagagatataatagcgctgtgttaataacagcagccactggaactttcaccgccccaaaactgcccgtagagcctgtagtgagggataaggaaacagccagggacgcctgtttcgtcgtggagtggatgggggattacgatgagcctggggttgggactgaggtgcccatctctcaggggacagcatttgtctaccgggaactcaatttgctcgtaacttgcaatcatgtgctggagtggcagaacggcgaggaagggaaatttctggctcagatcgactatgaaagcccctttctcagcgataaggcccttaagcttatccagcctggaacaaaaaaaagctgggatgctaagattctgtaccgtaacgagcaaatggactttgctctgctcgcgttcgaagaccccccacagcataggtacttttctgcaatggacaatcctattgaaccgggcgccaaggggttcctgatcggttacccagcctggaaacagtggaacttggctgacgttaactcacagacggtcctgaaccgtacttcaccccacgcggggatgaatagtttcaccataaccggggcgggctctatcaggcccggaaattctggaggacccttcacggacgaccgcttcagagtagccggaatggcccaaaggggagcatatatgggtgatggacatgacgaaaacctgtgtatcgagattatcgatgagctcattgccgcctacaaggccagcctagtcgctcccgccgtgcttgttcccgctgcatcagccgcagcccctgctagtccagctacggcagcaccgtccgccaaacctactgcgccaccaccagcaccaacaccacctcctccagtcatgccctga

SEQ ID NO: 7705 - RNA, 1995 nt, synthetic construct
  source 1..1995: mol_type = other RNA
atggccatcgtagccagcatagacgaaattatcgagagcttagtgcgtaacaatcccgcctggttcagtcggagaatcttgggcatcccctactccacactgaaggaaattgtctatccacgtccaccctacaagcgctttaccatcaagaaacgagatggcaccgatcgggtcatcttcgaacccagaaaccggctgaaaatcatccagcagcgcactctcaaatttctgcttgaccgcagtggccctttgaaacccgcagtccatggttttgtgtctaagagaagcatactcacaaacgcgcaggtacattgttctcctaaggtgcatcacgtgtttaacattgatctagaagacttcttcccgaacataagtttttaccgggttcggggtgtcttggagaagcacccgtttaattgttcccaccaggtagccaccgtgatagcccacatttgtactctcgacaaagtgctaccgcagggtgcccctacgagcccactattgtcgaacttagtgtgcagatcgttggacagggacttaaccgacctcgcacggcggagctttgccaggtactcccgatatgcagatgatatcactttctccttcccagtacgcaaaaccagtaggctgcctgccgcgatatgtcacgttgatgaggatggcgatcttctcatcgggaccgaactgcatggcgtcatcaccaaacacaattttaaaatcaaccccgcaaagacaaggctgagagatcggagccgaaggatggaggtgaccggccttacaattaatcgcttccccaatgtccctcgtcggttcattgacagaatcaggggtgctttgcacgcgtgggagaagtacggctacgatgctgcagagaaggcctggtctgagcgcgtggaaaaagccacaacgggaccttatgagaagaagccctggaaacgtcaaatgaggcgcgggagattacctaaactgaaaaacattctgtgggggaaactactgtatctgagaatggttaggggaaaggacgacctcatctatacccgcctggctgagagatacaatgatgctgttctggcagctcacgcagccggaccattcactgcccctcgattgccggtccaaccgctggtcagggacaaggaaacagcgcgagacgcttgcttcgtggtggagtggcttggggactaccaaagtgctgccggcgtgacggatgatataccaatggggcagggaaccgccttcgtgtaccgcgaactgaatctcctcattacctgcgatcatgtttttgaaggcaaggccaatgtcgggcacttcgaggtggagatggactacgaggacgttgagctggtgaacaagactctcaatctggttaaacctgatacacaccagaagtggccagcgaagatcctttaccggaatgcccagatggatctggccttacttgccttcgaccacccccctcagcataggtacttttctgcaatggataacccaatagagagcggagcccaagggattctgattggatatccagcttggaaacaatggaacctgcctgattttaacgaccagaaggtgctgaacagaacaaccccccatgctggtatgaattcatttacaatctccggggccggatccattagacccgggaattcaggcgggcccttcactgacggcaggtttcgcgtcgctggtatggctcagcggggagcttatatgggcgacggccatgacgagtgcctgtgcttcgaaatcattgatgacctcatcgacaagtatcgagccagcctcgttccccccgcaccagtaccagctccaactcccgccgtgggagctgctgctggacttgctgcagcaatgtccgcagcgccgccagcacctattcctattcctgccgccgtggcctcttatacggaagccccctcagtctccgcgtctgcaatcggctcagtggcaactcccgtgcagccacctccatcagacgaacctctgatgtga

SEQ ID NO: 7706 - RNA, 1983 nt, synthetic construct
  source 1..1983: mol_type = other RNA
atggcaattctggcatcactggatcagataatcgaaggactcgtaagaaaccataccgcttggttcagcagccggattcttggaatcccatattcaactctgaagggcataatttaccctagacccccttataagaggtttacgattaaaaagcgcgatggtaccgacagggttatctttgagcccaggaaccggcttaaaatcatccaggagagaacactgaaattcctccaggagagatgtgggccatttaagcctgccgtgcatggcttcgtcagtaagagatcaatcctcaccaatgcgcaggttcactgtagtcagaagatccaccacgtgtttaatatcgatctagaggacttcttcccctccataagcttctacagagtacggggcgttcttgagaagcatccctttaactgcagccaccaggtggctactgtgattgcacacatctgcactctggacaaaatgttgccacaaggggctccgacttctcccttcctatccaatttagtatgtcgctcgatggatagggatttaactgacctcgccagaaaatccctggcccgctacagccgatatgcagacgacattacattctcattcccggtgaggaagacctcaaggctgccagcatctatctgtcacgtggatgaagacggagagctgctgatcgggaccgaattacacgacatcgtaaccaaacactcattcaagattaacgctgctaaaacgcgcttgtccgatcggacacgtagaatggaagtgacaggactgaccatcaaccggttcccaaatgtcccccgggtcttcatagatcgtattcgaggtgcgttgcatgcgtgggagaagtatggatatgacgcagcggaaaaggcctggtctaagcgcgttgttaaagcagctctgatgggggccccctacgagaaaaagccctggaaacgacaggtacgccgcggacgcatgcctaagctgaaaaatgtgctgtgggggaaactgctctaccttaagatggtacgcggcaaggacgacctgatatatacgcggctggccgagcggtacaatgaagctgttctccgggcacaggctgccggaccatttactgccccgaggttgccagtgcagccagtggtgagggacaaagagacagccctcgaagcctgctttgtggtggaatggttgggagattaccagtccaccgctggagtcaccgatgacatcttaatgggtcaagggaccgcctttgtttatagggagttgaacctccttgtcacctgtcaccatgtgctggagggcaaagcgaacgtggggcattttcaggttgagatggattatgaggatgccgagctcgtgaacaagacacttaacttagtcaagccggacacaaaacaaaagtggcctgcaaagatcctgtacaggaatgcccaaatggatctggccctgcttgcctttgactaccctccccagcatagatatttttccgcaatggacaatcctattgaacccggcgcacagggcgtgctgatcggttacccagcatggaagcagtggaacctccctgatttcaatgaccagaaagtgctaaaccgtacgacacccaacgtcggtatggattctttcactattagcggggccggttccatccgaccgggcaattctggcgggccctacacagacgatcgattcagagtggccggcatggcacaacgtggggcgtacatgggcgatggccacgacgaatgcctgtgctttgaaattattgacgacttgatagctgagtatcgggctagtctcgctcctgctcccgtcccagccgtcagtactgccgcaacaagcgccactgtgactgccggaaccaccccagctgctgtcagtgcccctgctgcagctgccatgtcggcttctgccgccattgtccctagctccgcgatgagctctctgggcaccctagtgcaaccacctccccgagccgacgatacatga

SEQ ID NO: 7707 - RNA, 1932 nt, synthetic construct
  source 1..1932: mol_type = other RNA
atgaggactcaccttagcatagaggccattctggaagaactggcgagacagaaggtcttttggttttccacccatgtgctgggcatcgcctacagtgagctgaaggctatcatttatccgcagcccccctataagcatttcactatcaagaagaggaatggtacagacagggttattctggagccccgcaagcgcctcaaaatcattcaggagaaagtgctcgcttacctgcaaaatcgcgccggctcgattaaacctgctgttcatggattcgtgcggaagagaagtatcctgacaaatgcccaggcacactgcagcccaaaaaaccaccatgtgttcaacatcgaccttgaagacttctttccatccataaccttctacagagtgcgtggagtattggagaaacaacctttcaacttttcccatgaggtggccactgtgatcgctcacatctgtacactcgataaaaagctccctcaaggggcccccacatctccattcctttccaatatggtgtgtcgcaccatggatcgagacttggctgacttggcccggcgaaaccttgctcgctataccaggtacgccgatgacataaccttttcatttccagtcagaaaaactagcagactgcccgccgcaatttgtcgggtggacgacgacggcgacgtcctaatcggcaccgagctgcatgacctcattgcgaacaagcaccacttcaaagtaaacagcgctaaaactcgactctctgaccggacccggcggatggaagttacagggctcaccatcaaccgctttccgaatgttccccgcattttcattgatagagtccgcggggccttacacgcgtgggagaagtacgactatgccgccgcatcaaaagtgtggtccgacagggtcgtagccgcttccacaggcccttacgaaaagaagccttggaagcgacagacaaggtcagggaaagtgcccgaactaaagaacgtcttatgggggaagctgctgtacgtgaggatggtccgggggaaggatgacttaatttacacccggctggcagagcggtataacgcagccgtgttgaagacccgtgccgcaggaccctttgttgcacccaggttgccggtggagcccgtggttagagataaaactactgccagagaggcatgctttgtggtcgaatggtggggcgattaccagtcagcacccggacataccgatgatattcccatgggacaaggtacggccttcgtttatcgggaactgaatctgctcgtgacttgcaatcatgtattcgagggagtcgccaccgtgaataagcacagtttcaacactgattttgacgcccccgagatggtcaataagacactgaccctggtgcagccatcgactaaacagtcctggcccgctaagattctctatcgcaatcctcagatggactttgccctactggcattcgaagacccaccttctcacagatatttctctgcaatggattgtgccatcgagtcaggagcgcaaggcatccttatcggctttcctgcctatcagcagtggaacctgccggattttaacgaacagaaagtgcttaacaggacgctgccgaacgcgggtatgatcagttttacactgtctaattccggcagtgtcagaccaggtaatagcggcgggccattcaccgacgatcgattccgagtggcaggcatggctcagcgtggagcttacatggggacaggacacgatgagtgcctctgcatggaggtaatcgacgcccttataagcgaatacaaagctacgttagctagctctgcccctgtaacgccagcgtctgctttggatgcagctccaatagtggctcctagcggcgccgttatagctcctcgtacagctgccccagcacctgcagatccagaaggtcctaggcccccagccgatgcgtga

SEQ ID NO: 7708 - RNA, 1953 nt, synthetic construct
  source 1..1953: mol_type = other RNA
atggcctccattccaaacttcgacgctatcactgagagcgccgtgagaagcaacataggcttcttcagtagacgcgttctgggcatctcatacgatcggctcaaagccatcatttacccccgggctccctaccgctcttttattatcaagaagcgggatggaactgctaggttgattcacgaaccccgcaagcgtctgaaaattctgcaggaaaaggtgcttgcatttctggacgagagatccggccccgtcaagccaagtgttcacggtttcgttaggaaacgaagcattctcaccaatgctagagtgcattgtagtcccaaaacccagcacctccttaatatcgacttagaggacttttttcctagcatcacgttttacagagtgagaggggttctgagaaaacacccattcaatttctctcatgaggtggccacagtgatagcccatctgtgcacgcttgacaggactctgcctcagggagcccccacaagcccttttttctcaaacctgatatgccggtcgatggaccgcgatctgaccgaactcgcccgccattccctagcgcgatatacacgttatgcggacgacatcaccttctctttccacgtgcgaaacgcagccaggctgccagcagccatttgtagtgtggatgctgagggcgccgtccagatcggccaagagcttcatgacgtgttagtaaacaaacaccacttcaacttgaactctagcaagactcgtctgtccgatcgcagtcgccggctggaagtaacaggattaacaatcaacaggtttcccaacgtgcccagaattttcattgatagaatcaggggcgcccttaatgcgtgggagaaacatgggtacgatgccgctgagaagacttggcaggcaagggtggtggcacagtcaaatggggcgtatgaaaagaagccttggaagcggcagactcgtagcggaaaagtccccgagcttaaaaacgtcctctggggtaaactcttgtacttaagaatggtacgagggaaggacgatctcatatacaccaaactagccgaaagatacaatgccgcagtgggtgcggcacaagcaaccggtgtattccacgcaccaaagctgcctgtgcagccggtggtcagggacaaagttaccgctcaggaggcatgctttgtcgtcgaatggtatggcgattataacgaacccggaatcggcgccgaaatgccctatgtacaggggacagcattcgtttatcgggagcttaatgtcctgattacctgcaatcacgccctggtctgggagaatgaagaagggaagtttcctgccgtgattgattacgagtccgcccatttgagcggcaaagttttgagcctggtgcgacccggcacaaaagagaagtggccggccaaggtaatctacaggaataagccaatggactttgccctcctagcttttgacggcgctccgccactccaccggtatttctccgctatggacaaccccatcgaacccggggcccaaggattcctcattggataccccgcgtggaagcggtggaacctgcctgatatcaatcagcagaccgtcctgaaccgcacttcccctcacataggcatgaattcttttaccgtgacaggggctggatcaatccgcccaggcaattcaggtggtccctttaccgacgacaggttcagggtggccgggatggctcaacgaggagcacacatgggcgtgggacatgatgagaacctgtgtatcgagataatcgacgatctgattgccaagtatcgggcgtcgatggtgcctccacctccagctgctccagcaccagccgatccagctgctagtgtttctgctccggtgttgggggtcccaccacctgcaccttctgcacctgccgcccctgcttcctcacagaatgctgcaccggttgccttgccgcctccccaaacggatacttga

SEQ ID NO: 7709 - RNA, 1908 nt, synthetic construct
  source 1..1908: mol_type = other RNA
atggccattgtaaaaatgaacgagatgcacgaagccttaagtaggaacttcgtgacttggttttcgaataatgctcttgggattccatactccagtttaaagggaatcatctaccccagacctccctataagcagttcgtgataaaaaagagggacgggtccgccagggtgattgcggaaccacgcaatagactgaaagtgatccaacagaaggtgctgacgttcctaactgaacgcgccggacccttcaagccagtggtgcatggttttgttcccaagaggtccattttgactaatgcccagatccactgtacccctaaaaatcaccatgtcctcaacattgacctgaaggactttttcccatctatcaccttctttagagtccggggcgtgctgaggaaacatccgtttaatttttcccatgaggtcgcgactgtcatcgcccacatctgcaccttggacggtacacttccacagggcgcgccgaccagcccatttctgagcaatttggtgtgtcgctctatggatcgggatctgacagacctggctaggcgtaatctggctcggtacagcagatacgcagatgatataacgttctcctttcctgtgcgcaaaaccagtcgacttcccgcagctgtgtgtattgttgacgacgacggacacctccaagtcggcgctgaactacaggacctcataaccaataagcaccatttcacaataaaccccgcaaagtctcgactcagagatcgcggacggcggatggaggtcacaggtctgaccatcaatcaatttcccaatgtaccccgtgtctttattgatcgcatccgcggagcactgcatgcatgggaaaagtatggatacgaggcagcagataagcagtggaacgacctcgtcaagaacgctgtgactggggcattcgagaagaaaccttggaagcgacagacccgaagaggcaaaacccctgaactgaagaatgtcctttggggaaagctactttatctccggatggttcgaggcaaagatgacatgatctatacccgccttgccgaacggtttaacaacgcagtccttgcaactcacgtggccgggcctttcagcgctccaaaactgcccgttcagccggtagttcgggatatcactacagcccgtgatgcgtgctttgtggtggagtgggttggggagttccattctactcctggcacgtgtgatgacgtgatgtgtaaacagggcacagccttcgtatatagggagctgaacctactggttacttgcaatcacctgttcgaacacattgctaccatcaacaaacatgagtttccaacagattacgaggcccctgaaatattcaacaaaactctcaacctggtacacccgggcactaagcagcattggcccgccaagatattatatagaaacgcacctatggacctcgccttactcgcctttgagggtccagtgccacctcaccgttacttccccgctattgactctccaatcgagccgggcaagcagggcattctgatcgggtaccccgcctggaaacaatggaatctccctgattttaacgatcagagggtgctgaatcggaccagtcctcacgcgggtatgaacagcttcaccatcaccggcgcgggatcaattagacccgggaactcaggggggcccttcacagatgaccacttcagggtggccggcatggctcaaagaggtgcatatatgggcgacggacatgacgaatgcctgtgcatccagattattgacgacttgatcttgaaatacaaggccagcttgacgctcctgacagtacccgctttggctgctgtttcccctgatgaggccgccgtggctgccacatcaacaccagccctgacatcacctgccccaacgaccccagctgtgaccgtctga

SEQ ID NO: 7710 - RNA, 1785 nt, synthetic construct
  source 1..1785: mol_type = other RNA
atgctgcggaatcatgtcacttggttcagccggaacgccctgggggtcgactacgaaaagctcaagcggatgatctatccgcgtccgaagtacaagcatttcactattacaaagcgcaatggttcaccacgcgtaatcagcgaacctagaaagagactcaagatcatacaagagcgagtcctggccttcctcgagccacgaagtggcccactgaagcccgcagtgcatgggtttgtgccaaagaggtcaattttaacaaatgcgagggtgcactgcagccccaagaaccaccacattttgaacctcgatctacaggactttttcccctccatcaccttttatcgggtgcgtggggttcttcggaagcatccttttaacttgtcacatcacgtcgccaccgtaattgctcatatctgcactctcgatggcacactcccacagggtgcacccacatctcccttcctgtctaatctggtgtgcaggtctatggacagagatcttactgatctggcacgcagaaaccttgcaaggtatacaagatacgctgatgacctgaccttttccttcccattgaaaaaaacctccaatctacctgctgcggtctgtgttgtcgacgaagatggagggatcaccttaggcgcagagttacacgacctgatcaccaacaagcaccatttcgccattaaccccgctaaaacccgattgagtgatcggggccgcaggatggaagtgactggccttacgattaacaaattccctaacgtgccacgcatatttattgatcggatcaggggcgcactgaatgcctgggaacggaatggatatgacgccgccgaaaaaggatgggaagagcgcatcggtaaggctgctacagggccatacgagaaaaaaccctggaaaagacagactagaggtggcgcggcccctaaacttaaaaatgtgctctggggaaagctgctatacctgaaaatgatcagaggaaacgatgacttgatttatacgaggctcgccgaacgctataacgcggccatcctgaaagaaatggcagccggccctttcagcgcccccaaactgcctgttcagcctgtggtgcgagattacaagactgcacgagaggccgtttttgtggtggagtggctggccgattaccactcatcccctggccaccacgagtgtcccattgaggcacagggaacagcctttgcttaccgtgagttaaatttgctcgtcacctgtgatcacgtgctggtaggcaaggccgagttcgccgggatggaagtgccagctgactttgacgcgcctgaagtggtgaacaagatgcttactgtggtgcgccccgaaacccaagagagctgggcagcacgcgtggtttacaggaacaagcagttcgatttcgccatccttcagttcgaggagcagcctccccaccatcggttcttctccgcaatggacacgccgattgcccctcatgccgacggagtactgataggctttccggcttaccaaaactggaacctcccagacattaatccccaaaaagtcctgaataggaccttgccgaatgccggtatggtttcgtttacaatagccaataccggaagcatcaggcccgggaattctggcgggccattcacagatgacagactgcgtgtagccggaatggcacagagaggagcgtatatgggtgtcgggcacgacgagtgtctgtgctttgaggtcatggacaaatttataggcgagtggaaggctaagagtgctgctgctgctcccccagctgttccttga

SEQ ID NO: 7711 - RNA, 1911 nt, synthetic construct
  source 1..1911: mol_type = other RNA
atggtagcaatacccagtgcagacgcactgtttgagtccttagcgaggaacaacgtgaattggttctcacaccacatactggggattagctatgcccacctgaagcgcatgatctatcctcgcccaccttataaacattttagcatcaccaagcgcaatggatcccccagagtgatcagtgaacctcgccgtaggcttaaggtcgtccaggagcgagtcctggcgttcttagaggcccgcaggggtcctctcaaaccagccgttcatggctttgtgtccaaacggtccatagtgacgaatgctagagcacactgtagcccaaaaaaccaccatatcctcaacctggatttacaggacttttttccatctatcacattttaccgggtccggggcgtgttacgaaagcaccccttcaacttctcacatcacgtcgccacggtgatcgcccatatttgtaccctcgatgggacactccctcaaggagctccaacatctccactgctgtcgaacctcgtgtgcagatccatggatagggatctgaccgaccttgctagacggaacctggccagatacactaggtatgccgatgatatcactttcagtttccccgtgaagaaaacttctagactgcccgcagctatatgcgtggtggacgacgatggcggtgtcaccattggggccgagcttcatgatctaatcgctacaaagcatcacttcactattaatgcagcgaaaacacggttgagcgataggttccggcggatggaggtgaccggcctgaccatcaataagtttcccaatgtgcggcggatcttcatcgaccgcattcgtggggctcttaatgcctgggaacgtaatgattatgccgctgccgagaaggggtggcaagaccgagtacagaaggcctccgctggagcttacgaaaagaaaccctggaaacgacagacgcgcggctcagcagtgcctaaactgaagaatgtactgtgggggaagctcctttatctcagaatggtgaggggaaaagacgatttgatttacacacgtttggctgaaagatacaatgccgccgtcgacaaagagatggctgccggacccttcgcagccccaaagttgccggtagagccggtagttcgcgaccacgacacggccgaggaggctgtttttgtcctcgaatggtttggcgactaccagtctcaacccggtcataccgacgatatggtgatggcccaggggacagccttcgtgtacggcgaactcaatctgcttgtgacctgttcacacgtgttcgaggcagaagcaaaggtgggcaagatgatggttcccactgatttccaggcggtcgaaatggcgaacaaaactctgcagctggttagacctgggactcagcaagcctggcctgcgcatatcctgtacaggaacaagcagatggactttgcgttggtggcgttcgacgatccagttccccagcaccgctactttagcgtcatggacaatccgatccaggcccgagccgatggaatcctgatcggattccccgcctatcagaactggaacctgcccgattttaacgaccagaaggtgctaaacaggacaataccgaatgccgggatgaacagttttaccattgccaatgccggttctattaggcccggaaacagcggaggtccttttaccgatgaccggttccgagttgctggcgtagcccaaagaggcgcttacatgggcactggccacgacgagtgcctctgcttcgaaattgccgacgctctaattgcagcatggaaagctaccttggtgccacctgcaccaccaccagcacctgcagctgtcgttcccccacctgcacctcctccgattgctccagcaggtcacgccccgacagctcctccaacacccccaaccactccctga

SEQ ID NO: 7712 - RNA, 1830 nt, synthetic construct
  source 1..1830: mol_type = other RNA
atggtagctatcactagcgcaatggcgctgaacgaaagtatgctcagaacttcagtcacctggttctcttctcacgtattaggcgtgccatatagccagctcatgagaatgatatatcctcgacccccttataaacggtttactatcacaaagcgaaatggctctccacgagccattgccgaaccccggcagaggctcagaatagttcaggagcaagtgctggcatttctaaaagagcggagtggaacggtgaggcccgctgttcatgggtttgtcgttgaccgctcaatcgtcacaaacgccaaggtgcattgtctccccaaaacacagcacatcttgaacctggacctacaggacttcttccccagcatcacattttatagagtcaggggggtgctgagaaagcaccccttcaatttttctcaccacgtcgccaccgtggtggcccatatatgtacattggacggcaagctgccacagggagcccctactagtccgtttctttctaacctcatctgcaggagtatggatcgcgaccttaccgagctggcccgacgcaatagagctacctacactcggtatgcagacgatattacgttctcttttaatgtgcggactgcatccagattgcctgtagccatttgcgtcgtcgacgacgatgggcatgtgacactggggaccgagttacatgacctgattactgccaaacaccatttcgcgatcaacgccgccaaaacaaggttatcggacaggcatcgacgtatggaagttaccggtctgacaataaacaagtttcccaatgtgagaaggatctttattgatcgtattcggggagcactgaacgcctgggaacgcaacggatacgaggcagccgaacaaggttggcaggatcgggtcatcatcgggggcaaggtgccttacgaaaaggtgctgtggaaaaggcagacaagatcgcgagttgtgccaaagctgaagaacgtgctctggggtaagctgctgtacctacggatggtccgtggcaaagatgatgtgctctataccagacttgcaggtcgtttcaacgctcttgtggacttcgaacaatccttcggatccttcgctgcacccaaacttccaatcgagccagtagtgcgggatcatgatacggctcaagagggcgttttcgtggtggagtgggccggcgattaccactcaagccctggccgccacgaggacacactgcaagcccagggcaccgcctttgcttatcgcgaattaaacctcctggtaacctgcgatcacgtgtttgaagtcgatgctaccgtcggaagccttaaggcaccgactgactacgaggcccccgagattgttaataagtccttgcgcctcgttaggccaggaacgaaagactcctggcctgccagaattgtctaccgcaatcggcagttcgacttcgcgatcttgcagttcgagggccctgtgcctcctcacagatacttctctgctatggataccccgattaaaccccgggccgatggactgttgatcgggtttccagcataccagaattggaatctgcctgaccagaacgagcagaaggtgctcaataggacagagcccaatcggtccatgttcagctttaccatctccggtgcgggctccatacgcccagggaacagtggggggccgtttactgacgaccgttttcgcgtagctggcatggctcagaggggagcgtacatgggcgacggtcacgatgagtgtctgtgcttcgaagtgatggatactttcgttaccgcatggaggagcagcacaaagtcaacgccaaccacctcagaaattcccgcttga

SEQ ID NO: 7713 - RNA, 1806 nt, synthetic construct
  source 1..1806: mol_type = other RNA
atgccaaacccttttttgtttccagctttgaccgactcactgattagaaatgacgtggcacagttctctcgcaggatcctgggcctgccctactctcagcttcagaagcttatctatccccaacctaactatagggtctttactctcacaaagaggaatgggaagctgcgtagcattgcagagccattcgctaacataaaggcgttccagctgctaatcctggagtacctgacaaagaagagtagccccttcaaacctagcgtgcacggattcgttccccacagatccattctgacaaacgccaacgcccactgttcacctagaacacagcatgttctcaacattgacttacaggactttttcccgtccatttcgttttaccggattagaggcgtgttgcagaagaggcctttcaacttttctcacgccgtagcatcagtggttgcccatatctgcacgtttgatgggtcactcagccagggggccccaacctctccctttttctctaatttagtgtgccgatccatggaccgcgacctgcaagacctcgctcgcaggcataaagcagcctacactcggtacgccgacgatataaccttttcctttactacgcgaaattctctcagcctgccaaagaatatctgtatggaggcacctgatgggcgcgttgtgataggagccgaactaaatgaccttattaccgtgaaacatagtttcgctatcaacgctgacaaaactagactgtccaatcgagctcggaggatggaagtgacgggactgaccataaacgagaacccaaacgtgcggcgaattttcatcgataggatacgtggcgcactcagagcctgggaaacacatggatataacgccgctcaatctgtgtggcaggccaaagtcgcaaagtctatcctggctccccacgagaataaaatttggaagcggcagaccagaactggctccaccccacaattgaggaactcaatatggggtaaactactgtaccttaagatggtgcggggcggaaccgatcccctctacaaccacctggcggagaggtataatgcggttgtggaaatcgaaaaatcactcggtacctttgtggcaccacggctgcctgtcgatcccgtcgtgagagatgaacgcggggcccgaaaagcagtcttcgtagtggagtggtttggggacttcgagctatccgctactgccgccgacgttgtcagtggacaaggaacagcttttgcttaccgcgagtccaacttgctgattacatgcgaccacttattcgaagcaacagctaccattaaagataagagttaccccgccgatattaatgcgcctgagatcaagaatctcgctttgttcgcaatcctgcctgacattcctaaaaaaacttggcccgtacggatcctgtatagaaatgcctacgatgatattgccatcctttgctttgaaggcgagccgccgccacacaagtatttcaacccgatgagcgctcccatcaccagaaatactaacgggatcctgatgggctatcctgcgtataagcagtggaatctccccgacttcaataggcagtccgtcttgaaccggttcttaccagcagccggtatgagcagttttaccatcacgggtgccggcagcatacgtcccggtaatagcggcgggccattcactgatcttgagtaccgcgtagctggtatggcccagcgcggaagttatgagggccgtggccacgacgcgtgtctttgttttgaaatcatcgataagcatctgcagaagtggaaagcctcgacaacactcaactga

SEQ ID NO: 7714 - RNA, 1872 nt, synthetic construct
  source 1..1872: mol_type = other RNA
atgggccttactatcgagcaaattaccaagatactcatacgcagccgcgtgtcggacttttgtgacgaaattttgggagtgccctactccgagatcaagaaactgctgtaccctagggcaccctatctgttcttcgagttaaagaaaaggagtggcggagtgcggcgcattgcgaagccaacaaaacgtctgaaagagatccagcttcgcgtcctggaattcctggaaaagaacagagggccttataaagcaagtgtccacgggttcatctcaagaaggtccatagtgaccaatgcccggacccattgtagccccaagactcatcagattttgaacttggatctcgaggacttctttccatctatcactttttaccgcgtaagaggtgcgcttcagtcccacccctatcactgttcacacgctgtggctacggtgatagcgcaggtatgtacagtagacggagttctgccgcagggagcccctacaagccctttcctctcgaatttgatttgtcgctcactggatgctgacctcaacaacctagcccggagaaaccgagctaaatacacccggtacgctgatgacattacgttcagttttgccactcggtccagtactgggctccctgccgccatctgcagcgtaggtgcagatggcagggtcaccctcggcgctgagctgaatgacctgattaccacgaagcacaacttcaagatcaaggaatcaaagaccagagtctctaacagagccacaagaatggaggtgactggcataacaataaacaagcatccgaatgtgccacgaattttcatcgacagagtgagaggggcccttaatgcatggaagaagtacggctatgcagccgccgaatctgcatggcagaagcgtgtgcgggaatccggcaccgttgcctacgaaaaaaagccgtggaaacgacagacaaggctgggagtgccaccattactgaagaacgtgctttggggtaagctactgtacttaaggatggttagggggtccgaggatctgctgtacacccgcctcgccgaacgttataatgcactagtagaatttgaacagagcattggtcccttttcagctccaaaactccccgtcgtgcctgtggtgcgagatcataagacagcaatggacgctaccttcgtggttgagtggtccgccgactatcgtatctctaaagaggatgtggattctatcatcggccagggtaccgctttttcatataggcaacagaacttcctagtgacctgcagccacgtttttgaggggaaagccacagttgggtctatggaggttcccgtcgatatcgacactgcagagctcgagaatttgtctattcacgtcgtgcacccccatctgaaggaacgatggcctgccaaagtcctttataggaaccgccagttcgactttgccatcatgtgcttcgatggagagatcccaccacatcgcttttaccctgctcttgaaagccctatcgaagtccgggatgagggtatgctgattggctttccggcttataagaattggaacctgccagatatgaatgaattggcggttctgaatagatccgagccccaccgaggaatgaggagtttcaccattactggcgccggcacgattcggcccggcaatagtgggggaccttttacagacatgaggtttcgggtcgcgggaatggctcaaagaggagcttacctggggaacggccatgacgaatgcttgtgcttcgaggtcatggacgatttaatcgccaaatggcgggagaaaatcgcagctgagtgcgcgaacgccactacaaaagccgcaatggccgagaataaggtggacgcaagcgggagcctcgaacaactgccctga

SEQ ID NO: 7715 - RNA, 2022 nt, synthetic construct
  source 1..2022: mol_type = other RNA
atggccgctgctgtcatggagaaggatggtaggggccgccatcctgatttgagcgaggcccgcattcagtctctggaggaggttgccgagaggatcacccggaccgacgtgcctatcttttgccggagtgtgctgggaatcgaataccgacagctcgccccaataatatacccaacgcccccctacaaacatttcgctatcaccaagcgcgatggctccccccggtatattgccgagcctaggaagcgccttaaaattctccagtacaagcttctggagtttctgactgaacgaatgacacccttgaagcccgctgtgcacgggtttgtacctaataagtcaatagtgaccaacgcgctggcacacgctcacagacgaaaccatttcatccttaacctggatctcgacgacttcttccccacaatcagctttaagagggtaaggggcgtgatgatgaacagaccattcaacttctcttttgaggtggccaccgtgattgcacagatgtgctgtctgaatctgaagttaccacaaggcgctcctacaagccccttcctgtctaatctggtgtgtagaactatggacagagatctcacggacttagccaggagaaatagggcgacttatactaggtacgccgatgatatcacctttagctttattgtccggagtcgaaaatcactcccggcggccatttgtaccgccgacgacgaaggccatttggctctcggggcagagctgcaggagcttatcacaacaaaacaccacttcactataaatgaagcaaaaacccggctatccgacagaaaccggagaatggaagtcaccgggctgaccattaacaagttcccgaatgtcagaaggaagtttatcgatagaatccgcggagctctaaacgcctgggaacgcaatgactatgcaaaagtccagaagggctgggaggatagaattgcagccgccgaaaagctacacgttgatctcaagccgtggaaaagacaataccgatcaggccgtctggctcagcttaaaaatgtgctctggggtcaactgctatatgtgcgtatggtgcgcggcaaggacgacctcctgtacacccgcctcgccgaacgatacaacgcagtagtagcgaaagagcgcgccgccggaccctttgcagcgaaagttctgcccgtggaacccgttgtgagagacaaaactaccctgcgggatgcctgcttcgtcgtggagtggacgggggattacgacgagccaggtggtgggtccgaaataccctattcgcagggcactgcgtttgtttaccgtgagctgaaccttcttgtcacatgcaatcatgtgctggaatgggagaacgaagacgcgtctaaattcccagccatgattgactatgagagcccatatttgacaggcaagagccttaatctcgtccagccagggaccaggttatcctggcctgccaagatactgtaccggaacaagccaatggatttcgcaatcttggcatttgaggaccccccgccccacaggtattttagtgcgatggacaatcccattcagcccggcgctcatgggtacttggttggatatcctgcctggaaaaggtggaacttgcccgacgtgaacgctcagacagtgttgaatcgtacttccccacaccacggaatggatagcttcacaatcactggagccgggtctattcgccccggcaattccgggggccctttcacagacgatcggctgcgggtggcaggtatggctcaacggggagcccatatgggaagtaatcacgacgaatcgctctgtctggagatcatcaacacactgattgatacctataaggccaccttagctcctcccgcccctgtaggtgctgccgatgttgtggctctgccacctgctccggcaccaatcgcagtcccttcagctcaagtcgcacctgttccaactgccccagccgaagggaccgctgctcctatcgcacctcctacaggcgcaggagccccagacggattacagccgacgtga

SEQ ID NO: 7716 - RNA, 1839 nt, synthetic construct
  source 1..1839: mol_type = other RNA
atggaagttaatatcttcgacctcgaagagataggcgagaggctgacgagaacagacgtccccatgtttagcagaagcgtgttgggcatcgaatactctaagttagcttcgatcatatatcctaccccaccatacaaacatttcacgataaagaagagagacgggtcatctcgccatctggctgaacctcgccgaaggctgaaggatctgcaatataaggtgttggggttcttgaccgaacgtatgaccgcactgaaacccgctgtgcacggattcgtgcctaaccggagcatcgtgagtaatgcgaacgcccacgcccataggaagaaccacttcatcctaaatttggatctggaagacttctttccgagcatcaccttctacagagtgaggggagtcctgacctcccggccattcaatttttctcatcaggtggctactgtgattgcgcacatgtgtacgcttcatggcactttgccccaaggtgcccccacatcaccattccttagtaatcttgtgtgtcgcaccatggatagagatctaaccgagcttgctcgccgaaaccgggccacctatactaggtacgccgatgacatcacattcagctttattgttcgggcccggaggggtctgcctagtgcaatctgtacagctgacgatgaaggacacctggccctcggggccgagttacaggagctgattacaaacacgcaccatttttccatcaatgaagccaaaactcgcctatccgaccgacaccgccgtatggaggtgaccggcctcacaataaataaatttccaaacgtgaggcgaaagttcatcgatcgcatcagaggggcactcaatgcctgggaaaggaacggatacgcagcagctcagaaaggttggcaggacagaattgccgctagtgcctctcacgcctatgaggagaggccgtggaagcgccaatatagatcgggcgggactgcagagctcaagaatgtcttatggggtaaactgctctacctccgtatggtccggggcaaagatgacctgatttacacccgcctggccgaacggtataatgctcaggtccagaaggagcaggaggcgaaaccttttaccgcatcactactgccagtagaacccgtagtgagggatcatgcgaccgcactggaggcctgcttcgtggttgaatggttcggggagtactgcagcagagcaggtgtagtggatgacattcccatgggacagggcacagcctttgtctatcgagagttgaatctgttagtcacttgcgaccacgtgtttgaagcctttgctaatgtaaacggacactcatttaagaccgattacgaggcgcaggaggtgatcaataagactcttaaccttattcggccagatacacaacaacggtggcccgcgaagatcctctatcgaaatgcccagctcgatttcgcccttctggcttttgaggatcctgttcccccgcaccgttacttttccccaatggacaaccctatagagcgcagaagcgacggcgtgttgattggctttccggattggaaacagtggaacctcccagacttcaacgaccagaaagttctgaacagaaccgaacctaacaagggaatgatttccttcacaattactggcgccggatccattcggcccgggaattctggcgggcctttcaccgacaacaggctcagggtcgcaggtatggcacagcggggagcacacatgggctctgggcatgacgagtgcctgtgtctggatattatcaacaacctgatcgccaagtacaaagctgccctgactacagttgcttccactcccacgacatatgctgtcgactga

SEQ ID NO: 7717 - RNA, 1986 nt, synthetic construct
  source 1..1986: mol_type = other RNA
atggacatccatagcctggatgacctgggtgagctcctgacccgtaccgacgtggctgtctttagcagatctgttctgggtattgagtactctaagctcgccagtattatctaccccacaccaccgtataagcacttcatcattaagaagcgtgacggctctcctcgctatatcgccgagccccgcaaacgcctgaaggtcctgcagtataaggtccttagctttctaacggagcggatgactccgctcaaacctgctgtacacggattcgtacctcaccggagtattgtgtccaatgcaaaggcacacacgtcacgaaaaaatcacttcgtgttgaacctggacatcgaggatttttttccctcaattacctttttcagagttcgcggcgtgttaactagccgaccttttaattttagccaccaggtggccaccgttattgcccatatgtgtactctcgggggaaaactgccccaaggagcccctacttccccgcttctgagcaatcttgtgtgccgcacgatggacagggatatgaccgacctggcgaggcggaatagagcgacttacaccagatacgcagacgacattaccttttccttctccgttagggcacggcgatcccttccccaggccatttgcgcggcggatgatgaaggtcatgtggcattgggcgcagagctccaggatctgatcacaacaaagcaccatttttcgatcaacaccgccaagactagactctctgaccggcacagacgcatggaagtgaccgggttaaccataaaccagttcccaaacgtgcgaaggaaatatatcgatcggattcgcggtgccctcaacgcttgggaacgaaatgactatgctgccgctcaaaaaggatgggaagcccggatcgccgcttcgactactctactgtacgaacagaaaccttggaaacgacaataccgttccggggggatcgcggagttgaagaatgtgctgtggggaaaattgctctatctgagaatggtgagggggaagtacgatagtatctatacccgcctcgcggagaggtacaacgcccttgtgcagaaggaacaggctgctggtccgttcgccgcacctatactgcccgttgctcccgtggtcagagatcacccgacagccctagaagcctgctttgtggtagagtggctgggcgaatatcactctacaccaggggtttccgatgatatacccatgggccagggaaccgctttcgtgcacagggagttaaatcttctggtgacatgtaaccatgtcttcgaagccgtggctcacgtgaatggccatccatttgagactgactatgaggccgtcgaagtggtaaacaagacgctgaacctgattcggcccgacacccagcagaagtggccagctaagatcttgtaccgcaatgcccagatggattttgcaatccttgcctttgaggaccccgtccccccccatagatacttctcacccatggacaaacctatcgagcggagggctgatggtacgttgattggattccctgattggaaaacatggaacctccccgacttcaacgatcagagggtattaaaccgtactgaaccaaataaaggaatgttcagtttcaccattacaggcgcagggtcaatacggccagggaattccggcggccctttcacagacgacaggctgagggttgcaggcatggctcaaagaggcgcccatatgggctcagggcatgacgagtgcttgtgtctcgacatcatcaacgatctgatatctaagtacaaggcaaccctggcaccacctgcagcacacgccaatgcccctgctgtcagtgcaacaatgcctgcccccgtcgcctctccacctataagactcctggccccactacccctgagcgatccagcacctgaagctccagcgcaagctgccagcccacctacagccccaccattggctgctaacagcgagcccccgcttggagacgtttga

SEQ ID NO: 7718 - RNA, 1977 nt, synthetic construct
  source 1..1977: mol_type = other RNA
atggtgatcccatcactgaacgtgatcttcgaacaactgacgaggaccttcgtgccctcattcagccaggctgctctggggattccatacgctcaacttaaggacataatatatccgtcgccaccctacaagcacttccagattaaaaagcggaacggatctcctaggttcatcgccgaacctaggcaaaggctgaaggtaatgcaggagaaggtgctgactttcctcgaggaacgcatgagccctctcaagcccgccgttcacgggttcgtccccaaacgcagtatcgttacaaacgctcgcgcccactgctctagaaaaacacagttcgtgttgaacttggacctccaggactttttccccaccatcactttttttcgcgtacgaggggtgttacggaatcggccctttaattttagtcacgaagtcgcgacagtaatcgcccacatgtgcactctcaacggaagtctaccgcagggggccccaacctccccatttttgtcaaatctggtctgtcgaacaatggatcgggatctcaccgacctggctcgtagaaacagggccacctatactcgttacgccgatgatatcacgttcagtttcgccgtgagaactgcgtccaggcttcccgcggccatttgcgtggtggatgaagacggccatctgaccctcggggccgagcttcaggacttaattacaggcaaacaccactttacgatcaatccgcccaaaacccgattgagcgaccgggctaggagaatggaggtcacaggtttaacaattaacaagtttcctaacgtgaggaggaagtttatcgaccgtatccgcggcgcattgaacgcgtgggaacgcaatggatatgcaaaagccgaatcaggctggcaggctcgggttgcaaacgcagagagcggtccctacgaaaagaaaccctggaagagacaaactcgcacgggtgcccctcctaagctccagaatgtcctttggggtaagctgctgtacctccggatggttcgcggcaaagacgacctgatctataccaggcttgccgagcgctacaataaagccgttctgaaagagcaagctgcgggcccttttaaagcacctaagctgcccgttgagcccgtggtgcgggacaaagttacagcacaggatgcctgtttcgtggtggactggtacggggattataaggatccaacactgggggaggagatgcctatggcccagggaactgcctttgtgtacagagagctcggtctgctcgtaacctgcaaccacgtctttgagtgggagggtaaggtcgggaaggccgacacggtgatcgactacgagtctccatatctgacttccaagattctacagcttatacaaccgggaaccaaaaaatcctggcccgcaaaaattttgtatcgagacaagcagatggacttcgccctactggcttttgaaggcgatcctccccagcatcgttatttctccgctatggataatccgatcgaaagcggcgcccagggagtcctgattgggtacccagcatggaaacagtggacctggcctgattttaacgatcagaaggtgctgaaccgaacctttccgcatgtcggaatgaatagcttcactatatctggggctggcagcattcggcccggtaattccgggggccccttcacagatgacagattcagagtcgctggcatggcgcagagaggcgcctacatgggaaccggccatgatgagtgtctgtgtcttgaaatattagatggcctcattgccaagtataaggccaccttagttccacctgtgccaccagcacctgccacagtattgggagctccgccaactccagcagcgggatctgccgctctacctctgcctgtgcccgcagcaccagcagctaccgtcaatggagctgccgctccagcagcaagagccccagcacatcccgtgcctgctgctcctatcccccctacactgccatga

SEQ ID NO: 7719 - RNA, 1875 nt, synthetic construct
  source 1..1875: mol_type = other RNA
atgaatctggatgctttcgacgagatgcagaagagaacatctgtgtcttggttctcacacatagtcctgggtactccctactcccagcttaaaacagtggtgtaccccaagccgcactacaaaagcttcgttatcaagaaacagaacggcggacctagggtcatccacgagcctcggaaggagctcaaactcatccagaaaaaaatcctggcctttctgagcgagcgagccggtcccattaagccagccgtgcacggctttgtgcacaaaagaagtatcctcactaacgcattgaaacattgtagcccaaccacacatcacatcttgaatttagacctgaaggatttctttcctagcatcacctttaggagggtcagaggcgccctgcggaagcatcccttcgattgttctcatgaagtggctacactcattgcccacatctgcacgttcaatggtaccctcccacagggcgctcccacaagcccttttctgtctaatatgttgtgccggagaatggaccgggaccttactgatcttgcccgtcggtatcgggcaacctatacccggtacgccgacgacctgaccttttcctttaatgtcaggagtgcagagaggctcccctcggctatttgcatggtggaagatgggaacgtagcaccaggaactgaattgactgaactgataaccaccaagcacggcttcgccatcaacccgacaaagacgcggctgaacgacaggttcgggagaatggaagtaactggattaaccgtaaacaacttcccaaatgtgaggcgcaacttcatagatcgaatccgtggggccttaaacgcttgggaaacatatggctatgctgccgctcagctggaatgggagaagcgcaatgccacttacatagcggccccctatatcacaaagctgtggcgtagacagacccgagccaatttcgtacccaaactgaagaacgtcctgtggggcaagctcttgtttgtgagaatggtgcgtggcaaggaagacgccctctacacccggctagctgagcgctacaataaggcatgtgcagctgagcaagggaccgtgccttttgtctatgaaaaacttcctatcgagccagttgttcgagactacgggtctgcggaggacgcagtgttcgttctggaatggatgggcgactaccacagttcccccggcgtctttgaagatatggtctgctcccagggtacggcattcgcctacagagagctgaacttatttgtgacctgcgatcatctcctatctggagctaaggccaaagttggtactttcgaggtggaggccgattacgatgccaaggaaatggtgaataaaactcttcagcttgtccacccatttacgaaacagagttggcctgccaaagttctttataggaatgcacaactcgacattgccttgattgcttttgacatgccacaaccgcccccacatcgatactttgctgcaatggagaatagcattcgcgtgcgcacatccgggatactaattgggtttcccgcgtataagaattggaacagacctgatttcctggaggagaaggtgctgaacaggacagaacctaataagggaatggcatcattcacaatcactggagccggttccattcgccccggcaacagcggaggaccgtttgtggatgaccgcttccgcgtagctggagttgcccaaaggggggcctatatgggggatggccatgacgagtgtttgtgtttcgaggtcctgaaccagctgatcgacaagtggaaggcgccacaagcgaaatcagtgctgccagagaacaaaattgctgcaaccattgtggctacgtcacctggcgcggtttcgaccgctgcacctcagacatga

SEQ ID NO: 7720 - RNA, 1806 nt, synthetic construct
  source 1..1806: mol_type = other RNA
atgaccacgacattgtccactataagcctgaatgacatactcctaaggcatgacgtccaccatatgagctcaaaaattctgggcgtcccttacagtacactgaaggccctgatctatccactgccaccctataagtcatttgttatcactaagcggaacggttcccctagacttatccaggagccacgccgcgcactaaaagagttacagtacaaggccctggattacttttacgaacagtgcggactcccgaaaccctgtgtccacgggttcaccaaagacaggagcatcgtgagtaatgctaagagccactgctcagatcaaactcagcacctgcttaacctggatctggaggacttcttcccttcgatcaccttttatcgcgtccgaggtgtgctgcagaagaagcctttcgaactgtcccatcaagtcgccacagtgctggcccacctctgtacattcaaaggcgtgttgcctcagggggctcccactagcccccttctcagtaatttgatttgcaggtcgatggaccgcgacttgatgtcccttgcaaagcgccacagagcgacctacactcggtatgccgacgatctgaccttttctttcagtgtgcggaggtccgagtctttgccaagcaacatctgttctttcgatggcgggaatctgaccttggggaacgagctgcaagccataattgctgctcattctttccggattaacgctgagaaaacgcgcctgagtactaggttgcacagactggaggtcactggcataaccatcaatgagtttccaaacgtgcggcgggtgttcattgatcagatcaggggcgcactcaatgcatgggagaagtatgggtataaccttgcccagaaggattgggaacgcaggatcacagacggggtagccagcgcgtacgaaaagcgtccttggaagcggcagataagagccaattcccctcctgatctgaagaacgttctctggggcaagctcttatacgtgcgaatggtaaggggcaaggatgatgtgatctacacaagactggctgagcggtacaacgccatctgtgaaactgaagatgcaaaagggccatttgccttcagtcgtctaccggtagagttaatcgttagaaatgcccaggatgccgaacgcgccgtttttgtggtagagtggagcggagattaccagcccgagggcaacacagcaccactagacgtcgtgctgagccagggtaccgcttttgcctacaaagacgtgggactcgtgacctgtgaccacgtcctgagctattctggaaagatcggaggtgtgacctacacaaccgacgttcaatcatctgacgtaattaacaagacactcacagtgagaaatccagttaccggcgctagctggcgtgtcaaagtggttcacagagacgctacgagggaccttgctattctcgtcttcgatgaagcgcccccggcgcatcgacatttttcctccatggtggctcccatgaaccaaggtatgaggggaattttaatgggctttcctaactggagtcccgggcgccgtgtcaatcagacgaaagccgatgtgttatcatgctatgctcgatctgcccttaaacgattcgaaatctccactaatattcggcagggcaactcaggaggcccctttgtggacgagtcttatagagtggcaggagtggcccagcagggtgcaagacaagatgccggaaatgacgaatgcctctgcgttacagacctggacgcttggattgcacagtggaaagcatctgcaatggggaccatggccgcgtcctcatga

SEQ ID NO: 7721 - RNA, 1809 nt, synthetic construct
  source 1..1809: mol_type = other RNA
atgaacgacattctgctgcggaatgatgtgcattatatgtcttctaaagtgttgggcgtgccatatagcactttacaggccctgatctatccccgcccaccttacaagagcttcactattaacaagcgcaatggctctccgagattgatccaggagcctagacgggcgcttaaggctctgcagtataaggtgctggattacctctatgaacactctggtctacccaaaccttgcgttcacggctttacaaagaacagatccatagttagcaatgcaaaagcccactgtaatcggcaaacgcagcatcttctgaatatcgatctggaagacttcttccccaccatttcattctaccgcgtgagaggggtgctccagaagaagccttttgagttctcccatcaagtggccactgtgttggctcacctctgtaccttcaatggtattttacctcagggagccccaacatcaccgctcctgagcaacctggtctgcagaagcatggaccgtgatctcatggccctggcaaaacggcatcgcgccacatatacgaggtatgcagacgacatcaccttctccttctctgtgaggcggagtgagtcgctgcccgcaaatatctgttcgttcgacagcggcatccttacactcgggcatgaactgcaggctaccatcgcaactcataattttcgcgtaaacgccgccaaaagtcggctttcaaccaggttgcaccggctagaagttaccgggattaccatcaatgaattcccaaacgtcaagagggaatttattgatcgcataaggggggcgcttcacgcgtgggagaaacacgggtatgacctagcccagcgtgcctgggagaagctggtaagcgacggagctattggcacctacacaaggcgaccttggaagaggcaaacccgtatcggcaaactgccaccgcttaaaaatattctctgggggaagctgctgcacgtccgaatggttagaggcaaagacgacgtgatttacaccagacttgcagagcggtataacgcagtgtgcgaggccgagaacgtgaaaggtccctttgcctactctagactaccggtgggcctgatcgtgcgaaacgcacaggatgccgaacgcgctgtgttcgtagtagagtgggacggtgattaccagcctataggatccgctgcgcccctcgacatggtaagttcccagggcaccgcttttgcatataaggatgtcgggttgatcacatgcgatcatgtgttatcatactccggaatgatagatggcaagagttttacaacggatgtccagagcggcgatgttatcaacaagacatttactgtgcggcacccagctacaggcgagtcttggaaagttaaagtggtccaccgagacgccgccagagatttagcaatcttggagttcgatgacgagatcccttcctacaggtacttctcctgtatggccgcgccaactaatcagaatatgcgaggactcttgattggtttccccaactggagtcccggtcgtcctgcaaaccaatcaaaggcagacgtcctctcttactaccctagatcaggactgaaacgctttgaaatttccacaaacatcaggcaaggaaattcaggggggccctttgtggacgagtttttccgcgtcgctgggatagcccagcaaggagctaggcaggatggcggaaacgacgaatgtctgtgcgtcactgagctggacgcttgggttgctcagtggaaggccgccaccactgctagcattagcgctccaacgctggtcgaaccagttgccaagagttttccctga

SEQ ID NO: 7722 - RNA, 1788 nt, synthetic construct
  source 1..1788: mol_type = other RNA
atggctgttcacgtgccactgacaccatcagcactgcatacactactgatcaggaacaacctgccatacatgtcccggcacgtcctgggtgtctcttatgacactcttcaggcaatgatatacccgctgccaccctacaagacattcgctctgatgaagcgcaatggcactccacgagtgatccatgagccccggcaaagactcaaggtgctgcaggagcgagtgctagccttcctctacgagcatgccgcccctgccaaaccgtgtgtgcatgggttcaccccgaaacgctccatcgtgactaatgcccaaatgcactgttcccagaagacccaacacctgttaaacatcgatatcgaggatttctttcctagcattaccttttaccgcgtgcgtggggtgtttcaaaaaaagccctttgagttctcttttcctgtcgctaccgttctcgctcatctgtgtacattcagcggtgtgttgccacagggagcacccacttccccgctgttatccaacttggtgtgcagatccctggatcgcgatcttatgacccttgctaaacggcacagagccacttacacgagatacgccgacgatctgacattgtcattcagcgtaaggagagccgaaagtctgccaagcaacatctgttcctttgacagtggaatactcacgcttggtcacgagctccaggccctaatcgagcaccattcttttagaatcaaccccaataaatcgcgactcagcacacgtctccaccgccttgaagtgacaggtatcacaataaacgaattccctaacatcaagaggaagttcacagatagaattcgcggagccttacacgcctgggacaagtatgggtatgaccacgcccagttggaatgggaaaggagggtcaacaaagcagctgaggaggcatacgccaaaaggccttggaagagacaaacccggacccggacggttccagctcttaaaaacgtgctctgggggaagctgttgtacgtgcggatggtcaggggggctactaacactctgtatttgcgccttgctgaacgctataatgcgctgtgcgcgcgcgagcgactgaaaagtgagtttgtttgctctagtgtgccaattgatagcattgttcggaatagcaatcaggccaagaaggcagtctttgtcgtagaatggtatggggaactggacggcaaagacgtgggaggcctaggaaccgcatttaagtatgaggacgttggcctgattacttgcgaacacgtaattaagcatcaggaccatggcccctacgcggatgacatccctagatcagagatcttcgtgcgggacgctgaaaccgatgaaacctggcctgtccgtatagttcacagagacaaagatcatgacctcgcaattctccagttcgatacagcgaatccccctgtgtctcgacactttattaggggcgagaagcccatcaccgtgaatgagtctggtgttttaataggcttccctaaccccactcgtggccggcaggcaaatcaggtgaacgcccaggtagttaacgtcttcccaagggccggcctgcccaggtttgagatcaaggagcggattaggcagggaaattcaggcgggcccttcgtcgacgagaattatcgagtggtcggcattgctcagcagggagccgaacaaggaaaggggaatgacgaatgcctgtgtattacggaggtgaatagatggctcgatgcttggaaaaccagtttggtagtagcagtggcggtcgcatcagcccctgatcctatcccctga

SEQ ID NO: 7723 - RNA, 1698 nt, synthetic construct
  source 1..1698: mol_type = other RNA
atgtctgatcagctctttggcataacttatagtgaactacaggctttactgtatcccaggcagccctacaaaacattcatcatcgccaaaagaaatgggtcaccccgggtcatacacgaacctcggatcgccctcaaggttgtgcaggagaaactattgcatttcttgtacgaaaacgctggcatggcaaaaccctgcgtacagggctttacccctggcagatccatagtgactaacgcgcaaaaacattgttctccacgcaccctgcaccttttgaacatcgatatcgaaaactttttcccgagtatcacattctaccgcgtgaggggcctgtttctcaagaaaccttttgagttctcccaccaggtggctaccgtccttgctcagatctgcacctaccagggaattctgccccaaggtgctcccacatctccgatggtggccaatctgatatgccgatcactcgacaaagatctgactctgctggcaaagagacaccgggctatttatacacggtactgtgatgacattacttttagcctctccgttagagatatcgccaagctacctgtaaacatctgtagtttcgactcaggggtcctcacccttggagatgagctgcagagcatcttcgttaagaattcgttcaggattaatcccttgaaatctcgcctggggaacaggcgacatcgtctggaggtcaccgggatcaccattaacaagagtccgaacgtcaagagatctttcatcgatagcattcgcggcgcgctgcatgcctgggataagtatggttacgaagccgcaaccgcggagtgggaaaagaggccatataagcgtcagagacggattggggggattccatccctcaagaatgtgctctggggaaaactcctttacgtgaggatggtgagaggtggcgatgacgtgctgtatacccgcttagccgaaagatataatatgttgtgtgagaaggagcaggccgcccgcaaatcatttacgtacagttccctgccaattgaggcagtggtccgaaatgccgcagacgccgaaaatgcagtgtttgtcctggaatggctgggagattacaagggagagccagtaggcggccaaggcactgcatttgcctacaaggacgtaggacttctgacatgcgagcacgttttccatacagtgactgaaaacggcgagcccgtgagcttcgacgaggtgaagggtgctactctgacgctccaaaatccctccacagggaagttctggccagcaaaactcatccacaaagacccataccgagacttagctgtcgtgcattttgacacacggattcctcctgcacaccgccacttctcagctctcgaggcccagatcaaccggaattccaagggaatcctaattgggttccctaattggagccctgggaagcgagccaaccaattatatgtcacggtgctgaataggttccccattaccggcctgcagcggatagagatcaatggtagcgtgaggaaaggaaacagcggtggaccatttgtggacgaattgtttcgtgttgccggcgttgctcaacagggcgccacacaggcaaacggaaacgaccagtgcttatgtgtaactgagctggataagtggctggtcgagataaaagggcttgcccacggtttgtctcttgacgcgctgcctgataccccagttgctgactga

SEQ ID NO: 7724 - RNA, 1746 nt, synthetic construct
  source 1..1746: mol_type = other RNA
atgaccgtcaactttcatgagattctcattagatgcgatgtcgattacatgtccaaacatatcttcagcacctcttatgccgacctggccaaattaatttaccccagcccccggtacaaagcattcgtgatctcaaagcgggacggtacgcctcgcgtcattgaagagcctttccgaaagctgaagcgtctgcagtacaagttacttgactacctgagtaggaacagcagtacaccaaaagtttgcgtacatggattcattaaggagcgtagtatcctgtctaatgctagagtccactgttccagtaaaactagctaccttcttaacgtggacatcgagaatttcttccactcaataaccttttatcgcatcaggggagtttttcagggagaaccctacaactttagctatgagatttccactgttctggcccagctgagcacctttaacggtagactgccccaaggtgccccgacttccccgttcctttccaatctgatctgtcgaagtctggatggggaacttatgcggcttgctaaatcacatcgaggaatgtacacccggtatgcagatgacttaacattctctttttcagctagaaccccactggggctgccaaaaaatatctgtgagttcgacggcgggaacttgcacatcggaaatgaactgctctccatcatcgagaagaattcgttcaagctcaacgagaaaaagtccagaatctccagtcgcaagcataggctagaggtcacaggtcttacaattaatgagtttccaaatgtgcgccggaactacgtagatcaaatcaggggggctatacacgcatgggatgtgcacggctatgaggccgcccagaagcggtggatcgagaagaacaacgttgccgtaaaagtaagacagacaagaaacctctatgcaccacagctcaaaaactacctctggggcaagctcttgcacttgaaaatgattcgaagtcggggggaccccatctatactagactcgccgaaaaatataacaccctgtgcgcgaaggaatctgggaaaggcttcatctttgcgcctaagttacctatcgagccaatcgtgcgcaatgcaaatgatattgagtctgcagtgttcgtcttagaatggtcaggagactacatactgaatgaagcttctcccgagcatacagaggtggttggtgctcagggaaccgccttcatttacaaggacttcggcctcattacctgcgaccacgtattgtcgtctatgctgcgtatagggggtgtggatgtgagcgttgatattgactctgaccggattctcaataagaagctgtatgtgtgtaaccccctcctggccaagagcttgcctgtgagggtgattcaccgcgatcgccacctggacctggctgttctggaattcgtggatggagtggtgggcaaccgctatttttcttcagcggagcgtcctatcctgaggaatgaacagtgcactctggtcgggtttccaaactggactgtcggcagaggcgtgaatctattgcctgtgtcagtggttatccgctttttcaggtccctatttaatcgaatcgagatttccggcgcaatcaggaaagggtacagcggcggcccgctaatagatagcagctttagggtcataggaattgcccaggaaggcgccacacaagctgacggcaacgacgaatgtttgtgcataacggaagtggataagtggctttcggggctcacggtccggccctaa

SEQ ID NO: 7725 - RNA, 1866 nt, synthetic construct
  source 1..1866: mol_type = other RNA
atgaaagatgtcgaggtggcaacagcgtgggctcatatgactgattcggatatccacttcgacgtgctgaatctgccattccgtgaagctctaattcggaccaacgtggagtttatgtctaggtatctgctaggtatcccatacagcgaggtaaaaaaaatcatatacccaactccttcctacaaaatcttcctcatcactaagcgaaatggaaaggccagaatcattcaggaacctcggaaggctctgaaagagcttcagctgaaggtgttaagttttttagagactcgcgggggcaatcctaaggcgtgtgttcatggctttactaaaaggaggagcatcctcacaaacgccctcagacattgtagcacacagactcatcacctgttgaatatagacctacaggattttttcccaagcatcaacttttttcgggtgaggggggtatttcaaagcaagccgtttgagtgctcttattctgtagccaccgtgctggcacatctctgtacccaccgcaatgaattgcctcaaggcgcacccacctcacccatcctagcaaacttagtgtgtcgaaaaatggacagcgaactgatggccctcgctcgaaggcatcgggccacctatacgcggtatgctgatgacatttctttcagcttctccatacgtgacgcagtccgattgcctgagaacatttgccggtttgagagtggaacactgaccctgggacaagaactccagtcaatcattctggaaaactcctttaacatcaattctacgaagaatcgcctttccaataggctgaataggctggaagtaaccgggatcacaataaatgagttccctaacgtgaaacgcaattttatcgatcggattcgcggcgccttacacgcctgggaggtgtttggttatattaaagcgcgtgatcagtgggacgccttgatatcagaaggcctccgcctcaccagagaaaagagaatttggcttaggcagaggagaacacgggccgtccccgaattggcaaatgtcctttgggggaagctcctgtacctgagaatggtcagaggcgctgatgatgcgatttatacaaggctcgccgagagatacaacgtgctgtgtgccaaggaggttgaggagggcagaaacttcttcttcagcaagctgcccgtcgagcccattgtaagaaatagtcatgatgttgaccacgcagtgtttgtcgttgagtggggcggtctgtatcccgtcgaaggggctaaggccccagaattcgtctgcggacagggtactgccttcttataccagtccaacaattgcctggtgacgtgtgaacacgtgttccggtataaagagtcagttaagatcacaaagtacggggaggaagttgaggagattcttgatactggctacatgtcgcctgacgtgtacgagaaaaacatcaccatacactccccagtccgaggacagacttgggacgcaaagctcgtgcactacgacagtgaccgggacctggctatcctcgaattcgtttcccctccagaaaacgttcgccacttcacaagtctggacgcccccatcaagaaaaatgagccggggtacttgatcgggtttcccaactggaacccggggcgtttcagcaaccagaccaatgcttcagtgctgaataggtttccccggaaaggactgcaaagaattgaagtgagtaccaacgtccgcaagggaaactctggcggcccatatgtggatgagcttttccgcgtggcaggtattgctcaggagggagccacacaatccggaggcaacgacgaatgcctttgcgtgtcagagttgaacacctggcttaaaaattctaccaacaagaaggagacgtga

SEQ ID NO: 7726 - RNA, 1722 nt, synthetic construct
  source 1..1722: mol_type = other RNA
atgtctaaaaatctgcttggaatgccttacagtgaaatacagaagataatctaccccacacccccttacaaggtgttcgtcatcactaaacggtccggcgggcccaggctgatccaagaacccagacggaaacttaaagagctccaactgaaggtgctggcctttctggaggagcacggaggaaagccgaagccatgcgtccatggctttaccaagaatcgctctatagtgacaaacgcacgtaagcactgtagtaggcagactcagcacctgttgaacatcgatctgaaagacttcttcccatcaattgggttcttcagggtgagaggcgtattgcagaaaaggcctttcgcatgttcacactcagtggccaccgtgctcgctcacctctgcacccatagaaacgaattacctcagggtgctccaacatcccctatgttagccaacctagtctgtcgaagactcgactccgaccttatggacctggctcgaaggcatagatcgacttatacacggtacgctgatgatttgaccttttctttctccgtccgcgacacatcccggctacccgagaatatttgcgcctttgagtctgggggtttgactattgggcacgagctgctgagcattattgataagcacaacttcgacattaacccgacaaagagtcgactttccacacggttgcatagattagaggttaccggaatcactattaatgagttcccaaacgtgaagaggatttttatcgatagaatccgcggggctttacacgcatgggaaaaacatggcttcgacgccgcgtcagcagaatgggagcgacgcatcacgaagggcaaaacctgcatctatgagaagaggccctggaaacgccagacaagaactcgtaaaataccagagctgatcaatgtcctgtgggggaaattgctgtatgtgcgcatgatccgtggcgctgacgacgtgatctacacgcggctcgctgaacgatataacgtgctgtgcgaacacgagcagggcctgagcgccgattttagcttttcaagactacccattgaaagcatcgttcgcaacgctaatgatgctgagcgggccgtattggtggtgagctggctcggtgattaccagccagttggcgtcgcggagagtgaagccgtcggaggacaggggactgcctttccatatcaaagcaataattgtctggtgacttgcgatcatgtactgaggtgggagggcgtcgtgaatgagaataatgtcagcacagactgtaccagcgtcgatgttcatggagcaaatctgaaggtgatctcccccgcactggggcttgagtggccagttcgagtggttcacagggatgtcgaccgcgaccttgcaattcttgaattcatcggccctccgcctaatattcggcattttgctggactcgatgcccctattaagcgcaatgaaactggctatctgatcggataccctaactggaacgccgggagggtggccaaccaggtgaacgttgtggtgaccaacaggtttgcgagaagaacgtttcagcggctcgaaatatctaccacaattcggcaaggtaactctggtgggcccttcgttgacgatctcttccgtgtagcgggtgtagcccaagagggcgcaacccaggtgagtggcaacgacgaatgtctgaccgtagacgagctcgacacctggatagccacctggaagacgcggaattga

SEQ ID NO: 7727 - RNA, 1740 nt, synthetic construct
  source 1..1740: mol_type = other RNA
atgagcacattcccattgggtatcctcacgcgcaattttgtggagagtctctctgcaaacctgttcgggatgccgtatagcgatttgcagaagatcatctatcccagccctaggtacaagtctttcatcattaacaagagaaacggttccccacgggtgattcatgagccccgagccaagttgaaagctctccaggataaagttctcctgtttctggaagagaatgctgcaccagtcaagccatgcgtccacgggtttatcatcggcagatcaatcgtaacgaatgccaaaaaacactgctccccacagacaaagttcctcctgaatgtcgacctaaaaaactacttcccctcaatcaatttctacagagtccgcgggatattcatgaaaaaacccttttcatgcagtcacgcagtggcaaccgtgttggctcaaatttgtacccacaacaatgaattgccacagggtgcacccacttctcctttcctcgccaatttagccagcagaaggttagacactgagttaatggatttagccaaacggcaccgagctagttacacacgttacgcagatgacctcacctttagcttttccgttcggaaggccagttccctccccgagaacatttgctcttacgattcgggagtactgaccctcggcaaggaattgatatctacgattgagcataactcctttaacataaatcccgtcaaaagtagaatctcaactcctctacaccggatggaggtaaccggcctgacaatcaacgaatttccgaacgtgaagcggaacttcgttgactgggtgagaggaacactgcatgcctgggataagtatgggctggctgcgactcaagtggaatgggagcggaaaatggaggccgcaaagacctccccttacgagaagaagccctggaggaggcagaggagatgcaagggattcccttcgttctataagattctgtgggggaaactgctgtacctcagaatggttagaggacctaatgacgccctgtatacccgcttcgcggaacgatttaatggcctttaccaaagggatatgggcggagccgccctgctgctacctattgagaatatagtgcgtaacgcggctgacgtcgagagggcagtgttcgttgtatcttggatgggggattatcagctggagggtggcgcatcagaattttgtgccagccagggaactgcttttgcctatatgagcgctaataagctaatcacttgtgagcacgtgctgcggtgtgaactcgaggtcaatgggcaggtgttgatggtggattttcaggacgcccagatgcggaacggagaaatgacagcacattctcccacccttggcttttccgtgccagtgagggtcgtgcatcgcgaccaggatcgtgacctggcggttctggaatttgtaaacccgccacctgccaacatccgtcacttcgtcggacgcgactccctgatcaagcgcaatgaacatggcattcttgtcggctatccaaactggaatcctgggaggatcgctaaccaagcggccgccaacgttctgaataggttcccccgacgcggccttcagcgcatagagattagcaccaatattcggagaggcaacagcggtggaccctacgtggacgagcttttccgagtggctggggtggcccaagaaggtgctacacaggctgatggcaacgacgaatgtctttgcgtggaggagctggacaaatggcttgattga

SEQ ID NO: 7728 - RNA, 1794 nt, synthetic construct
  source 1..1794: mol_type = other RNA
atgaaagatgtagaggtgacacccccgatgcccgtggtcagtagccccatagacctgcatggggtgtttctgaaagtcgatgccgactatttctccaggcacgtgtttggcgtaccatattcctctctgaaagccgtactttaccccacgccgcgataccgggcattcattatcgcgaagcggaacggaagcccacgcatcatccacgaacctaaacggcagctgaaagagtttcagctgaagttactgtcattcatggagagtcaggtgacccagatcaagccatgtgtgcacggctttgttaaaggccggtccatcgtgtcaaacgctgagcgccacctggaaacccaaccacatcacctgttgaatctcgacctggaggactttttccccagcatctccttctacagagtgcgcggggtctttaagaaagctcctttcggcctgtcccacgaagttgcgactgtgctcgcgcagctctgcacatattctaattctctgccccaaggagccccaacttctcccatgctttcaaatttagtgtgtcgttcacttgatagggatttgaccgccttagcacggagacacagggccacatacaccagatacgcagatgatctcaccttttcttttacggtacgggaccccaacaggctgccatcgaatatttgctcgttcgactccgggatcgttaacctgggacatgagctacaagctttaattcaggagcagcatcacttcaggattaacccaaaaaagacacgtatgagcacaaggttccataggatggaggttacaggtctgaccatcaacgaatttgccaacgtcaagagagagtttatagatcgcataagaggcgctttaagtgcctggaagaaatacgggtacggaaagagtcaggccagttggcaggaccgcgtgattgacggccaaactaaaccgtacgagcagcggctatggaggagacaagttcggggcgggggtgtgccagaactgaagaatgtgctgtggggcaagcttctctatgtccgcatggtgcgagggcgcgacgatagtatttacactcggttggctgatctctataatgagctctgcaagcaagaaaagaaagtggataaggacttccttttctcttccctccctgtcgaaaaaatcgtgaggaacgcggtggatgcagagcgagccgtcttcgttattgagtggtcaggagactactgccctcccggagccagcgctagcgaaatggtaggaggccagggcactgctttcgcttataagaaggctgaccagttgatcacctgtgaccacgtgttcaattgggaagggcaatatgcaggggcctcagttagcgtcaactgccagagcagcgatgtacacggcctgactctgcgcgcagtgaatcccgctaccggtctgtcctggccagtgaccatcgtcagacgcgacgcacctagagatttggctgtgctacagatagccggtggctctctcgctcatcggcattttgtcgccattgaggcccctctgaagaggaatactagaggattcctaataggatatcctaactggagccctggacgtgtggcaaaccaggtgacagccaacgtccagtcactttacaacagatctgccctggcacgtttcgagatttccacgttgatccgacagggtaatagcgggggtccttttgttgacgcccagtttcgacttgtgggggttgcacagcagggcgcgacccaacagagtggtaatgacgaatgtctgtccgtcctcgagctcgaaaagtggttgtga

SEQ ID NO: 7729 - RNA, 1764 nt, synthetic construct
  source 1..1764: mol_type = other RNA
atggcatttctgggagtcaaggagtttcatgactacatgttaagaagtgatgtgccttacttctccaggcatatctttagagctgagtactcctccgtggaggggtatctctacccacatccacgctacaccagctttgtgctcgccaaagctaacggcaagaaccgatttatcgccgaaccttcgaagaaaataaaagagctacagtaccgagccctgcggtacctggagaagacagtgccccagcccaaagcatgcgtacacggttttgtggaggggagatctatcctgactaatgctcgtaagcatttagagcggcgcccataccatatcctcaacttggatttgactgatttctttccctctatcaccttctttcgggttagaggtgcactgatggcccctcccatgaagttcagcttcggggtcgccaccatgcttgcccacctgtgcacacacgaaggaacgctgccacagggggccccaacttctcccttcctggccaatttaatatgtagatctctggactcccagctcactttattgagcaagcgccaccgggccacctataccagatatgccgacgacttgacattctccttcagtcacaggcacgccaacaggctaccagctaacatcgttaattttgacggcggaacagtctccatcggctctgagctgagaagtatcattgagtcaaacagcttcggcattaataatgataagacccgcgtaagcacccgcatgagacgaatggaaattaccggcgtggtggtgaacgaggatcctaacgtgacaagaaagttcatcgataagattaggggggccctccatgcatgggaccgctatggttatgttgcagctctggcaaattggaacgcacgcgtagctgaaacgctaaaggaaccccgggcgggtaaacaatgggcgaggcagacacgtacaggcaacataccgagtctccagaacgttctatggggacggctgctgtttgtgagaatgattcggggggacgatgatcttttgtatactcggctggctgaaaagtataaccacctttgccgcacccacaaagctatagacccggagtttagggccgcaagcttacccattgcactgcaggtcaagaatagccttgacgctgatttcgctacttttgtgttcgagtggtcagcggactatgccgcctccgatgctcacgaatcagagcctctggtgagtcagggatcagcctttgcatacggcgacggccgtcgattcattacctgtgaccacgtgctgaaaggacagtcggctgacggcgaggttgatgtggcaaatcccagggtcaggaatctcaccatgaatctccgcaatcccgtgacaagaatagactttcaagcccgggtcctccatcgggacgcgcatttggatcttgccgtccttgaactggtggatcctgccgccagggccaaacggtacttcgacggcaggactgaaccactggagcgagatgcgcgtgcgaggttgatcggattcccgaactggactcaaggtcgaacggcaaataacagtgtcgtatctgtccagcagcgtttccctcgggctgggctccaaagaatcgaaatcggtggatctatgattcgccaggggaattcaggcggacctctcgtggatgctagctacaaactggcaggcgttgcccagcaaggcgctagccagtcatccgggaacgacgagtgcctgtgtattatggaactggacaggtggcttgcctccctgtga

SEQ ID NO: 7730 - RNA, 1761 nt, synthetic construct
  source 1..1761: mol_type = other RNA
atggctatactgggtaaaaatgaattccacgattttctcctgcgggctgacgttccttatttctctcgtcacatctttggggccgagtattggaagattgagggactgttataccccacacctcgctataccaatttcgttatcgctaaggccaacggtaagaatcggcatatagcagaacccagtaagaaaataaaagccctgcagtaccgggctcttgcctacctaaaaggaaccgtgccacccgctaagccctgtgttcatggcttcgttgaaggcaggagtatacttaccaacgcagaaaaacatctcgaacgcaggccgtaccacattttgaatctggatctgtctgatttctttccgaccattactttcttccgggttcgaggcgccctaatggcaccaccaatgaagtttagctttgaaatggccaccatgctcgctcatttgtgtacccacgagggctctctgccacaaggagcccctacttccccgtttctggcgaatctcatttgccgtactcttgacagccagttaactctgctgtcaaagaggcatcgggctacgtatacacgttacgccgacgatcttaccttttccttttcacacagaagcgcagagaggctgccagccaacgtagtcgcattcgatggggggacagtctctatcggatccgagctgcggtcaatcatcgagtctaattcctttcacatcaacgagggaaagactcggatttcaaccagactcagaagaatggagattacaggcgtggtagtgaacgagttccctaatgtaacccgcaaattcattgataagattcgaggtgccctgcatgcatgggaggcccacggatacgtagccgcccaagcgacatggactgctcggatcacagagaaattgaagaaccctcctcgggagcgaccctgggctagacagacacgcaccggcaacatcccatccctgcagaacgtgttatgggggcgcctcctctttgtgagaatgatcagggggaacgatgacctcttgtatactagactcgccgagaagtacaatcacctttgtaggctgcaccagacaattgaccccggttttaggggcgcatctctaccaatcgaccttcaggtgaggaatacgctcgacgtcgatttcgctacgttcgtcttagagtggtcaggggactacacggctccaggaaccgacgagtccgaacccctggtgagccagggcactgcgttcgcatatggaacaggcagacgcttcattacctgcaatcatgtgctcacaggtcagtcaaaagatgaagagattgacatctcgaaccctttcgtgcagaacgtgtccatcgttctgcggaacccactgacagggactgtctccccggccagagtgctaaatcgggacagcgcccgtgatctggcactgttggagtttgtggacagcgaaacacgagcgcagcgctattttgatggccgacccgagcctttggagcgaagcgctcaggccagactgatcggtttccctaactggacccccgggagaactgccaacaatacggaagtgagcgtgcaacaccgctttgctagggcgggccttcagcgcctcgaaataggacagaccatcaggcaagggaattcgggaggccccctggtcgattctagttacaaattagccggcgtcgcccagcaaggggcaagtcaaagtagcggcaacgacgaatgcctttgcgtgatggaactggacaggtggctgaccgcattgtga

SEQ ID NO: 7731 - RNA, 1929 nt, synthetic construct
  source 1..1929: mol_type = other RNA
atgaacaccccaaacactattctgattcaggcccttgttgagaatcaggaccttatggacgcgtgggagcggatggacgtgcacgtgtttagcactggcgtgttgggagtgccctacgagcaggtgcagaaaatcctgtatccgcaccccccttatagggcctttctaatggcaaaaagatctggggggtttagactcattcgggagcctcggagacgtctcaaggttttgcaggaaaaggtcctggctcacctatacgagcgagccgggaccccaaaaccatgtgcccacgcattcatcaaagaccggtccatagtaacgaacgcgaggcgacatctggagagacggccaacattcgttttaaacttggacctggaagcatttttcccctcaatatcattctaccgggtaaggggtgtcctcaagaagcccccgttcaattatagccatgaggtcgcgacagtcctcgcccagatgtgcgtggtcggaaatgaattgccacagggcgctcccacttctcctttcctgtccaaccaggtttgtaggagcatggatagggacctcatggccctggcaaagcgtcaccgcgctacgtatacgcggtacgcagatgatatcactttcagtttttctgctccaacccgcgccgctttgccttccaacatctgtacctttgatagcggagttgttaccctgggccaggaattagtggggattatcaaccagcacaacttccagataaacccttctaagacgcgaatgtccacccgccgtcgaagaatggaagttaccgggatcgtgatcaacgagtttgccaatgtgaagaggattttcatcgacaagatccgcggagccctccatgcttgggatcgttacggttacgcagcagcacaagctgcctgggagcagcgagtgaccaatggtacaaccctcgcctatgagaaaaggccctggaaacggcagacacgcacaggacaaactcccgcgctgaaaaatgtactgtggggcaaactgctctatgtgagaatggtgcgtggggacagtgacgcaatttacacacgcctggccgagaagtataacagactggtggcccgagaacgcgacggaaatgccgacttcgccgcgtcgactctgcctgtggaagcaattgtgagaaatgtcgaggacgccgaaagggccgtgtttgtggtcgagtgggcagcagactaccaaccacccgtgccagggcagccaacaatggtcggaggccagggtacagccttcgcctacaagcagagaaatagactgatcacttgcgaccacgtcttccgcgcagagggagaatatcagttaggcgatgggcccaacgcacaggaaatcccctttaccactgatatcaatgaggctgcggtccaaggactgaacgtgaccgcgatcgatccggtcagtggtcaacggtggcccttgcgggttgtgcacagacatgctcatagagatcttgccctacttgagtttgaaggggccccgcctgaccaccgccattttagcggcatggaggcccccatcaataggcacgcacctacacatcttataggcttcccaaattggaataacgggaggagggcgaacattgagcccgccatagtcacagctcggtttcctcggaccggactgcagcgcttcgagattaaccagctcattaggaagggcaattcaggcggccctgtggtggacgaacttttccgcgtagctggtgttgcccaacaaggcgcccaacaggatgccggcaataacgagtgcctctgcgtgctggaactggatgcctggttagccgaatacgatgccgatgtagcagctccagccgatgtgcccgctgctgaacctgctgctcctgctgctgccgctgaagccccagctgctcctgtagcaccagcagagccggctgcgtga

SEQ ID NO: 7732 - RNA, 1887 nt, synthetic construct
  source 1..1887: mol_type = other RNA
atgaccaccccactgttaactgccaaggacgctgctgaggctgccaaatgggccgagatttgggctaggactgacgtccacttgttcgccgcagacgtcttcgacctcgcatacgaagagattcagaacatcatttacccaacccccccgtacaaggcctatctcctggccaagcgatctggcggccaacgcgttatccgcgaacctcggaggaggctgaaggatttacaggtgaagttgctgaaataccttatagagcgcgccggtacccccaaaccatgtgcccatgcatttacagaagggagatccatcgtcaccaatgctcggaaacacctggagcgaaggcctcactttgtgctgaatcttgaccttgagggcttctttccctccataagtttttatcgcatcaggggagtgctgcggaaggcacccttcaacctggctcatcccgtggctacaatgttggcccacatgtgtacggtaaataatgaactaccacagggagcccctacaagtcctttcttctctaaccaggtttgtcggtcattggaccgcgacctcatggctctggccaaaagacatcaggcaacgtacactcgatacgttgacgacataactttttcatttagcacacctaatcagatcgcactccctgccaacatctgcacattcgatagcggcgttgtgacccttggccaggagttggtgggaatcataggccagcacaattttcggatcaatcccgcgaaaactcggatgtccactcgtcgacgcagaatggaagtgaccggaatcgtcatcaaccagttccctaacgtgaaaagggctttcattgataagatcagaggtgcgctccatgcatgggacagacacggctataaggccgcggaggagaattggcaagccagagtgtctaacggtgctcgtctcgcctatgaaaagcgaccgtggaaacgtcaggcccgattgggccagccaccagaactcaagacagtgctgtggggtaagctgctgttccttagaatggtgcggggggctgatgacacaatatacacaaggctggctgagaagtacaacagattagtggaacgcgaaagggccggtgatgccccctttgtcagcgcgacacttcccgtggaagccattgtgcgaaatgccgaagacgccgagcgggcagttttcgttgtccagtggctcgccgactatcacccacctaacgccggaacgcaggaagctgttggcgggcaggggacagcgttcgcttataagcgccataataggctgattacctgcgaccacctgttcagagccgatggcgagtatcgccggggcgaagatccgcaagcacctagggtgccctttactaccgatctgactagcccccaggttagaggcgcaatggtcagtgtgaccgatcccgtcaccggacaagagtgggcggtaagggtagtgcaccgcgacgctcatcgcgatctcgccattctggaatttgacgaggagcccccggcacatcggcacttttccgggatggatgcacctatcacgcggcacgccccaggccatctagtaggattcccgaattggaataacgggcgtcgcgccaacattgagcacgccattgtgtcggcccgtttccccagaaccggactgcaaaggtttgaaatcaaccagctgattcggaaaggaaactcaggggggccattcgtggatgagttatttagagtcgctggtgtggcacaacagggggcccaacaggatgctgggaataacgagtgcctatgcgtagcagagctcgatgcttggatcgaggcgtacgaggcaactagggtcagacctcccccagctccaccagcaccagctgcagtcgaacggggacctgcggcttga

SEQ ID NO: 7733 - RNA, 1821 nt, synthetic construct
  source 1..1821: mol_type = other RNA
atgctgcagaagacccaagtcaatagttttagctcagccatcctgggggccccttatgccacggtgcaaggcatcctgtacccaaggccgccatatcgctctttcgagctggccaagcgctctggaggcatccgtgtgataagagagccccgaaaaagacttaaactccttcagttgaaggcactggaggatctggaacagagggctggacggccaaagccctgtgctcacgggtttgtcaaggaccgctccatagtgaccaacgctcggaaacatctcgagcgtaagccacactttcttctgaatctcgacttggagaagttcttcccctctattaattttttcagagtgcggggggtgctgaaaaaaccgcctttcgggttttctcacgaagttgccactgtattggcgcagatgtgcgttttagacaacgagttaccccagggagcaccgactagccccttcctatccaatgaaatatgcaggggcctggatagggatctgatggcactagcgcgccggcatcgtgccacctataccagatacgccgatgatatcactttcagtttttccactcctaacgccaccagcttgccagccaatatctgtacgtttgatggcggcctcgtcaccctgggccaagagttaatctcaatcatcacttcccatagctttcagattcaccccacgaagacacgcatgtccacccgaagacggaggatggaagtgacaggagtggtcattaatgagttccctaacgttaaaagggtgttcatcgaccggattaggggagccctccatgcctgggaccgatacggatatgacctggcacagaaggcctgggcgaatagagttcaggcaggcgccagtacagcatatgaaaaaaggccctggaaacgacagacccgatcaggtaacccccccgagctgaagaacgtgctctggggtaagcttctgttcgtgaggatggtgcgaggggctgacgacgcgatatacacacgactggccgaaaagtataatcatctgatccaacgtgagcgggggactaagccagactttgcggcctcctcacttccagtggaagctattgtgagaaacgccgaagatgctgagagggctgtgttcgttgtcgagtggagcggcgactacttacctaccgggacgaccgaggctaccatggcgtacggccaaggcacagccttcgcctacaaaaagaaggatcggctgattacttgtgaccacgtctttacagctcggtgcgagattgccggggcatctgtcgatgtcgatattcagagcaaagacctgcgcgaagttagcttggaagctcacgaccccgcaacaggtaaccgctggcccttgcggatcgtgcacagggatgcccctagagatttggccatactccaatttgagggggaaccagcggcacagcgtttcttcagcggcatggatgcaccgatcaatagacacgccccaggtcatctgattgggtttccaaattggtcacctggacggagagcaaatgttgagcctgctattgtaactaaccgctttagaaggtccgcactccagagggtggagattaaccagctaatcaggaaagggaatagtggcggaccttacgtagacgagctcttccgcgtcgccggcgtagctcagaaaggagctacccaggacgatggtaacaacgagtgcctgtgtgtggctgaactcgacgcatggatcaacgcttctggagaagcaccccctcccgctgcttcgacagccagtgcaggcggtggtagagccggagaacctcttagacgccggccaacacgctga

SEQ ID NO: 7734 - RNA, 1674 nt, synthetic construct
  source 1..1674: mol_type = other RNA
atgcatgtgtttggagtgcagtattccgagctggagaaactcctgtatccaagaccatcctacagggcattcttgatacccaaaaaagacgggggccttcgtgccatccactcccctagactccaccttaagatcatccaaaagaagttgttggagtacctagagagagtcggcaaccctcctaaagcatctgcccacggtttctgtaaagatcggtctatagtgacaaatgctgctaagcactccctggcaaggaccagattcatcctgaatattgaccttgagaacttctttccgtccattaacttctttcgggtgaggggtctgctgttagctccaccatttgggttgagctaccccgtcgcaagcctcgtagcacacatttgcacttatcagaatgagcttccccaaggggcacccacctcaccctacatttcgaaccagatagcccgcagtcttgaccgggatctgatgaatctggctatgcgtcatcgagcgacctatacccgctacgttgacgacattacattttctttcagcgttaggtccgaagccgccctgcctgccaatatttgctcttttgatagcggaattctgtccctgggagccgagctccaggccctaatcgccaagaatggattcaaactcaacgaaaagaagtcacgaattagcagtagccgccggcgaatggaagtcacgggccttaaaatcaatcgcttccctaacgttagacgcaattttatcgacgaaatccggggggctctgaaggcttgtgaaacccatggctatttaaatgccgatgcccactggaagaggtcatttagaagtgacttcggcgtgaaaagagcgaacacatatcgggctctccgcgacgacaaatatcagccagaactgaaggatttccttaggggtaaaatattattcgtgaagatggtgagaggcgaggacgatttgatctacaatcggctcgcagagcggtttaacgctgtaatgccatccacaacagtgcgacctttgaaggtctaccctgttgtcaaaaccgaggatgacctccgaagagcctgctttgtgatctattggcaggcggctatcatggatacggcctctggcgaacgcaagatgctctcgggccagggtactggatttctgtatggcgatgggaacctgatcacgtgtgatcacatcttctacgacacaacagcactcgagggggtacagaaggacgtgcatatcactgaccgggagctggaggatattaagtgcgtcgccattgatcaccaacatatggagcacgacctcaccctgatgcgctgggacgtccctagagacttagccctactgcacttcgatcgtaacgccccacataacaaacacctgacccccgcactgagttctgctaagcgtcatgaccggggatggttggctgggtacccggattggactagtggacgcccggccaatgtggtagaagcacaagtggataactcatacgtgaggtctgggttagcgcgactagaactgaaccagactattaggtcagggtactccggcggcccctatgttgataaaagctacaggctcatcggaatagcacataggggtgcgacccagagctcaggcactaatgaatgtctggccagccacgaactggacaagtggattgctagtccctga

SEQ ID NO: 7735 - RNA, 1707 nt, synthetic construct
  source 1..1707: mol_type = other RNA
atggctgatgccttcgatgaaatggtgctggccatcgacgtgcgatactttgccagcactgttctcctggaggattataagaagattgcggcacttatttaccccaaacctcgctatagggagtttaacatcccgaagaagtctgggggaaagcgggcaatagctgcgcctagaaaaaagctcaagattctgcaacaacgcctgctgtcttacttggtggccaaaatagatccgccaaaagcttgtgttcacggattcgtccctgggaggaacgtcgtcaccaatgctagcaaacacagcgagcggaaccccagatttatccttaacgtggatttagagaacttttttccaacgatcaccttctatcgcgtacgcggtgtcttcttaaagcgcccttttaacctgagttactctgtagcctccatgctagctcatctgtgttgccataatggcgtgctggcacagggctcgccaacatcccccatactgagtaatctagtctgtagaaagctagacaacgatcttagtgccttagcgcggaaatatcgagctgtgtacacacgttattgtgacgacatcacaatgagtttcgtggcaaaaatggcagataacttgccagctaacatctgcagtttcaacggtgaagccgtgaatattggcgacgaactgaaggcagttattgccgccaatggattcgctctgaacgatgaaaagtcccgactgtcaagctcttcacataggcaggagatcacggggctgacagtcaatgacttcccaaatgtgagacgccagtacatcgactccataaggggcgccctgcactcatgggaggtgcatggctacaagctggctgaggcacggtggcaggaaaccccctataagcggattagagtgtccaacactgttccaaagctttgtttcaacctcaagggtagattactgtacttgaagatggtgcgtggaggcgatgatgagatttatggacggctggcctccaagtttaataagctggtcgctataggagtagtaggggaggtgcctccctgcaaacctttgcccatcgactactcggtcactactgccaacggcgcacggcacgcggttttcgtgctccaagcccaatggttcgagaaaaatgagctgatctttgaaaggcagggaacagccttttttgttggacagggatatcttctcacatgcgaacatgttgtgagcaatgaattgtctagcgatgaaaaagacgatgcgatgggggaactcgagcaagcaagacacaccgtactgatcccgggggggaaagaatatccagttgaactcgtggcagtgcacgagcactacgacgtcgccctcctcaagttttctggcgacggccccgagtatattagaaggttcaagctttcccaggctagcgccaccgtcggccagaaaagctgcctgttgggcttccctaattggagtaacggtcgtcccgtgactgtggtgaatggggaagtaaccagcgtctactctaggtccgctacccagaaattggaaacctcacagcagatccgaaaggggaattcagggggacctttactaaatgcagagcttgaggtggtgggtatggccactgacggcgccacgtacgagaaaggtaacaatgagtgcctcacatcaggccagattaggcagtggctcatcgacattaaagccgaggttcagctgtga

SEQ ID NO: 7736 - RNA, 1662 nt, synthetic construct
  source 1..1662: mol_type = other RNA
atggaatatgagaaggttggttccgtgatctatccatcaccgctctatacacagttcaccttgccaaagaaatccggtggggtgaggataatcgacgcgcctttccaggagttgaaggagctccagcacaaactgctcgtatttctcaagactctggtagatcctccgaagagctgtgtgcacggatttgtgtctgggcgcagcatcgtgactaatgcactggcccactctgagagaagccccaagttcgtgctaaacatcgacctgaaaaacttctttcccacaatttcgttttacagagtgagaggcatctttttgaaacggccctttagttttagccaccaaattgctagcttaattgcgcatatgtgctgtaaagacggcttcctggttcagggcgcgtcaacctctcctctgatttctaacctaatttgccggaacttggataatcagctccgggggctatcactgcgacataatagtgtatacacacgttactgtgatgatctgactttttctttcccacgggaaagggccgagtctctgcctggcagtatctgttcgttcgctggcgagatcgtgacccttggcgctatgtcattagagataatcgcttcaaacggattcgagattaattccgataaaacgaggatcagctcctccaagagacgtctggaagttaccggcctggtgatcaataaattcccgaacgtctccagagactacgtagaccgattacgcggcgccctacatgcttgggacgtgcacgggtacccaagagccttgaggtcttggaagaacaagattccctatgaaagggctggaaggcgacctaggccaccccttgcagggattgttcgggggcgccttctgtttcttaagatggtgcggggagccgatgatgacctgtacgtgcgcctggccaccaaatttaatatcctcaggcagagggatagtatataccggaaaatccgggcgttgaagagtcttagcgtggactccgtggccaagacggccactgcagctcgcaaggccgtctacgtcattgaagtcgtgtggaccgatgctgctgatgacatgcctcttgttgatcgccgggggaccgtcttcgtcactgagtatgatttactgatctcctgccatcatgttattgacccagatttcagtgacgatgagcgtaaagaaatcagtggaaaaatcctgaaccgctccgtcaagcttattgtgcccgagactaatgacacgtattccattgacgtaatcaagttcgacagccacctcgacattgccctgctgaagttctctgaagcaaaacccgccggcctccgcaaattgctgttttctgaacgtagccctgttcagtcttcaggtacaaccctgctcggcttcccaaactggaagcagggaaggcccctgacaagcgcaagcggtgaaattacatcaatctatcccagatccaacacaaatagattagaggcaagccaagccatacgacaaggaaattcaggaggtcctctcgtcgaccctgattttcgagtgataggcatggccatagaaggggcaacctacgacagaggtaataacgagtgcctggcagccaacgagatcataaattggatccagccagaagtcgacaagctgaagagtcaactcaaattctga

SEQ ID NO: 7737 - RNA, 1728 nt, synthetic construct
  source 1..1728: mol_type = other RNA
atggcttctttggaatttgatatccggaagattgatgttgagctcatggcacaggacatcttcggcagaccttacgcagagatatcaaagattgtgtacccgcgccctaaatacaagtacttcgtcctcccgaaaaagagcggcgaatataggtctattgtagcacctagtctgaagttgaaaaacatccaggagagcctattagattttctccagcgggagtttccgctcgccaagtcctgtgtccacgggtttcaccgggggaggtcggtcgtgactaatgcccaagcccactgtaacagagacacgagttttgtcctgaatatcgacctggaagatttctttccatctatctcttactatcgcgttcgcggcgtgttcgagaattccccttttggatatgcacggaatactgcctctgccctggctcatatttgctgtaataacggtatactcgctcagggagcccctacttcacccattatctctaatctgatatgcagaggtctggataaagatctatctgccctggcgagaaaacaccgagcgatttatacacgctattgcgacgacattacattcagctttaaaagtggacgagtggataggctgcctgcttccatttgcaagtttgatggcgatgttctggggatcggtgatgagctcaccgagatcatcagttcccatggttttcggattaagcataccaaaaatcgcattagctcccgtcagcgtcgaatggaagtgaccggcatagtgatcaacaaattccccaacgttaggcgcctctatgtcgacaaaatcagaggggcacttcacgcgtgggaaacatacggatatgagatggcatcaaagatctgggaagaaaaaaagtactcccggtccttacgaaccggcgccatcccaaggctgtacaaaaacttgtatgggaaactgctgtacctgaagatggtgaagggcgatagcgacgacgtgtaccggctccttgctatgaagtacaatagggtgtttcttaaaagccaatctctcggcgagctgggagatggtaagctgctatctttaggcagccgggtggtcaatgcttcccatgttaagtcagccgtcttcgtgattcatgcccgatggggccttgacgagctgggcttaccagaggaggaagtccaagggactatcttctgtcttgtcgggaaaattttgatcacgtgtagtcacgtaattgagaaacccgaacatatcaagaccgataccgtggagtactatcttgtggagcccacaagtggaaaggagcacaggctcaacttgatatgcaacgactcacacaaggatatagccgtattgagattcgtggaacagggcgtgccagacgctcgggaattagtgctgtccgagcagccaattagccaaaacgcggacgtgatgctatatggattccccaattggaccagaggtcgtgcactgaacagcttgccaggcacggtcacatcaacctttatcagatccaatatcgactgccttgaagtggactgttcgatcagacaggggaactcgggaggacccctgctcaacgtagggatgcgcctggttgggatggctactcagggcgccgacgtaaagagcggaaataacgagtgcgtgactgttagcgaaatcagggacttcatactgaggtgcagcacatcacatcccctgcacttcgacaagagtttcaacatttccaatctgttctga

SEQ ID NO: 7738 - RNA, 1701 nt, synthetic construct
  source 1..1701: mol_type = other RNA
atggcaatccacaagaatatattcagcaaaatcagcactctggatgagcttgcatacaagctcgctggaattccttacaatctgctagcgaaactcatttatcccaccccccgttataagtgcttcgacctcataaagaaatctggcggcgtgcggaccattaacgctcctcggagaaagattaaaaagattcaaagggaaacccttgagctgattaaagagtactatcaatccgtaaagagcccggtgcactcttttgtcaaagacaaaagcatcgtgacgaatgcacagcagcatataggcaaatccttcatttttaacatcgacctggaaaacttcttcaccagcatacactttggtcgtatccgcggaatcttcctgaagaagcctttcgaattttcatacgacatcagtacagtgctggcacatatatgctcgaaggacggaattttgccacagggtgcaccaacctcaccgatcatctccaacttgatttgcaggtctttagactctgatttacagaagcttgcacgaaagtaccgcgccacctacacacgatattgcgatgatattacttttagcttcacggttaggagaataagcgatctccctaaacagattgtcgatctttcagttgcgccagccaacattggcactgagctgctcgccatcatcgacaagcacgagctcaaggtaaattctagaaaagtgcggctggaagggaggtcaaacagaatgcaggtcactgggttgactgttaacgagcagccaaacgtgcctcgtacctttgtacacgaaatccggggcatgctgcatgcttgggaaaggtatggcttaaaaaaagcccaggatcaactcaagacaaaatacagtcggcaactgaggaccaccgagatcccccccttttataatgtgttgcgcgggaagttactctttttgaaaatggttataggggagacttccctggtttatgcccgcctggccatgcggtataataagctgatcgatcgagataatttgaagcagaattcgaaactgccactaagtcgcgaaatcgctaatgacattgatgccaaaagggcggtgcttgctatagaatgttgtgaggatatccccagactaaaggaaagcccactcgtgtccatgggcaccgcattcatttaccgcaagaagtacatcatcacatgctggcatgtcatttcccagaaagtcgagtcactgggggaagacattacgtttcatgagacatccatcgagctgtacgactataaaaagaagaagctggaggtgaccattctggctggttgtcctcggagggacgtcgccatcttggctccgaaattcgacatcacggtgtacccatatttttctcccgccactacacctcccctgagtggtgactctctccaaatgcttggatttcctaactatcaggtgaacaagaagatctcatacacaaagactaaacttctgacagaggaatacactaagagttgtgttcagtacattgaaatcagagacacaattagaaagggcaattctgggggacccgtgttcaacagcaattgggagatagtgggcattgctgtagaaggggccacacaggccgacggagacaacggagtcgtggtcacctccgagatcgatcgagtgatcgattccagtgagttcaaataccagcagaaagataagaaccactga

SEQ ID NO: 7739 - RNA, 1680 nt, synthetic construct
  source 1..1680: mol_type = other RNA
atggcgattcacactccattatctactattcccgacttagagaaattggctgaccgtctggtgggcaatagctatagcgtgcttgccgatctgatctaccctaaaccccgctacaagaccttttctattgctaagaaaagcggcgggatccgaacaattgatgcacccaagaagaagataaaggcgattcagtggaaaacgttggcactgattaaagaatattaccagtgtgtgaagacccccgtgcatggattcgccaaaggcaagtctatcgtgaccaatgcacaacaacacctggagaagaccttcgtttttaacgttgacctggaagattttttcccatcaatccactttggcagggtcaggggtatcttcctgaagaagcccttcgagtttagctatgatattgcttccgtcctggcacatatttgctgcaaggacggcaaactcccccaaggtgcacctaccagtcctgtgataagcaatctagcgtgtcggagattggactccgatcttcaggaattggcacgcaagtaccgcgccacatacactaggtactgcgatgacatcaccttttccttttccgtaaaacggatcaccgacctgccgaagcagattgtcgaccagagggccttccctgtgaaccctggcaccgaactcctggccatcatcgagaaacattcttttcgcgtcaacagcggtaaggtcaggctggagggacgtagcaaacggatgcaggtaacggggttaacggtgaacgaacagcctaatgttccacgaattttcgtgcacgaaataagagggatgattcacgcctgggaaagatacggtcggaacggggccgagacatacctggcctcaaagtattcccggcagctccgaaacccagttagtccaccatttcacaacgttctcagaggaaagctgctgttccttaaaatggtgcgaggggccagttccccggtgtatgctagacttgccgccaggtataattcgctgattgaccatgacaaacttcaaccaaacagcaagcttcctatttctcgtaccgtggctaatgacatcgatgcagtgagggctacatttgctatcgagtgtgtccaggattttcctgagctagccgggctcgagttatcgcccctggtgtcatctggaacagctttcatctaccgcgagaaatatatcgttacttgctggcacgtgatttcacccagaatagaaaaactcggtaagtccttcacttttgatgaagccagtatcgagatctacgactacaaaaagaagaagctccaggtcactgtcctagctaaatgtaaagacagagatgtagtgatcctcgcacctaaattcgacgtgaccgagtatccctatttctccccagcccagctgtctccgagttcaggagatatcctgcagatactgggattcccaaactatcagatgtcaaaaaaggtgagtcggactaaaacagagttgatcaccgagcagtacgccaagcatggggtccaatacattgaagtaaaggacacaatacggaagggcaacagcggcggacccgtattggattccaatcgcggggtcgtaggcctcgctgttgagggagcgacacaggccgaaggcgataatggcgtggcagtcactctggagatcgatcacgtgatcgactctatagttgtgtga

SEQ ID NO: 7740 - RNA, 1686 nt, synthetic construct
  source 1..1686: mol_type = other RNA
atgccggccccactgtccaaagaggcaacacagctgttaaccctgaaaactcatgaggacgtggctcgtttcttcggttacccaaactatgtctctctccagtccctgatctatccccgccccctgtatacctcctttgttatcccaaagcggacggggtctattcgtattatcagtgcccctcgtcgacgcatcaaggacgtccaaagattactgagcacagccctgcttgatctgtacggccatggcagaaaaccggtacatagttttatgaaagggagatctgtggtcaccaatgcacgacaacacgcccagagtcgctttgtgctgcgcgtggacctgcgagacttcttcggttcaatacactttggaagggtcagaggggtgttgcttaaccgaccttttgcactgcccgaaccggtggcaacagtattagcccacatctgctgtctggacggtaaactgccccaaggcgcacctacatcccctatcatctcaaacctcgtctgtcggggcttggacacagccctgatgaagcttgctggagagtgtcgggctacctataccagatactgtgatgacttggtcttctcattctctatacggcaggctgggaagctgtccgcgaggattgtggcttctgaaggaggagttgtgggagtggggcatgagctcgaaaccgctatcaaacgcgagggttttgaaatcaatgtcgccaagacgcgcttatatcactacggcgccagacagaccgtaactggcctagtggtgaatgagttcccaaatgtgagcaagaagtactataggagccttaggacagcactctacgcttgggagaaacatgggtacgaaagtgccagcctgaacgtacctgggaccatacagcatcgccggtatagatcgggaaaaccccgctgcttgcacaggcttctctgggggaagctacagtacatgagaatggttaaaggagagcgcgatgcgagcctgatctccttggtccaccggttcaaccggctgctagctagagacgctgctgtggtggagaagccagtccctccagcaatacatgtgaagcccaccgttgcaagggcgaaagacgccagggccggtacgtggatgctcgaagctattacacacagggatacgcccgacgaactcctcaatgaaggcactgcgttttacgtccgtggcgtgggatttatcacatgcgcccactgcttgcttaatacctacgtatctcctcctactgcccataatgaattcttcctccactcccacgaccgaaggtataagtaccaggtgactccacaccaatttgattatggcctcgatctggccgtcctagctcctgattctagcttcgtcgagaacgaacacctggcctttgagattgaccctgcactgccagctgtaggcactgcggtggttttgtgcgggtatccgggcaactcaccaagtcggccccccgttatttaccagtcagatgtgagcaggacagttactgtgtcaggcgtgtcgagaattgagattgataagcccgtgcatccaggttccagtggaggacccctccttagcgccttaaccgggaaggtgctgggggttgttgccactttcaagaagggcgatgcaggtgccgatgccgcaatcgccatagcagagattagccggctgggcgctcccaaatga

SEQ ID NO: 7741 - RNA, 1644 nt, synthetic construct
  source 1..1644: mol_type = other RNA
atgaacaaggaagatttcctcaaaataacgacacacaatgaactagcatccatgttcggcatgtcttatgcgaagctcaccaaaatcatttataaaaccgacggagtgtacaaataccaccagtttcaaataccaaagaaaaacggaggacaccgcgaaatcgcctctccgtccaaaaagctgaaaaagattcagtccgagctcaaggagctattttatgagatctaccctagcaagccttctgcccatgggtttgcgaaaaacaagtccatcgtgacaaacgccgaaagacacctggataagcgattcatcttcaacatcgatctgagtaattttttcggctcgatacacttcgggagaatcaggaacctgtttaagtcaagcccatttaacttcaacaattcaatcgcgactattctggctcaaatctgctgtttcgataattctcttccacagggcgcccccacttcccccattctctccaatatgatcgcatggaaactggatacccagctccaaagcctggcgaaaatgactaatggaacatacacacgatatgccgatgacataagtttttcatttacgacgaccaagggccggctgcctgaggagattgttattttgaggggaggggaagctgcacctggccatgctttgacccatatcatagaagagaatgggttcttcatcaattacgataaagtgcgtctgtgtagtaggttgagcaggatggaggtgactggattgacagtcaatgagttaaccaacgtgaggcgcaagtatgtaagacagctctcaagtatgctgcacgcttggcgaaaacacgggtacgagctcgctgagaaagattttaatgagaagtatgacactcggtacagggcctcaggtaagcctaagtcgttccttcacgtggttaagggtaagttggcctttttacgctctgtcaagactgagcgcgacccgatctacatcaaactggccactcaattcaacgacttggtgacagacgagcacaagtttaaaattaaggtccccagcgaccccgagaagaatgcaattaatgcactgtgggtcatcgaggcatgttacgacaacgaagaaggcgaagctatggtgccacagggctcaggcttccagctggaggacatcgggatcgtgacctgtgcccatgtcgtttccgagaagggcaaaatcttcgaggacctcgaagcttttaagcatgatgatagcaccgttaaatacaagcttagagtcgaacggatttgctcccatcgggatatagctatctgctcacttctagtggaagaaggtaaagagccacccaaacactctgttagccgtagtgcaaacaacgtcgaaatgggccaggacgtaaagcttctgggtttccccgcttatgcccctggacattcttatttcatggtagatacaaaggtggccaaaatttatacccagagccttgtgagaaagtttgagataaacgccctcattcgcgagggcaatagcggagggccaatcattgacagtaagagctccgtggtagggattgccctggagggcgcacggaaagaagccggtaacaatgggtgcctgaccattcccgaactggaggacgtgttatctgacgacaaatacaagatttga

SEQ ID NO: 7742 - RNA, 1644 nt, synthetic construct
  source 1..1644: mol_type = other RNA
atgaacaaggatgacttcctcaagattacccgtcataatgagttagcttcatactttggtatcacctatccagtgctgaccaagattatttacaagaccgacgacgcctacaaataccaccagttccagattcccaagaaaaacggagggtacaggaaaatcgcctcaccatcaaagaagctgaagctgattcaggaacagctaaaggacgtgttttatgagatctaccccactaaaccaagcgcgcatggatttgcaaaggacaaatctattgtgacgaacgccgaacggcacctggacaaaagattcatcttcaacatcgatctgtccgacttctttgggagtatacactttgggagagttcgcaatctctttaagagctccccattttatttcaacaacacagtgtccacgatcttggcccagatctgctgctttaacaactctctgccccaaggagcccccacaagtcccatcctttccaatatgatcgcttggaaattggattctcagctgcaacatctcgccaagctaactaattcaacctatactagatacgcggatgatatctctttttccttcaccagcaaaaagcgaaggctgcctgaagagatcataatcctccgggacgatgaaggatctcctggccacgcgctgactcatatcatcgaggagaatggcttcaacattaattatgagaaggtgaggctgtgtagcgcattttccaggatggaggtgaccgggctcactgtgaatgaatttctgaatgtgagacgccagtacgtacgccagatatcaagtatgctgtacgcctggaggaaacacggttacgtactcgcagcaaacgagttcaatgaaaagtacgataagcgatatcgtgctagtaaaaaacctaagagcttcctttacgtggtcaaagggaagttagcgttcctgcggtcggtcaggacagggagagatgccatttttaataagcttgccaagcagttcaatgatctggtggaggatgaatacaagttcaaaatcattgaggtcacagaccctgaaattaatgccattagtgccttgtggataattgaagcctgttatgacgacgagaagggggaggctgttattacacaaggtagcgctttccagcttaaagggatcggaatcgtgacttgcgcacacgttgtaagtgagaagggcaaagtgttcggctcactggaggcatttaaacactctgaccctaccgtacgctatgagctcaaggtcgaacgcatctgcgctcaccgagatgtggctatttgtagcatccttgtgaaggaaggaatcgagccgcccgaatatggcatagagaagtccctcaacccaattgagatgcagcaatctgttaaactgctaggctttccggcctacgctcctggccagtctcattacatcgttgattcgaaagtcgcaaaggtctataaacaaagcgctgtcaacaaattcgaaatagactccttaattcgggagggcaatagcggcggcccaatcatagacgctgaatcaaacgccgttggtatcgcattggaaggcgcccggaaggaatccggaaacaacggatgtttggtcataagcgagatagacgatgtgattggtacagacgagtataaaatttga

SEQ ID NO: 7743 - RNA, 1644 nt, synthetic construct
  source 1..1644: mol_type = other RNA
atgaaagatgcatttctgaacattaaaacgcaccaggaactggccaagtactttggtctaagctacgccgacctttctaagattatttacaagacagacttcgagtacaagtaccaccactttgttattcctaaaaagagcgggggcgagagacacattaacgccccgagcaaaaaacttaaactcatccagatcaccctgaaagacgttctctatgatatttacccaacaaagccagccgctcacggattcgtcaaaaataagtcaattgtgacgaacgctgaaaaacatttggacaaaaggtacatcttcaacatcgacatagaaaatttcttcggcgagatccactttggccgggtgcgcaacctgtttaagtcaagcccattcaacttcaataacaccgtcgcaaccatactcgcccaaatctgttgctttgagaatgcacttccccagggtgctcccacttcccccataatctcaaacatgattgcttggaaactcgacagccagttgcaacagttagctaaaatcaccaattgcacctacacaaggtatgcagacgatattagcttctccttcacttgcaacaagaaccggctgccagaagagattgtgtccgtgagtgaaggagacgccagacctgggcgtaccttaacagggatcatcgaggataacgggttccgaattaattactcgaaggttcggctccgcggaaaatactccagaatggaagtgaccgggctgaccgttaacgaatttatcaacgtaaagcgaaagtttatccggcagctgagtagtatgctccacgcatggcgtaaatttggctatgataaggctgaagaggagtataataacaagtacaatcgcaagcatagggctagcggcaaagagacttcttacctgcatgtagtcaagggaaagctggcgtttctgaacaatatcagatctaaacgcgaccccgtgtacataaaatacgctaagcagttcaacgaactggttggcaatgagcataagttcatcatagtcgaaattacagaacctgagcaaaatgcaataaattccatttgggtggtggaggcatgttatgactataatgacgaggtcagagtttctcagggaactgggtttcacttgtcagatgtgggcatcatcacatgtgcccacgtcgtgagtaatgatgacggggaaatctatgaggagatagaggtgttcaagtattctgagactacaaaaaggtatacgatcaaggtcgatagaatttgccgccatagggatatcgccatttgttccctggtggtggacgaggatgaaaatccgcccaacaatgagctacagaaaagccagtccattccctatatacaacagcaagtgaagctgcttggctttcctggctatgcgccaggtcattcttactcaatcgtggacgccaatatcaccatgactttcgtagaatctggagttaacaaggtcgaaatcaatcagcttatacggtccggtgatagcggaggtcctatcgtagatgccgattcgaacgtgattggcatggcccagaagggggtggacgagaagtataagcgaaacagttgcgtcgtattgcaggagattgaagcggtgtataactcagacggatacaaaactgagtga

SEQ ID NO: 7744 - RNA, 1632 nt, synthetic construct
  source 1..1632: mol_type = other RNA
atgaaactgaaagagtttcagaaaatcgagacaagtgaggatttggcaaagatttttggcatgtcgtacaaggaactttccaagatcatctataagctaccgttcgaatatagatatacatacttcgagatcagcaagaaaaacggaaccaaacgcctgatatctaagcccaataagaagctgaagcagatccagaacaaattgtccgagacgctatatagcatctacaaacctcgaccttctgtgcacggatttgtaaagcagcggagcgtgatctctggcgccgaaaagcaccttaataaacagtcgattctcaacatagacctcgagaattttttcgacagcatccactatggaaggattaaatacctcttcatggcacacccattcaactgtaatgaaaccatcgcgacgattttggcccacattttttgccatgagaacaaactgccccagggcgcctcaagttcacccatactgacgaatatgatctgctataagctggacaaagagcttcagaatctggccaaacattgtaatgctacctacactagatacgcagatgacataaccttctcttttaccaccaacaagaagaaaattagcaagcagatagtagaggacaccgaagtgctgaccatttcacccgtgctccagcagatcatcgagaacaatggattcaagatcaattacaacaaggtccacctttataaaaagaatcagcggatgctggtcactggcatcaaagttaatgaattcaccaacgtgcagcgcaagtacatttcaaagattcgtagcatgttatactcctgggaagagcacggttacattaatgctaaaaaggaattcgagagcaaatatttgactgagagacatcgggtgttttctagtttgccagagtacaggaacgtgattcgtggaaaactgaattacctcaagatggtcaggtctaaacgcgatgtactctacatcaagtatgccaaatggtttaacaagctcgtggacgagttctccgaacctcatcttgagtacttagaaatcactcccgaggaaaagctcttaatgcagagtgtgctggtgattgaaattctatacgacaactcagaaggggaatgtgtttgtaaccagggaactgggttttatctgaaggatgttgggatcgtaacatgcgctcatgtggttacagatgataaaaataaccccctcgacaacatcgatgtctttcgatatgacaagattacagagaaattccggtgcactatacaaaagatagattccatcctggatctggcgattctgcaacctgtggatccggaatcactgaaggacattcaaccacttgagcagtctagtgagactatagattccttgcacacagtcaagatgattggctatccagcctacaaaatcggccaaaccccatacatcgttgacgctaaaattgctagcatctattgccaatccacaatcaacaagttcgagatagactccctgatcagggaggggaacagtgggggccctatcttaaacagcaacaataaagtcgtgggtattgccgcagaaggggcagaaaagtccggtggcaataatgccgtcctgcgcattgacatgctggagagaatcaagtcttga

SEQ ID NO: 7745 - RNA, 1638 nt, synthetic construct
  source 1..1638: mol_type = other RNA
atgcccgagaaatcattcctgagcgtgaaaagtcctaaagagctctcactgtattttaacctggagtacgcagcattcagcaaaattttctataaaaccgcaagcgactataagtacaagaagttctacctttctaagaaaaccgggggcaaacggataatctccagtcccaatagaaagatcaaagaaatacagcgttgcttagcctacacactcaagaatatttatcaggtaagaccctccgtccacggctttgtcgagaagcattctatagtcactaatgcaatgccgcatctcgacaagaagttcgtgttgaacctggacatcaagaattttttcgattccattcacttcggaagggtaaaacatctcttcatgtcccagccctttaattttgtgcactctgtcgctaccgttctcgcccagatttgttgttttgaaaacaagctgccacagggtgcgccaaccagtccaatcttgaccaatatgatctgttggaagatggatgcccaactgcaacaccttgccaaaattaaccactgcacgtacacccgctatgtggacgatatcacattcagctttacgtgcaacaaaaaacagatcccaaaaagtatcctgatccagcccgagtctgagctggtggtgggacaggacctaaaaatcatcattgagaagaacggatttgaaataaacctagcaaaacttcgcctttatgggcggaaccaaagaatggaagtgacaggtttgactactaacgagttccctaatgtgcgaaggaagtacatcaaacaaattcagagcatgttacacgcttggcgcaagtacggctatggcctggccgaaaaggacttcaaggagaagtactataagaagcaccgagcttcccagaaaatcccatcgttcgagaatgttattataggtaagctggcgttcctcaaaagcgtcaggggactgaggtcacaggtgttcataaaactggccaagcagtttaatgatctgactgagtccggaaaaatgaagttcaactacatagagaagacgaaggatgagactgacatttccaatagcctgtgggttatcgaagtgttgtacaacgacaagaatggcatccttaaagctgggcaaggcacaggtttttactttgagaacaaaggcttaatcacatgtgctcatgtggtatccgaaaacgacgaaaattttgagaagattaacgctttccagtttgataagccttcaaagaagtatctgttgaagatcaagaagattgacaaccatagagatattgccctttgtgaattcagcgattgcaccatgaacgacattcagatcaataagctcgacagtatcactgtttcaaatgaccaaatttctcagttcttggaggtcaaactgttcggctttccggcctacaagattgggcaaacaccttacatcgccgatgccaaaatagccacaatttatacccagtcggcggtgtctaaatttgaaattgatcaccagattcgggaaggtaacagcgggggccctatcctaaataaagataataagctcatcggagttgcactggaaggggctgagaaagggtcaggctctaacggatgcctccagctggacgaaatagtcaaatttatcaactga

SEQ ID NO: 7746 - RNA, 1683 nt, synthetic construct
  source 1..1683: mol_type = other RNA
atgacctccctggaaacactccaggccctgacaacttcccaggacgtggccacgctcttcggaaagagctacaccgaactctctaaaattatctatcgcactcctgagaaataccggtatagggtcttcacaatcccaaaaaagaccgggggcctccgcacaattgctagcccaaggcgaaagattcttgaaattcaacgacgcatatccatactgctgcaggacacctatcagcctcctccttccagtcatggtttcgtgagaactaaatccatcgtctcaaacgccgaacgtcacttgaacaagcgttttatattcaatgtggacttagagggcttcttcgattcactgactttcggaagagtgaaacggtttttcatggcacaaccatttaacattcccaacgagccagcaacagttctggctcacatctgttgctttcagaaacgcctgcctcaaggagctccgacctcacccataattaccaacctaatttgcaggaaaatggataggcaactccaggctctagctaaccagaatcatgccacttacactaggtatgccgatgacctgactttctcttttacgcgggggatgagtaagttgccttccgctatcgtgtctcataaagacggcttgcccggcagcggtctgatggagatcatcaaagaaaacggcttcaagattaacccacagaagactagattgaattccaagcatcagaggctggaggttacaggccttatcgtgaacaagtttattaacgtgcaccgcaaatttatccggcggaccaccagtatgttatatgcttgggaaaaatttgggcttgagatggcagagaaagagtaccttagcgtatactctaacctgattagaccatatgcctccgggcaccatccaaagtttcacgaagtcgttaaaggtcgattggccttcttacacatggtgcggggaaaaagggatccgctgtacatcaagctggcaaagcgattcaatgcggttctggatgacaagacctcctctcttccctatatcgaaacgtctagctacgaactgtcattatcggaggccatctacgtaattgagattttgtatgacaagaaggtcaagaagggcaagaatgtgtcagaagaggcggtggtcatgcaaggaactggcttttttctcaaagatattggattcgtaaccgcagcccatgtcctgctcgataataaaggcgtagaacaccccgaaatagaggtgtttagccccaaaaatagcggagtgagatacaagctttccatccagacattggacatccaccgcgatctcgccgtcggaatactattcggaccggacaaaaagaagcacaccagttcaaaccagctgaccgctcagaaatcgctccctgtgcagagagacgcgattaccctggtcggttttcctgggcataaggtaggccacacaaagccctatatcgatgacgggaagatcggtaatgtttacacgcatcagggggtgcaagtgtacgatatcacaacacagatccgtgagggaaattctggcgggcccgttctgcttgggagcacctacgaggttataggtgtggccagtagaggcgcagaggggaagacaggctctaatactgtgatcgcagtcagcgagctcttcaatctgctgagcaagtcaaacagtaaaaagtga

SEQ ID NO: 7747 - RNA, 1788 nt, synthetic construct
  source 1..1788: mol_type = other RNA
atgcatctgaaccctctaagtaaggccttaagttctgtatcttactctgacttgaccgcaagttttctgcaggtgaagactccagaagaccttgcactttggttcggcttctcaaaatacgccgccctgggtttcttgatttttccacggcccaagtacaccgctttccttataaaaaagaagaacgggagcgaaaggctcatccaagtcccaaacaagaaactcaaagagatccagaaacgtctgctccacgtgctaaatgagctcgataacagtcgcccctccgcacacggcttcaggaagaagttgtcagtcgtatcgaacgccgaacaacatagcggacataagaagcattatgtctttaacctcgatttgaaggacttctttccctcaatcacttttccccgcgtccgaggagtgttcctgtcagagcctttcaagttcccggctaatgtggccaccgttttggctcggatatgtacatgcaatggagcattgccacagggggcacccacttctccaccccttagcaattacatttgccggggactcgatgggtccttacagcagatcgctaaagcatcttacagcacatatacccggtacgccgatgacctgaccttctccttcacaaacaaaaaaagacatcgtctgagccctaacctcatcaatacagccgtcgagaacgctacggtgtccctcaagctgaaagagattatcgaggatcacggattcaagataaactttgaaaaggtgagactcagaagcagacatgccagaatggaggtgactggactgacagtgaatgaattcccgaatgtgaagaggaaattcgttgacgagattcgcggtatgctgcatgcatgggaaacatatggactggaaaaagcccaggagggctttctttcacgactgtataaacgtcaacttcggagcggcggcgttcctgcgttcgagaacgtcctaaggggcaagctgctgtatttaaggcaggtgaagggtgccgacgataaggtgtataatactctggcgaggcgctttaacgcctgttcgaaccttattggcaagaattttcagatggctgtacctatgatcgatgtggcgctaagcgaacaggatctggaaaaggccatctacgtgatctcttgcgtacacgaagagtatgattttgagattaaaggcacgtgcttcttcttaaaaggcgtaggcgtggtgacttgtgaacacgtcatgcgatacccattaaatgtcgacgagaaaggaaacaaaatacacaactttcccagagagctcactgaatcctactttggcctctctcatggtcgcatctttattcaggacaccattgaaaatcctctgtgtgagctggaaattgtttggctggaccggaatgctgacgtggtggtcctcagacccaaagatgaaattaagatcgagcacttgacgctcattggagcaaccgcggagacaaagaccaaagaggtgaggcttgtcggctttcccttccacacccctgggaaatccctgtccgttgctgagggcaaaatcaggtcccgataccggcactttggttatgagaactacgacatcacctcattgatacgccaggggaatagtggcgggccggttctgaatagcgactttcacgtggtcggagttgctaaggaaggggagagacaagatggggggaataacggggttctgatgctggccgagctgatcaagctgcacgcccactataagaacgtgcagggtccactgcctaaaaataaggtgtggagttcctga

SEQ ID NO: 7748 - RNA, 1653 nt, synthetic construct
  source 1..1653: mol_type = other RNA
atgcctctggtggacaacattcaccagatcttaattaagtctgacgttcagccgttttcacggtactacttcgacctgtcatacgaagagctatcaaagatcatctatccgactcccaaataccaaaccttccacataaagaagaagaatggtactgacagagttattcactcccccagctataaggtaaaacagcttcaatacatagtcattgagaagatcctgaaagagacaatagtgcctcggccatctgtgcacggatttgtgaaggaccgcagcatagttagcaacgctaagctccatgttggcaagagacatgtgttcaatgtagatcttaaggatttctttccctcgattaattttcatagggtgaagggcctttttagaggcaagccctttaactttgcaaataacattgctgtgtgtctcgctcagatctgctgctacaaaacaaagctgccacaaggcgcgccaacttccccaatcctgagtaatattatttgccgtggcttggatggggagctgcaggtactggccaagaacagtcacgccacatatacccgctactgcgacgacattacattctcctttaccaagccgaatcctagcaaaattccaagacatattgtccaagttgactctaatgtggcttccgccggggaaaagctcaacgacattgtcgtggcgcacggcttcgaaattaattgcgagaagaccaggatgtatgactggaaacgccggatggaggtaacaggattgactgtgaacaagtttccaaatgtgaaacgtaagaacattgaccggatccgcatgatattacattgctgggagaagttcgggtacaaaaaagcccaggaaaactacatcgagttcactaaaatcgaaaagtccgatttccgaggcaaatgtttcctcagttacaccaggggatatttgaattttatcaagtcggtcaaagggatggacgaccccgtgtatagaaagctggcaaagaaattcaacacgcttatcgatttcgagttcgatggcaaaagaaaagatctccctgtggggtcagtcgtcaaaattagggaggaactagataaagcaattttcttgatccagtgtgaaaacgcagccggacagtgccaacagggaaccgccttcttcctgaaagatgtgggttttgtgacatgcgatcacgtgaggtggctcaacgaggagaacatccctaccgacgaatatataggctacttttttgaacgggagatcaaaatcctgaatagcgaggagcaggaagtatgtaaagtccgcatcaaaaagtacgatgccaggaaagatttcctgattctcgaaccaaccgaacaggtcatcgtgaacatggcccttctgcctcaggtgaacatccctcagcagggagatcccttaatcctgtgtggttatcctagcccctttatccaccgacagacattgactatcatcaataccactctaatcacgaactataatacgtttggggctgaccatatagagataagcacacaaattcgaaagggtaattctggcggacccgtcctgaactcttcctttgaagttgttggaattgcaaagaccgggtctgagcagcacgggggtaaggacagtgtgctgtgtatacgggagatcttcaattga

SEQ ID NO: 7749 - RNA, 1572 nt, synthetic construct
  source 1..1572: mol_type = other RNA
atgacccagcggtttattgagatacaaagtaccgacgaactggccgctttttttggtctggactataagcgcctggctgcggctctgtacaggactgacgcaagtcatcggtatcacgagtttaggatacctaaacgaagcggcggagctaggacaatccacgccccaaatcgtagaatcaaggcactccaaaggagactcgcaggcgaactcgacgccctgtacgtacccccgccatgtgtgtacggttttgttaacggccgggggattcgcaaaaacgctgatgttcacgctggcagaacatttgtgttcaacgtggacttaaaggagtttttcccctcaatccatttcggccgcgtgcgtggtgtttttgaaaaggcacccttccacttcacgagagaagtggccaccgtgctcgcccagctttgctgccatcagaatggactccctcaaggcgcaccaacttctcctgtgatttcgaattggatctgtcgcgggatggaccgggaactgatggctctcgctaaatcctccctggcaacatatacccgctacgcagacgatctcaccttcagctttacttgctcataccggaggctgccaggagccttggtcgacgtcagaggcagaaaagctgaaacaggagatgccttgcaaaaaatcatcgaaaaccaccggttcaaggtgaacactgataaggttaggctagccgggaaaagcacccggatggaggtcacggggctgactgtgaatgagtttcctaacgtacagagaaagtatgtacgacaggttcggtctatgttatatgcctggcgagaacacggactgcccgatgcggagcgcgaattcaatgagaaatacgatagagggcatcggccttccggccgacccaaaagctttacagcagtggtagccggaaaactagcttacttgttggacgtgaggggggctgagaaccccacctataataggctggccgccgaatacaatcgccttgttggcgaacagggagatcatctgcctcttgcccctccggggccccttgaaagggaccttatgggtctgcaggcgatgcgaaaggggaaggcccacgctaagcagtacgagaatatcgtcgagtccttactaacacaactgctcagcccatcactggagaatccgcagaaccaggtcagaattaatggaggccgcaaaattgtcgatattacattggataaccacgcaacctcaggcttcttccactatatcgccctgaactacaacgctccccatatcattgtcgagtgcaagaactattctggcgatccagccaacccagagctggatcagttggtgggacgtttcgcccagaaccgtggtcgggtgggtatactcgtgtgtcgaagttttggatccgcagccaagaagaagagattcctggagaggtgtcgcgacactgcaaatgccgggaatggcttcgtgatagccttggacgatacggacatggcgctccttgtcgaggagcgcctgaggtacggggagaaacagtcttatagattactgatggaacggttcaaggcgcttgtgatgtga

SEQ ID NO: 7750 - RNA, 1626 nt, synthetic construct
  source 1..1626: mol_type = other RNA
atggctacactgaccacccgtaggagcatcgccgaattgatcgaaatgtctccgaccctgctggacgggcttgccaacagcctcaatagaagagcctatcaccggttccacgtaccgaagaagagcggcggatcgcgagtgattactgctcccaccgcgagactaaaagaggttcagaggagactgtaccgagtgctgagcgcactgaccgttccccccacttgtgcatttggtttcattgagagaagaagtacagtacacaacgctcagtctcatactcgttctagatgggtgctcaacatagacctggaagaattttttccttctatccactttgggcgggtgcacggtatgttgatggcccctccatatcacataccagaattgggtgcacagcgcatcgccgctctatgctgccatgaatcagtcctccctcagggcgctcccacatccccaattctggccaacatgattgcccgaggcctcgattttgcgctcagggactttgcaaatcaaaaccggtgtcattacactcgctatgcagatgatttaacattctcacagttccgaaagcgctttccatccgcccttgttactcggggcgtggacaatgtgacacgcgtgtccgatgaacttcgccagatcgtcgagagccatggatttcgcttgaacgccaagaaaaccagacttgcacattatagtgagcggcaggaggtaactggactgatcgtgaatagtaagcgacctaatgtgccccgcgagtttatccggaatctgagagccatgctgcatgcttgggagaggtacggggaagaggcagctgaggccacttaccggaggacattcgcacctagggatgcttcagatcacgtcggactgttcagggagacactgctgggacgtctatcatacctcgccatggtgaaaggaaggtcggaccccgtatacgtcgagttaatccgaagagcaagggagcgagtcgaccgcaagcacggcacgaactacttcgacaccatgccaatccccgaagatggggtggctgttttgatgacgacggaggggagagatagagctggtgagcaaggcacgggatttgtcctccggaatattggcgttgtcacctgctatcatgtggtccggagggccgtaaccgtggaggcttttccatggcacgcgcctttgcgggccaccaacttattcatggaccggttcaatgttgattgggacctggcaatactgcgcggtaattacggagccaagtatcagttcgaggccggggatgacgcccaactgagaatcggaatgcctgttaggattgtgggtttccccaactgggcacctgaccgtccaatgtccattacagagactgtcattcagggcatgaacagtgattacttcggagctcgcaggttcaccgtgcgtgacgccattttcggcggcaattccggaggcccagtgcttaatggcgccgggaaagtgatcggcgtggccatgactgggatgttccaaacaggggggggcacagaaaacatgataaccccgatctcttatgtgcggcgcctcgcggaacagcctgcttacgacccctttagcaacgtcgcgagcaaaaccagggaacactcctga

SEQ ID NO: 7751 - RNA, 1713 nt, synthetic construct
  source 1..1713: mol_type = other RNA
atgaacctggacaccgcacagcgactcctcgaatgcgagactagagcagatctcgccgagtggctcggtgaagaccctaggaggctggctttttatgcttacgtgctgccggagcacaggcgctattcccatttcacaatagagaagagagcgggagggagccgtcatatccatgcgcccattgcccctataaaggaacatctgcggctcatttctgcagcactgtcccacttctataaccctcggaatgtggtaatgggctttgtgaaggagcggaatattgtcgacaacgctaataaacacagtcgccaggagtggattctgagggtcgatctgaaggacttctttccaactatccattttggtagagttgtaggggtgctgcaggccgcaccttttcagctccgttcagaggtggcccagacaatcgcacagttagcctgccaccaaggagtcctcgctcaaggcgcccctacttccccgatcttttcaaatctggtgtgtaggggactcgatcacgagcttctgaacttggctaggagagggcgctgcagatttactcgatacgcggacgatttgaacttctccactagcagaaagcggtttcctgatctgctcgcagcccgacagcttggtagtgagggccatacttgtgaagtgtctgctgccctgttacaggttataagcaaacacggctttacattgaacgacagtaagacgaggctcgtgcaccgcagtcaacgccagacggtgaccggactggtgtgcaatgaaaccgccaccgtcagcagacgctactatcggggtctgcgggccgttcttcacgtctggaggaaatacggagaagattccgccgccgaatggtttctggccaaccactacaagaggaacaaaccctcggggtctgacttctcctttaagaaagttgtaatcggcagggtgcagtttatcggctatgtttgcgggtggagcgccccaaagtaccagaagctggctaacctcctatcacagttagatccgacattccggaaaaagacagccaagacaccccccccagaaaagccatctggcttggtcatttggggagagggcgagacggactatctgcacttcttcatggcttggaactccctgcatcaggactatccaaaccttacaattgagttcccccaccctgctaaacgaacgaagggggctccaatgctagagaaaatgctggccgtgctcgaaaagacccccccactagaagcaaccgtttgtgtgttcgacactgacgaacctaagatcacctctagatttgagccagtcgagggaagcgcttaccttaagcttggcaccaacctgttcgtagtgctgctgcccactccaagtttcagaagcgggcgagatcccctctgtgtcgaactgctatacgaggaccccgcatcattacgcgatgagcgcggccggcgtctttaccttaaagacgaattccaggcggaggagccttaccacaaaaaagaaccgggagtgatgcggctgaaaccccgtagcaattcacttgtcgtcgaggatgtgcataatgggacaacccagcaaaatgttgcgttaagcaagatgggattcgcaaatttggtgcaatccaaatctacctcgtttgaaggcttcagagccctgttcgatgtgttgaatggcatcgtagaaacagagttgaccttgagtaatggttcttga

SEQ ID NO: 7752 - RNA, 1710 nt, synthetic construct
  source 1..1710: mol_type = other RNA
atggatgccagccttttcccgttccccatcgcgcccaagtgtaaagttgccaataataaagaactggctgctttgttgggaattaccacggccaaactaacctactatgcctaccatctggctgatgacgaaaagtacaaggaatttaccattaagaagcggaacggaggcgatcggttaattgaggcacccatcaaaggcctgaaagatattcaggagagtatcgccgatattcttgaggaaaattacaaacctcgagcctgtgtcttcgcatacgtgaaagatagaggaatcgtcgagcacgctgctacacatattggccagcgttggctattacggctggacctgaaagactttttccacacaatctctttcatcaggatcgctggtatcttacgcagatcaccttataacttcgcagagactccagctaagacctccgcgctgctctgtactaaaggccagaggctgccacagggtagccctgcatctcccgtgatatccaatatcctgtgcaaagggttggactacaaactgaaagagttggctgcacttaacaaatgctattataccaggtacgcagacgacatcttcataagcaacaacgggtcaaagtttccaccgtccatagcaatccgggatgaggacgggtctgcagaactctcagacaccctcaagaagattataattgatgccgggtttgaggtcaatctggataagacaattctacgaaagagatcggaacgtcagctcgtgaccggcgtggtggttaatcgcaagtctaatgttcccaaggagctgatcaaaagcattcgagccgcgctctacgcctgggaacagcatggactcgaagctgccgaagactactggaagagaaaaatcgataagtctaataggttcgatggcgagtcccctcagatgaagttggtgctcaggggcaagatcactcacgtaggtcatgttaagggttattcggacggcactttcctcacgctcgtgaaacgattgcaagccctcgatagtgactatcacattgatgagcaaaagattagtcgtactataacaggggagatccacatttacacggagggcgtaaccgacaccaaacattttcaggcggctcttagggcatttcagcggagtggcgagtttgccggactgaatcttattttcagaaacagcaagaagaccgggagcagtggattaaaagccttgtgcgagaacctgtgtgaaacactgcagaggcaccttactatatgcatctttgaccgcgatgaaagacctattatcaacgagatgtctgggtccccaggtaattaccgcgatcacacaaacaatgtcttttccctgattatcccaacacccgaattccgcgacccctccgatctgatctgcattgagcacctatatcaagacgcccaaatctatactccagacagccagggtaggcggctgtatagtaaggacgaatttgattctcttggatgtcataaggacaaccctcagctgttctgcagagtgagcaaacaatcactgatctatgatgaccaggtgattaacctgcaggagaagaagaacatagccctgcctaagaacaaattcgccgactacatcttcaacggcgcaccacccttctcaaatgtcgacttttcagggtttcgcggaacatttacccagatagtggctatcgccgcgagctactcccggtga

SEQ ID NO: 7753 - RNA, 1707 nt, synthetic construct
  source 1..1707: mol_type = other RNA
atggacgccttcttccccttcgacccatctcccaagtataaaatcagcaacaacaaagagctggcagctctcctgggcattagcacagctaagctgacttactatgcttattatcttgctgatgacgacaagtacaagagcttcaagattaagaaaagagcgggcggggaacgtttgatagaggcccctaacaagggcctgaaggaaatccagaaaaacataagtgtgtttctagcccagtcttacaagcccagagcctgtgtatttgcctacattcaggaccgaggcatcgtcgaacatgccgctacccacataggacagcgttggctgctgcgtctggatttgaaagatttctttcactccatttcgcttgcccgggtaagtggtgtcctgaggcgcgcaccatacaatttcgccgagagtccagcaaatacaactgcaaggctgtgcaccctcgggagaaggttgccccaaggatcaccagcttcacccataatttctaatattctatgccgcggactcgactacaagctgaaagaactcgccgcgtccaacaaatgctactacacaagatatgcggatgatatcttcatttccaacaatgggtcagccttccccgccagcatcgcgatcaggtccgaagacgggtcagctgagctctctgacacaatcaagaagattattacggacgcggggtttaatatcaactttgagaagactatcctccggaagaggagcgagcgacagctggtgaccggcgttgtggtgaaccgcattagcaacgtccctaaggattttataaaaagcatccgcgctgcactttacgcctgggagaaacacggactcgaggctgctgaggagtactggaagcgctcaatcgcccagacaaatagatttgacggggaatcaccgcagatgaagcttgttgtgcggggcaaagtgactcacgtgggacatgtcaaaggatattccgacggaaccttcttaacgctcgcaaaacgattgcaggcactggattctgaatatcggatcgacgaacaaaaagttctcaggaatataacgggggagatccacatatatactgaaggcgtaactgacaccaagcactttcagaccgcactccgggcattgcaaaggaggggcgagttcgtgggtcttaacctgagtttcagaaactcccgaaaacccggttctagtggtctgaagctgctgtgcgagagtcttagcgaaaccttgcagagacacctgacaatctgtattttcgatcgcgatgagcgccagatcattaatgaaatgggcgggagccctggaaattaccgggaccatgccaataatgtgttctccctgatcattcctacaccggagttcagagattctggcgatttgatttgtatcgagcatctataccgggacgcccagatttatttaaccgataatcaaggccgcaggctgtattccaaggaagagtttgattcgttagggtgtcataaatccgagcctgatctgttttgcagaactaccaagcagagcctgatctacgacgaccaggtgatcaacttacaggagaaaaagaatgttgcccttccaaagaacaaattcgctgattacattgcagccggtgctccacctttcagtaacatagactttgaaggatttcgaggcacctttacacaaatcgtcgaaatcgcctcttcatattcccggtga

SEQ ID NO: 7754 - RNA, 1707 nt, synthetic construct
  source 1..1707: mol_type = other RNA
atggataccttctttccttttaacacttccccaaagtacaagattgagaacaataaggagctggccgaattattgggggtcactacggcgaaactcacatattacgcatattacttgcgggatgacgacaagtaccacagtttcaagattagaaagcggattaatggggagcgactcatcgaggccccaaatcgaggcctgaaagacatacagaagacaatttcacatttccttgaacggaactatacaccaaggtcatgcgtgttcgcttatgtaaaagagagagacatagtggagcatgcaagcattcatgtgggacagcgttggctgctgcgcctggaccttaaggatttttttcacagcatctcatcagcaagagtatccggggttctcaggcgcgcccccttctgttttgccaagtctcctgctaataccgtggcaaggctgtgtacgaaggacggaagacttccacagggaagcccggcttctcccgtgatttcgaatatactgtgtaaaggcttggactacaaactcaagcaattggcctcttccaacaaatgctattatacccggtacgccgatgacatcttcatctcaaataacgggagtgtctttcccagtgcaattgctattagaggcgatgacgggaacgtcgagttaagcgaagagatcaagaacataattatcaactccggcttcgaggtgaacgccggaaaaacgacacttaggaaaaagagtgagcgacagttggtgacaggcgtagtcgttaataagaagaccaatattcccaaggaatacattaagtccatcagagctggtctgtatgcctgggaaaaatttgggttggtggccgccgaggaatactggaaaaaggagatagagcggagcaataaattcgacggccagcccccacagatgaagctcgtgattcgcggtaagattatacacgtcgggcacgtgaaaggctacaccgatgcaacattcctaactttagttaaaaggctgcaggcgctggacagcgaattcaagatcgatgaacaaaagttccgtcgggaaattacagacgaaatccacatctataccgagggcgttactgataccaaacatttccaggccgccctgaatgcgttccaaaagagagacgaattcctggatctaaagatcatcttcaagaactccagcaaacctggctctgctagcctaaaaactctctgtgaaaacctgagggaaaccagccaaaagcacctcactctgtgcatctttgatcgagatgaaaagaatatcgtaaacgagatgtctggatcacctggaaattatcgcgatcatggtaacaatgtcttttcgcttatcataccaattcctgagtttaggaagggaaatgactctatctgcattgagcacctgtaccgcgacagcctcctgtttacctatgactccgaagggcggcgcctctactttaaagacgagttcgattctcttaactgccacaaaaccgatcccaacctgttctgccgtatctccaagtcctctctcgtgtacgatgataatgtcatcaacctgtcagagaggaaaaatgtggctctgccgaagaacaaatttgcagactacgtgtgtagtggccagcctccctttaacaaagtggactacggtggtttttacgaggttttcaaacagatcttagagatcgctagtacttataacaaatga

SEQ ID NO: 7755 - RNA, 1707 nt, synthetic construct
  source 1..1707: mol_type = other RNA
atgaaagaacctaagttcatgcagaacttgcccagctataagatctctaacaacaaagacctggccctgctctttggagtaccgacagccactctcacatactacgcgtatcacctgtcagatgagcggaaatacaagtccttcaaaattataaagcgcagcggcggagaaagactaatcgaagcccctatcaaaggactcaaagaccttcaaaaaacctttagcaactttctgtccgaaaatttcaagcctagagcttgcgtttacgcgtatgtcaaggataggggcatcgtcgagcacgccgcaacccacatcggtcagcgctgggttctgcgtatagatctcaaggatttcttccactctataacaagcacacgcattactggccttctacgcaagtccccgtacaattttgccaagagtcctgcggaaactgtggccaggctctgtaccattgacgggcggatgccacaaggctccccagtcagtccaatattctcaaacattatttgtcggggcctcgactataaactcaaggaactgtcgagcctaaacaaatgttactacactagatacgcagacgacatctttatttcaaataatggcagcctcttcccaagcgccattgcttctagaaacgacgacggttctgtacagttaagcgatgctatcaaggacattattacgaaggcagggtttgtgatcaatatcgagaaggtgatccttaggaaacggagtgaacgacagttagtcactggcgtggttgtgaacaaaaaatctaatgtccccaaggtgtttgttaagagcattcggtcttcactgtatgcttgggaaaaatttggcctgccggccgctgaggactactggaagcgcgagatctacaagaataatacccataacggtgagattccaagtttcaacttggttattagggggaaggtgacacatgtggggcacgtgaaggggtatgcagaccctacctatctttcactggccaaacggcttcaggcgctcgattccgaattccatatcgacgaggagaagatattcaacacgatcacttctgagattcatatttacaccgagggagtcaccgatacaaagcatttccaggctgcactcaacttctttaagtccaagggagatttccaggccctgaacctggtgtttaagaatccccgaaaaacaggcagtgctaaccttaaagcactgtgcgaaaacctgagtgaaacccagcagaaacatctgtccatttgcatctttgatagagacgagcccgctatcatcaaagagatgtcgggttcacctgtaaactatagggaccacaacaataatgtgttctccctgatcatttcagtgcccgacttcaggcgagacttggattacatctgcatagagcacctgtataaggactccgatttatacatcgccgatctggaaggaagacgtctgtattccaaggatgagtttgataatctggggtgccacaagtatttggataatttgttttgtcgctctagtaaaagctccctgatctacgacaatatggtcatagatttacccacgaaaactaacgtggcattgcctaagaacaaattcgctgagtacattatcaatgccaaagcaccctttaatgatatcgacttcgaggggttcaggccaacctttaatcaaatctttgagatagccagcacctatagaaagtga

SEQ ID NO: 7756 - RNA, 1719 nt, synthetic construct
  source 1..1719: mol_type = other RNA
atggattcattttatcccttcattcccaatcccccctataagatctcaaataatactgaactggccaatcttcttaagattccagtggcacgcctgacttattacgcctactatctgccagatgagcagaaatacacttcttttaacatacgcaaacggaacggcaacccgcgactaatcgaagcacccatcaaggggttaaaagacatccagcgcgcgattagcgtgtatctttacgaacaatataagccaagatcctgcgtgtttgcgtacgttcagggaaaagggatcgtagaacacgcttcaatacacatcggacagcgttggctgttacgcttcgacctgaaagacttcttccatacaatcaagacgtccagaatctcgggactgctgcgacggcccccttattcccttgctaaaggccctgccgagacaatcgccaggatctgctccaaagacggtaggctgacccaggggagcccctctagtcctgtcattagtaacctcctctgcaaggggctggactacaagattaaggagttggcagcaaagaacaaatgttactattcccgatacgccgacgatatttttatcagcaacaacggatcagtgttccctagcgccatcgctatccgtaccctcgagggaaccgcggagctcagtcttgcccttcaggaaatcgtaagtgcgtctggcttccagattaacaaaagcaaaacaactctgcggatgaggtccgaaagacaaattgttaccggtatcattgtcaataggaagtctaatataccgaaagaattcctcaattctgtccgggctgccttgtacgcatgggagagatttggcttggaggctgctgagaattactggcggaagaatatagaccctaaaaacggctttaaccaggaggacaaagagggcccacgcttgaggtgggttatccgcggaaagatcaaccatattgcccatgtgaagggttattccgatagcacttttttgagtctcgctcggagactgcaatcactggattcctcttataagatcgatgaacaaaagatcctccatgccctgacagacgaaattcacatatacacagaggggatcaccgatacaaagcacatcgaatctgctctgaagaatttcaagaaaaaccaggagttttccaacctgaatttggtgctgaaaacccccaggaaaccaggttctgcttcactaaagtcgttatgcgagagcctctctgtcgcccctcagaagcagctaaccatttgtatatttgatcgtgacgaaccaaacatcattaaggagatgggcgggtctagcagcaactaccgagatcatacaaataacgtgttcagcatgattatacctaccccagacttcagggacgctaatgagccactctgtattgaacacctgtacaaagatgaggcaatctacatcaaggatagtcacggccggagactgtacagtaaacacgagtttgatagtctggggtgtcacactttagagccgggactgttctgtagaatttccaagaatacgctcatttatgacgacaacgtgatagaacttagcaagaaagccaacattgcattgagcaaaaataagtttgccgactatatatccaacggtgcccctcccttttgcaatattgatttctcaggcttcaggaatatgttcagccagattacgcaaatcgcaggcctgtacaagtcaaactga

SEQ ID NO: 7757 - RNA, 1707 nt, synthetic construct
  source 1..1707: mol_type = other RNA
atggacgcatctctgcctttcgggcaatttcccaagatttccataagctcaaacaaagagttagcagtgctgctaggaatcagtgttaataagctgacgtactacgcttattacctggatgaggagtcaaagtacaagacattcaacattagcaaaagaaacggcggagtccgagtcatcgaagcgccggtgaagggcctcaaagacatacagaaaaacatcgtcacattgattgaacctaactataaagccagatcttgtgttttcgcgtacgtcaaaggccgcggcatcgtggaacacgcagctgtgcatacaaatcaacgctggctgctgcggttcgacctgaaggacttttttcatactatttccgccgtacgcgttgccggtcttttccggcatccgccatttaatttctccaaaaatgtggccgagacgatcgcccggctatgcaccaaagctggcagactgacccagggtgcacctacctcgcctatcataagcaacatactctgtcgggggctggattataaacttaaagaactcgcttcacagaataagtgctattatacccgatattctgacgacgtattcatcagtaataacggatcattgttcccttctgcaatcgcggaacgggggagcaacggcgtggtgaagcttagtgatgacgtcctggagattattgggggcgccggcttccagctgaatctgagcaagaccatcttgaggaacagagccgagcggcaactagccacaggggtcattgtgaaccgcaaactcaacgtgcccaaggaatatataaagagcgttcgagctgccctctacgcttgggacaagtacgatcttaaacaggccgaagagtactggcgcgagcatattgatgaccgaaacaggtggggagacagtttaccaaggctatcctgggtgatcaggggaaagattaatcacatcggtcacgtgaaaggatataatgaccccgtgtttcttaccctggcaaagaagctccagtcactggatcccacttaccggcttgatgagaggaaaatcctgcgttctttgactgacgaaatccacgtatacgcagaggggatcactgattgcaagcacctcgaaacagccttgaagttttttaaagccagaggggagtttacaaacctcaacctgaacttcaggaacactcggaagcctggctcctccgtcttaaaagctctgtgtgagcatcttagtgaagccccccaaaagcacttgaccatctgcgttttcgatcgcgatgagaggccgattatcagcgagatgggtggaagccccgggaattatcgcgatcataccaataacgttttctctctcataatcccagtgccagacttccgtgattccgacattatctgtatcgagcacctgtacaatgatagtcagctgtacattcccgacaatcagggtcgaagactgtattccaaggaagagttcgattcactgggctgttttaaaggggaagcgcacttattctgcaggatgaacaagcagtcgctcatctatgacgacaatgtaattgacatggtggagcgtaggaatgtcgctttgcctaaaaacaagtttgctgattacattgtgtctggcgccccaccatttagcaatatagatttctccggctttagaggagtgttttctcagattgtcgaaattgcaggattttacggtaagagatga

SEQ ID NO: 7758 - RNA, 1737 nt, synthetic construct
  source 1..1737: mol_type = other RNA
atggtgctgctgaactttccactgaaggaacaggctccagagtataccatcagtaataacaagcagatggcacaagtcctggggattaaaccctcgaccctgccctactacgcttactacctccccgacaacaaaaagtataccagcttcaacatttcgaaacggggcgggggtctgcgtctgattgaagctcccaataaaaggctgaaggatctgcagagggcaatcgcagagtacctgggagagcattataaaccacgggcctgcgtatttgcctatgttgggaaaaggggcattgttgagcatgcatcagtgcacgtatgtcagagatggttattgcggctggacctaaaggatttttttcattctatcacagctcctcgcttggcaggattactctcagcccccccattcttgctcgcaccaaacttagcccgcacgctatcctttatatgtacgaaagatggccgactcactcagggggcacccgtctctccggtcgtatctaatataatttgtagggggctggactattccctgaaggcctacgcggcgaaaaataagtgctactacaccagatatgctgatgacatctttttcagcaacaacggagccatctttcctagttccctggcccggaaagacgaggccggaacagtgatcctgggcgatgaattgcaggagataataaaagccagcggattcatcattaatgagtctaagacattcctgcgaagtcgcgcagaaaggcagatcgtcactggagttgtcgtgaacaagaaacttaacgtgccaagagaatacgtgcgacagatcaaagccgcgctccacagttggcggaagttcgggttggaagcggccgagaagtactggaacgaaaaaatcgacaaaagaaacagatggtctggcgcctccactagcttcaaacttgcagtgcgtggtcagatcaatcatgtgggccacgtgaagggctattccgattcagtctacttactactagcgaggaagctttcccaactggataacacatttaacttcgatgaaagtgctattgccgagagcatcgctgaggagattcacgtgttctgcgaaggagagtcagacatcctgcacctgggtcatgcctttcgatgtcttaagccgcggtatccttcactcaatctgatcttcaaactgcctgggattggtaagggtgatggctctagcgtattgaagagtttttgcgacaccgtgcggaatcacccgcagaggcacctgacaatttgcctctttgatagagacgagcccagcatcatcagggagatggcaggctctgctgtgagctataaggattatggcggcaatgtgttctcccttgtcatgcctcccccttcctttcgcaagaatgataacatctgcattgagttcctctaccaagacattgaccttctcagaagagatactcagggccgccggttatatctgggagaagagtttgaccaaaatagctgtttcaaaggagaagaaatgctctttaagaaattccctaagaacagcttgattctcgattccgacattatcgacgctcgcactgggaataatgttgcccttagcaagataaagttcgccgagtacatatcttcaaaggttgacccattcagttccgttgacgtgtcaggtttcgctattatctttgacgagatagccgctatccgtgaaacctacatgcgccctttccacgacgtggatggggattga

SEQ ID NO: 7759 - RNA, 1719 nt, synthetic construct
  source 1..1719: mol_type = other RNA
atggtttctttgaacttttatctcaaggaacaggccgctgagtataaggtcctgagcaacaaacatatggctcagatcttaggggtgaaaactagcgtcctggcctattatgcctactatcttcccgacaacaagaagtacaacagctttaacatcgccaaaagaggcggaggctttcgcttgattgaagcccccaataagcggcttaaggacctccagcggataatcgctgaatacttgggtggttactataaaccgagggcctgtgtattcgcatatgtgggtaaaaggggaatcgtggaacacgctagtgtgcatgtgtgccagcggtggttgctgcgactggacctgaaggactttttccactccattaccgctcctagactcgctggcctattgtccgcacccccatttctgctggccccaggtgtagcgaggacaatttctttcatctgtacgaaggatgggcgtctgactcagggagccccagtttctcctgtcatttccaacatcatctgcagagggctcgattacagcttgaaaacgtacgcagccaagaataaatgttattacacacggtacgcagacgatatctttttctcaaacaatggcgcagtatttccttcctctctcgcgcggaaggatgaggctgggactgttattctgggggatgagctcaaggacataattaaggcaagcggctttctgattaacgacaataagaccttcctgcgctccagggcggaacgccaaatcgtgaccggcgttgtcgtaaataagaaatccaatgtgccccgtgaatacattagacagataaagtccgctctccatagttggaagaaatttggtctggaaagcgcagaaaactactggagcgagaaaatcgataagaggaatcgttggaacggcgctagcatctcttttaagcttgccctgcggggtcagatcaaccacgtgggccacgtcaaagggtactccgactctgtgtatctgatgcttgcccgaaaattaagccagctagataacacctttaattttgacgagcgaagtattgccgagagcatagccgaggaggtgcacgtcttctgcgagggcgagagtgacattcttcatctgagacatgctttccaatgtctgaaatcagagtacccctcacttaacttaatcttcaagctcccgggcattggaaaaggtgatgggtcctcagtgctgaagaatttttgcgacatggtgaaaaatcacacccagagacacctgacaatctgtctattcgacagggatgaacctaatattatccgagagatgtcagggtcagcagtgccttataaggattacggaggaaatgtgttcagtctggtgatgccttcgccagatttccggaatgagaacatatgcatcgagttcctgtacaaagacgttgacctgttacgccaggatactcaaggcaggcgcctctatctaggcgaagagtttgaccagaacagtcgctttaagggacagggaacaattttcaaaaaaattcccaagtcctctcttatcctcgatagcgacatcatagattatcaaaccggcaacaatgtcgctctctctaaggttaagttcgccgaatacataagcaacggagtcgcgccattcgacagtgttgatgtgtctgccttctcggtgattttcaatcaaatcgcagccatcagagactcctacatgtcattgggggtctga

SEQ ID NO: 7760 - RNA, 1734 nt, synthetic construct
  source 1..1734: mol_type = other RNA
atgtccgcccaggacgccatcgatgagaatctcaacatttacagtatctctaccaaccgggagttggccaaaattctcaaaactaagacgagtactctatcgttttacgctcattacctgcccgataaaaagaagtacaaaacccacaccatctccaagagaggaggaggagccagaataatagatgcgccaaacaagaaccttaagactctgcagaaaagtatcgcgagttttcttaacgagcactataaggcacgcgcatgtgtctttgcgtatgtggctaatagaggtatagtggaacacggagaagttcatgttaaccagcgttggctcctcaggctggacattaaggactttttccactccataaccaccgctcggctggtcggcttgcttattgcaccaccattctgcatagcccccaacgtagctcggacaatcagctttatctgtacaaaagacggcaggctgcctcagggctctcctgcaagccctgtcatcagcaacatcatttgtcgggggctggactataaactgaagacgatcgcctctaaaaataagtgctactatacacgctacgccgatgatatattcctgtcaaataatggggcgatttttcctccgtccctggctttaaagaacgacacgggaatcgtggcactgggcccagaaatttcagagattattaccagcagtggttttagcattaacgaagagaaaacctttctgcgctctaggggcgagcgccagattgtaactggtttagtggtgaacaagaagctgaatgtcccgaaggaattcgtcagaaatatcaaatccgctctccactcttggagaaaatttgggttcgaggccgctcagaaatattggagggacaaaatagacaagcgaaatcggtggcttgtggaacatgctgattataaactgagcgtaagggggcaaatcaatcatgtgggttttgttaagggctattccgaccccatttacctctcactggcccgaaagctgagcgaattggattcaactttctctttcgatgaggaggcacttgccaacagtatcgcagaagagatacatgttttctgcgaaggcgacactgacctcctgcaccttgaacatgcttttcagaagttaaaaaacgagtaccccacactgaatctgacttttaagctgcctaataccggcaaaggtgacgggagcagcatcctaaagaatttctgcaacagcgtgagaacgataccacaaaagcacctcacaatctgtctgttcgaccgcgacgagccgaccattatccgcgagatggccggctcagccttgccatatagagatttcgggtcaaatattttctctctcgtcatccctcagcccgattttagggatcacgaatgtatttgcattgagcacctatacaagaatgatgacttacttaagaaggacagccatgggcggcgattgtacttgaatgaggagtttgattctaactcaaggcacacaggaggagaattgctatttaaaaaaatccccaaggcaacactgatcctcgatgccgacgttattgatttcaagaccggagagaatgtggctctctcgaaatccaaattcgccaactatatttacaacgagacacctcccttcacctccatcgatgtgtccggcttcaaggtgatcttcgaccaaatcgcaacaatccgtgaagcctactccaacgggatgcatggccagaaaactatctga

SEQ ID NO: 7761 - RNA, 1737 nt, synthetic construct
  source 1..1737: mol_type = other RNA
atgtcagtgcccgaggtgtccccattgcctgcgagcttcttggacctccttgccccagccgtaaaaattaagaataacaaggagctagccgctgagctcggaatctctctgggccgtttgacttactatgcttatttcctgcccgaccacaaaaaatacaaaaccttcacgatctccaagagagggggtggagaaagaatcatagaggctccagtgaaggggctgaaggaccttcagaaaacgattcttgggaaattcgagccttactacaagcccagggcctgtgtctttgcttatgtgcaggatagaggaattgtggagaacgccgacgtccacgactttcagagatgggttctgagggtggatctgaaggacttcttccattctatcactcagcgtagagtaatcggaatcttctcttccccgcccttctctttaagtcgggacgcagccagaacactgagctttctgtgcactaaagatggcaggttgacacagggcgcaccaacctcccctttgatcagtaatctggtgtgtaagggactggattacaccctcaaagaactggccgcaaagaacaaatgctactatacccgctacgctgacgacatctttttctctaactccggcgccatgtttccccgcattatagctgagaagatggaggacggtagcgtgaagataggggaagagctgaaaaacttgatagagggtgccggcttcgctatcaatgaagagaaagcgttcttaagatcccgcgctgaacgccagatcgtcacaggcctagtggttaacaaaaaggtgaacgtgcctagggagttcactcgagaggtgcgagcggccctatacagttgggaaaagcacggcctggaatctgcagagaatttttggaaggaaaaagtcgacaagaaatcccgccacagcgaatctgacagcaggtttaagtgggtggtgaggggaaagattaatcacatcggtcatgttaaggggtattcggatccggtattcctgagcctcgcccgacgacttaaggccctcgacgatacctataagctggatgagcggaaaatcacagttgctatagcacaagaaatccacatttacaccgaaggagtgacagacaataaacaccttaagaacgcttacgagcacttcaaacgttctaaccaattcgacgacctgaacatcctctttaaggaaaccaagaagtcagggagtcccgccttaaaagcactttgcgagaacctgagcgaggccttacagcggcatctaactatctgtatttttgatagggacgaaaaggacattatctcaaatatggggggcagccctggtagttataaggaccatggcaacaatgttttttccctcgtaatcccggttcccgattttcgcgatactcaatttgtctgcattgagcatctgtacaaggatgagcagctgtttcaggaagacatagaaggccgccggctcttttccaaggatgaattcgattcacttagttgcttcaaaggcgagaaaccattgttttgtagactgcctaataagcagagcctcatttacgactcagagataattgatatgtccaagaaagtcaacgtcgccctctcgaaaaataaattcgcagattatatcctgagccgggtcgcaccatttgataagattgatctgagcgggttcacaggtacctttgaacaaattcgggagattgcgaggtcatatggaaataaacggtga

SEQ ID NO: 7762 - RNA, 1737 nt, synthetic construct
  source 1..1737: mol_type = other RNA
atgcttaacatcgcaggcaagcctttgtttgttccctttctggacgcacctctccccgaggtgaaaattaaaaacaacaaagagcttgcgggcttcctcggcatctccttgggacgattgacctattacgcctactacctcccggagaacaagaaatacgccagcttcaagataaagaagagagggggtggcgaacgcctcatagaagcgcccgttaaggggctgaaggatatccagcgagaggtcgtgaggaagttcgaagacgacttcaaacccagagcttgcgtgtactcttatgtaaagggcaggggtattgtggaaaacgccgatattcacgatctgcagagatggatcctccgaatcgacctcaaagatttttttcactccattactcagaagcgagtcgccggtattttcagcagtccacctttcatgctgagccctgacgctgctcgcactctctcattcatctgcaccaaggatggaagactgacacaaggggctccctcatcgccattcttaagcaatctggtttgtcgtggactggattaccggttaaaagagctagcagccaaaaacaagtgttactacacgagatatgctgacgacattttctttagtaactccggcgccatttttccaaggtctttggccgagcgcctagaggacaatagtcttaaactcggagaagagctgaccaatatcatccaaggggcagggttttctatcaacgaaaataaggcattccttagaagcagggccgagcgacaaatcgttacgggcttagtagtcaataaaaaggtgaatgtgccgaaagaatttatccggtctgtgagggcgtccttgtactcctgggagaagttcggactggaacttgcagagaaacattggcgcgagaaggtggacaagcggtcacgtcatgaacgggagtccccccgctttaaatgggtggttaggggacagatcaaccacattggccatgtcaagggctattcagatcctgtcttcctgtcactggcaagaagacttcaggccctggattcccagtacaaactcgacgaaatcaagataatcaacagtattgccgaggagattcacatctactctgaggggattactgatataaagcacctcaagaacgcttatattgaactgcagcgtagtggagaaatcaatgacctgaacatcgtatttaaggagacaaagaaaagtggctcaccagctctgaaagcactttgcgagaatctgtctgaggccctccagcggcacttgaccatttgcatctttgaccgcgacgagagggatataatcacctctatgggtggatctcctggttcctataaagaccatgggaataatgtctttagcctggtgattcccgtgcccgaattcagagagacagagtttgtttgcatcgagcatttatatagggatgaacacctattcctagaagaccaagacgggagacgcttgtttgctcgcgacgaattcgatagcgtgtcatgtttcaaaaaagaacggccactgttttgtcggtatcctaataagcagtcgctgatatatgacagcgacgtgattgatctggctgagcgtaagaacgtcgccctgccaaaaaataagttcgccgagtatgtgacatccaagactccgccattcgataacatggatataagcggcttccggtgtgtatttgaacagatccgggatattgcgaaatcctacaggagcaagaggtga

SEQ ID NO: 7763 - RNA, 1746 nt, synthetic construct
  source 1..1746: mol_type = other RNA
atggccaagttaccgcggaaattctctttcagtagctttttgaattcccctgcacccgaagtgaaaatcaaaaataataaggagctcgcagaggtgcttggtatctcagtgggaaggctaacatattacgcttactacctgtcagcagatgagaagtacagttccttcaacatcagcaagcgagggggtggggagaggcttatcgaggcacccgtaaaggggcttaaagacctccaaaagaagattgtcgagtacctgactactttctttaaacctcggtcttgcgtgttcgcatacgttgaagggaggggcatagttgaaaacgcggacgtgcatgacttacagcgttggattttgcgcgtcgacttgaccgacttttttcacagcattacacaaaagaggctggtgggcgtattttccagtcaacccttctctatgtctcacgatgctgctcgcacactcagttttttgtgcacaatgaatggtaggttggcacagggggctccgacctctcccattctctccaacatcatctgccgggggttagattataaactgaaggagctcagcgccaagaataaatgctattatacccgctacgctgatgatattttcatctcgaattccggtgcatctttcccacgtactattgctgaaaagctagaggatggctcggtggagctgagcgagagcttttgtgaagtagtgtccaacgcgggttttaaggtaaatctgaagaaggtcttcctgcggtcaagagcagaacgccagatcgtcactggactcgtggtgaacaaaaaaataaacgttcctcgggaatttgtcagaagcattcgggctgccctctattcatgggaaagcttcggactggaggatgccgagaagttctgggccagaaacattgataaaaaatctcgccacgagaggtccagcccacgttttaggtgggttctgagaggccagatcaatcacgtcggccacgtgaagggctattcagacagcgtgtacctaggactggccagacgactggccgcccttgatgactctttcaagttggatgagcgtaaaatccgaaaagccatcgctgaagaaatccagatttacacagagggcccaacggacatcaagcatctttcaaatgctttcgaagtgtatcagtctagaggcgagtttcaggacctgaagctgatcttcaatagaaccaagaaggccgggtcaagtgtgctgaaagttctctgtgagaacctttccgaggcccaacagcgccacctgaccatttgtatcttcgaccgagacgaaagggagtacataaagtcgatgggcgggtccccagggagttataaggaccatggcaacaacgtcttcagtctcgttattccagtgcctgatttcagggataccgacctagtgtgcattgagcatctctaccgggacgaagatctgtaccgggaagatgtcgagggacgccgactgttttccaaagaagattttgatgccgtcagttgttttaaaggagacagacccttattctgtagaatacccaacaaaaactccctgatatatgattctgacatcattgacatggtggagaagaaaaacgtggccctgagcaaaaatgcttttgcggacaacattgttactaagacggcccctttcaataacgtcgacctgtcaggatttaccgagacatttgaacagatccgcatcatagcgggcagctatcggaataggggcgtgggagtatga

SEQ ID NO: 7764 - RNA, 1737 nt, synthetic construct
  source 1..1737: mol_type = other RNA
atggccaaaccagatgagtttctggatctgcctctgcagcctcccattaagatcaaaaataacaaggagctagcagactttctggagatcaaggtgaacaagctgacttactatgcctatcaccttgacgatagaaagaaatacacgacctttgagatcaagaagagatcaggtggtctgaggaaaatcgatgccccgatcaagggactgaaggacattcatcggcaggtgctgctgaaactcgatccatactataaacccaggtcctgtgtgttcgcatacattaagaaaagaggcattgtggaaaatgctgacctccacaaggggcagcggtggattctcaggatcgacctggtggattttttcaacaccattaccttcgaacgtttaaaggggctttttgccagccaaccatttagcatgtctgagaacgctagccgtaccctgtcgatgatctgtactaaggatggtcacctcacacaggggtcccctgcttctcccctactctctaacattatatgccgcggcttagattataagttgaaggagatatccgccaaaaataagtgctactatagtcgctacgccgatgatatatttatcagcaataatggggccattttcccaaacgcgattgcggaaaagaagtctgacgggagcgttgagctgaacccgcagatcttgtctaccatatatgacgctgggtttagtcccaacaaagagaaaatcactctgaggtcaagggcagaaagacagattgtcgcgggcgttatagttaatagaaaaacaaacacgcctcgcgaatacatcaagagtataagggctacactttacagctggaggaagtacgggttagaatccgccgaggagtactggcttaagcatatcttcagacagtctccgcatggagataaccaacctagaatgcggtgggtactaaggggacaaattaaccatgtgggccacgtaaaaggatactcagacccagtctacattggcttggcaaagaaacttaagagcctggacccaactttcaagttcaatgaacagaatgccatcgattttgtccgagaggaaattcacatctattctgagggcattacagaccgaaaacatctggaaaacgcactgctgtccctaaaatcccaaggcttgttcacggaacttaatctggtgttccgagaaacctctacagacagcaaaaagcagggcagcgcagcattgcgctcactgtgcgagacattatgcgctgccacccagaaacacctcactatctgcctctttgaccgcgacgagaaagaaatcaccgaatcgatgggaggatccacccgtacatacaaagaccacggaaacaatgtctggagcctgataatccccgcaccagaattccggacactcacctccttctgtattgagcacctctatcgggatgagcagttgtatcagtatgaccaagagggccgacggctctactcaaactcagagttcgatgacaatcagtgtcatcgcgaccctgacaagttggtgtttcagaaacaccctaacaagaaagctcttattctcgacgatgccgtgatcgacattactactaaaacaaatgtcgctctgcccaagaataagttcgctgattatatcagtagtaagactgccccctttgacgacatggatttttccggtttcatccccacgttcgatcagatcatagagatcgccgcgcggtacaccagtaataaatga

SEQ ID NO: 7765 - RNA, 1677 nt, synthetic construct
  source 1..1677: mol_type = other RNA
atggcaattccgcagataaaaaacaatcaggacctggccgatttcatcggggtgaaaaaaggcgtggtggcatactatgcctattacttggacagcgctaaagcatacacgtccttcaccattaagaaaaggagcggcggagatcggactattgatgctccagttcgggggctgaaacagttacagcgaacgatactgaataagctgagtcccgaagcagcctttcgccattgcgtgtacggctacgtaccaggcagagatatcctgcaaaattctgctattcacgtgcgccaaagatgggtgcttcgggtcgacatcaaaaatttcttcccaagcatcacaactctcagagtctccggtatgttccgtagccctccctttgatatggaaccgaaggcagcccgcgctctggcattaatttgtaccaaggacggtcttttacctcaagggagcccactgtcaccctggatcaccaacgtaatatgcaaggggctagattacaaccttaagaggctggcctcaaaacataaatgttattactcccgctatgccgatgatctgttcttcagcacttcaaacggcctttttcctaccgccctcgctagaaaaagtgacactgagagcaatgttattatcggggaggaactcaagtccgagattttgagcgccggcttcctgcccaatgaagagaagacatcgctgaagcccatctctcagagacaggtggtcaccggtattgttgtgaattccaggacaaatgtccctcgggaatacatacgaaatctacgagcagcgttgtactcctgggataagtttggactagaggctgctgaggagcattggaggaacaaagtggacctgaagaaccgggtgggagagcaaccacgttttaggtgggtcgtccgcggccagattaacttcgtaaagcacgtgaaaggggaagcggatcccgtttatcttagtctcgccaagaaactgaagaagctggacgagaagtttacattcgatcccaaggtgagcgcgctgagcgtgaccgaagaggtgcagatctttgttgagggtatcacggataaaaagcacatcgagaaggccttcaggaacgcgcagggacagggactttatctcgacctgaacctgactttccccaaccaaagagaatacggttcgtctaatttgaagtcactgtgtgagacactctccgccaacgcacagcgttgccttacaatttgcatctttgatcgcgacgagcagccctatgtgaaaagtatgggaggatccagtggcgattatatggaccacaataacaacgtattctctctcatcattcctaggcctgagttccgggtcgaaccggacatctgtatagaacacctgtataaggactctgacctcttcaaacatgacttggccggccgaaggttatactctaagtctgaattcgataagcactcatgtcattgcgaggaccctaatatctttatacggaccccaccaaagagtttgatttgcgactccggggtcattaacatctctaccaaagcttcagttgccttgtccaaatttgacttcgctactaatatctacgatggggtgcctccatttgacagtatctcatttgaaggctttctgcctctctttacaaaaattcagcagatcaagaacctctttagaaagtga

SEQ ID NO: 7766 - RNA, 1677 nt, synthetic construct
  source 1..1677: mol_type = other RNA
atggctatccccccaatcaacaacaatcaggatctggccaactacatcggcgtgaaaaagggggtaattgcttactatgcgtattacctggtgagttctaaggcctataccagctttgccataaagaaaagatccggaggagagcggactattgacgcaccgatccgcgggttgaaagagctgcagcgtaccattcttgataaactgtcccctgagacaaacttccgacattgcgtgtatggctatatccccggaaggggtattctccagaattccgcaatccacgtgaggcaaaaatgggtgctgcgggtcgacatcaaagatttctttccatcgatcacaaccgctagaatctcggggatgctgaaatcccccccattcaatatggcgcctaaagctgcccgcgccctagctctgatttctactaaagacggggtactgccccaaggctctcctctgtccccgtggataaccaatgtaatctgtaagggtttagactacaacttgaagcgtcttgcctccaaacataagtgctattactcacgctatgccgacgacctttttttcagcaccagcaattccttctttcccactgccttagcacgaagaggggacgccgaaaagaacgtcataatcggcgaggatcttgaactagagatcctgcgggcgggtttcttacctaatgaagagaagacaagtctgacacctattagccaacgccaggtgatcacgggagttatagttaacagtaggactaatgtccccagggaatttgtcaagaatgtgagggccgcactgtactcatgggaaaaatttggattgaaggcagctgaagagcactggagatcaaaggtggattctcgaaaccgggctggagatccgccacggttccgttgggtgctgagagggcaaatcaatttcatcaaacacgttaagggcgaggcagaccccgtgtacatatccctggcaaagaagcttaagaaactggacgataactttacgttcgacgccaaagcatccgcactatcagtgatcgaggaagtccagattttcgttgagggcattaccgataagaagcacatagaaaaagcctttattgatgcccagaaacagggcttgtactctgatctcaatctgacatttcctaaccagagggagtacggcagcagtaatcttaagagcctctgcgaaaccctctctgccaatgtgcagagatgtctcacgatatgcatttttgaccgagatgagcctgcttacgtgaagaacatgggcggcagttcaggggactatatggaccacaacaacaatgtcttctctttaatcatcccacgccccacttttcggtccgaaggtgatatctgtattgagcatctgtataaggacgccgatttgtttaagtatgacaccgccgggcgcaggttgtactcaaagagcgaattcgacaagcactcatgtcatatcaaagaccctctgatcttcattagaactccaccaaaaagtctcatttgcgatagcggagtaatcaacattagcacaaaagctagcgttgctctctctaaggcggatttcgctaccaatatttacgaagagattccaccctttaacaaggtcagtttcgagggtttcctccctctctttacaaaaattcaggagataaagcatctgttcaaaaagtga

SEQ ID NO: 7767 - RNA, 1680 nt, synthetic construct
  source 1..1680: mol_type = other RNA
atggcaataccacccattgtaacactgcaggatttggcaaattacctaagcatcaaaaggggcaaactcgcttactatgcctactatataaagcctgccgacgcttataatactttcgcgattaagaaaaggtctgggaaggaccgctcgatagacgctcctatcaagggtctgaaggacattcagaaactagtctatgagaacttttctggagagatcgagtttcggaaatgtgctttcggatacatacctgggaggggaattctgcaaaactccgaacggcatgtccgacagcggtgggtcttgagagtggatttaaaagatttctttcccagtgtcaccgcggttagagtggctggcatgttctcctcccagcctttcaacctgagttacaaaactgctcgcgccctggctcttattgccaccaagcatggcactttgccccaggggtcgccactgagcccatggatcaccaacgtgatatgccgcggtttagattataatctccaaaagttggcctcacggtacaagtgctattacagtagatacgccgacgacctgtatttctccacctccaatagtctctttcccctggcacttgcacacaagtcagagaacgatagcaatgtcatcatcggagaagaactcaaggcagtgattctgaccgctggatttacgcctaatgaggagaaaaccagcctgcgtccgactagccagcggcaaatggtgacaggcattgttattaattccaagcccaatgtgccgaaagaattcattaagcagatccgtgctgctctctatgcatgggaaaatcacggcctggtagcagccgaggaacactgggcaaagaagagcgactttagaaataggtttgagaaggccaagcctagatttagatgggttctccgcggcaaaattaaccacctgcgacatatcaagggggaatctgacccagtgtttctgaagttggccaccagattaaagaagcttgacccaacgtatagcttcgacccaaaactcagcgcgcagtctatcacgcaagaggtgtgcctgttcgtggaaggcattactgatcgcaaacatatcgaaaccgcctttaaagacgcacagaacaggggattatacggtgacctaaaccttaagttcaacgagcctaaagagaatggctcctcaaacctgcagaaactgtgtcacaacttgtccgccacaccccaaaggtgtcttacaatttgcctgtttgatcgagacgagccatcttatatcaaatcaatgggcggttcaagttccgattacttggatcacaacaataacgtatacagcctaatcctcccctaccccaaattcagggccgagcccgatatatgcatcgagcatctctacgaagacaaagatctttttatgccagacagtaaggggcggcgtcttttctcacgagacgagttcgataagcactcttgtcacatcaaggaacctaacgtgtttattaaactccctgcgaagtccctgattgtcgacagcaacgttatcgatataagtacaaaggaatctatcgccctgtctaaaaatgattttgcctctcagatctatactgccacacccccgtttgacaatgtgagcttctcagggttcattccactgttcgataagatccaggagatcaaaaacctgttcatccgctga

SEQ ID NO: 7768 - RNA, 1677 nt, synthetic construct
  source 1..1677: mol_type = other RNA
atggccctacctgcaatcaattctctgcaagacctggccaactttttgtcagtgaagcgtggtctgctggcctattacgcattttatgtctcacctggtgatgcctatagcaacttcagtataaagaaacggtcaggttctgatcgaagtattgatgcgcctgtcaagggattacgcgacatccaaaccatcatatacaagaagttctccggagagatcgaatttcggaaatgcgccttcggatacattcccggcagaggcatctttcagaacagcgagcgccacattcggcaacgctgggtgcttcgaattgacctgaaggatttcttcccctccattactgcggtgagagtagccggtatcttcagtgcgcagcccttcaatatttcgtataaggcagcccgaactttggcgctcatcgctaccaaaaacggcgtgctgcctcaaggcagccccctaagcccttggattagtaacgttgtgtgtagaggcctggattacaccctccagaaattggctagccgccataaatgttactatacaaggtatgctgatgatctgtacttttctacttctaattccgtattcccatcagctctggctcataggtccgagaaagaaagcattatagtgatcggggatgagctaaaagctgccatcattgccgctggcttcactcccaacgaggagaagacgtcgctcagacccgccagtcagcggcagatagtcaccggggtggtggtgaatagcaaacctaacgttcctaaagaattcgttaaaggaatccgggctgccctctacgcttgggaaaaacatggactcttaagcgcagaggaaaattggcagaaaaatgtggacgtgcggaataggtgggattcagcaaaccccaggtttagatgggtacttagggggaagattaatcacctgaggcacatcaagggagaagccgatccagtttatattaagctggccagcaggctgaagtctcttgacaatacttactctttcgacccgaagttatccgcactgtccattacacaggaggtttcagtcttttcagaagggattacagacaagaaacacctggaaatcgccttcaagcatgcacagagcaaagggctttacccggatctaaacctgaagttttatgtgccgaacgaggctggcagttcaaatctccagaagctgtgctatggcctttcttctacccctcagagatgcttgacaatatgtctgttcgatagagatgagtcccagtacataaaatctatgggcggatcgagcagtgactatctggaccataataacaatgtctattccctcatactcccacacccagccttccgcacagagccagacatctgcatagagcacctttacgaggacaagtacctctacatgcccgactccaaggggcgtcggttttatagcaaaaatgaattcgacaagcacaactgttacatcaaggagcagaacatctttatcaaagccacctccaagtctttgattatcgacagcaatgtcattgatatctccaagaagacctctatcgcattagcaaagaacgaatttgctagtctgatctacacaagcacgcccccatttgacaaaatctcctttgacgggtttctcccactgttcgacaaaattcgcgaaatcaagaacttgttcaaatga

SEQ ID NO: 7769 - RNA, 1695 nt, synthetic construct
  source 1..1695: mol_type = other RNA
atggagatctcaagtgtgaaaaatttggatgatctggccaagtgtcttggacagtccaaaaaaaccctcgcctacttagcatatcatgctcccgtggataagaagtacaagacctttagcataagaaaacgttccggcgggaacagaacgatcacggcaccatgctcgaagctgaagagtatccagtatagcatctataatcagcttaatagcttctatcagcctaaaaaaagtgtgcacggatatgtaaaggacaagagcatcgttagcaatgcgagcatccacgtcggccaacgctggctgggtaaagtcgacgtcaaatcttatttcccttcaatcaccacaaagcgagtggtgggactcctgcgcaatgagccctttaacctgccaaacaagatcgccgctaccgtgggattgctggttacctataacggctacctaccactcggtagtccttgttcccccatcatttcaaacttaattacccgtcgcctggatgccaagttgtccgctctgtcacggggttataaatgctacttcaccagatacgccgatgacatatttttttccacaaaccgcaaggtcttccctcgggaacttattcaccacaacgaagatggcgtctctactatagggcataaattgaacgaagtgtttgaagaggagggtttcaccgtgaatactgacaaggttagcctgaaagacaagtcacaacggcaggtggtgaccgggatcgtcgtaaacgagcgaatgaatgttcctaaagaatacattcgggaactaagggcaatgctctattcttgggagaaacacggcttggaggcagccgagaaagactggctcaagaagtatgtgaacctgaatagaaacggacaggatatccccagccaaccgaggtacaggtggatggtgcgtgggaagctgaatcatatagccgctgttcgcggctctaacgatgaagtctatctcaagtacgcaaagaggctggctaggattgacaacacatttaagatcgatccaaaagccattactgcctccattgccagcgagattaaggtgcacattgagggaaaaactgacgccatccacatgagggctgctatgcacgctctccatggtgctggcaaatacacctctttaaagctgtctttcccaaatgaagacactgcgaagggagacggggagctgatcaaagcatgcaaagttatgagtagcagcaatcagacgcatctaactattttcctctttgattctgacgtggacaagacaactcgagagatgaaagggagtacacttgcctacaaggatcatggcaataatgtctactctgtggttatgcctaacccctcttttagaaatgacgaaaagatctgtatcgagcacctttacaccgacgaagacataatgaagaagacagaaaatgggctgcggatattcaagtccgacgagttcaataaaaagaacggactgcatattgaggagaaaggcattatacggctttaccccaacaactcaacattaattgtggattccaacgtcatcgacgtagagtccggcgagaacgtggcattgtcaaaagcgaagttcgcggaactgattgaatccaaaagagccccgttcgattcggtaagttttgacgggttcgagccactcctggatatctttgaaaagctgcacacagattacatcaaatga

SEQ ID NO: 7770 - RNA, 1392 nt, synthetic construct
  source 1..1392: mol_type = other RNA
gacgcggccggaggtttgcgtgggagaagccaggaaatctcccgatggacaaggcatacctcaattgttcttctgttagaactcgagactactgagctttgtgaagtcttaggcattaagacgtcgtatctgaactacctcctctataagttgaatgagggggagagatacgagagctttgaaattaaaaagcgcggaggcggtgctcgaaggatagatgcccctattaagccattgaaagtaatccaacgcaaactaggtgacttgttgaaagagatttactctccaagaattggcgtgtacggatacgtggagggaaggggcatcaaagaaaacgctgaggttcacttagggtgcaacgaagtttgccgaatagatgtgaaagacttcttcccatctattcacatcgggagagtcattggactgttcaaaagcaagccttttcttttccccgagcctctgagcgtcctgctggcacaaatctgttgcaaagatggagctcttccccagggggcacccactagcccagtaatttctaatatgatctgctggctgatggataaggaactctaccggtatgcccgtattagcggatgtcgctatacacggtacgccgacgacatctttttttccaccgtaaggaaacggctgtcgcggcgaatttgtagtgtcgagcattctgaatttgatttttcaatcgcactgtccccggcggtgatcagtataattgagaaacatgggttcaagatcaatgtccataagacatatatggctgacaaatcccagaagcaggtgctcagcggtgtgatagtgaacgaaaagctaaacgtggaccgtgagttcgtcctcaagctcagggctatgctacactgttgggagatggaaggtctggagaaggccgagaaaaagtttcattctaaattcgccaggaattacattgttccacccctgtttatgcaggtggttaggtcaaaggtggagtacctgggctatatcaaaggttatgacgatcccgtatacctgaaatacgccgataagctttccagactgcacccgcactacacctataacaagaggaaggtcgtggcccatggcgggaatttgatcagagtgtataccgaaggccccacagataagatccacttcaatgctgccttagagtggtttcggggccggggcgaatatgctagtctcggggttgtgttcgagcacctccctgaggcaaacggcggagactcactgatgaaacacgcaaagactatcagtaccgaagcacgcgccgaccggaaggtgttctactctataaaaatgtgccagaagctgatacgcaagctgatccgctcccaggaaagaatcaccgattttcttctgacgacattcggctggccttga

SEQ ID NO: 7771 - RNA, 1698 nt, synthetic construct
  source 1..1698: mol_type = other RNA
atggacgtgaatatccagaaatttctgaacatcgagtcaaaagctcagttaagcgcgtttttaggcatttccacagaaaagttaaactacttgctgttcaagctgccacatgaagagaagtacaattcattcgagattagcaaaaagactggcggaaaaagaatcattgatgctccgataaaaccgctcaagctgctgcaacgccagattgctactattttgttcgaggtttacaagccaaaaacaggcgtctatggctacgtgaagaatggtggcgtaaagaggaacgccgaggtgcacctcagaagtaaagtgctgttccgggctgatatcaagaacttcttcccatccatccacatcgggcgggtcatcggcttgttcagttccaaacccttctctttcccccgaaatattgccgtgctcctggcccaaatctgctgtaaggaagatgtgctgcctcaaggcagccccgcctctccaattatctcaaactttatttgtagggggctggaccgtgatctccttgagtacgccagatcggttagatgcaaatacagtcgatacgccgatgatatcttcataagcacctacaagaagtttatgcccggatctatctgcaaattggagcacgatgatggggtgggcttttgtaacataaacgatggactggaagacatattcgagacgcacggcttcagcctcaataagaacaagctatccgtggcatataagcataacaggcagatagctgcggggatcaagattaacgagaagctcaatgtagaccgcgagtatgtgctgaatttacgggccatgctccactcttggcggaaagacggttacgatgtagccgcagcaaaatataatgagctaaaacccaatccttcctatgcacgtgcgttcaaaaacgctgttcgatccaagctggagtaccttggatatgtcaaaggctatggtgaccctgtctatcttaaatacgccatgtggctaagccggcttgatgatgggtatacctttaacaagagaagctacgaaatggagaacaataagaagctcgtggtctacaccgagggcgttaccgaccagctgcatattcaggctgccaaaaattacttccgcgaaaagggggaatttatgcacctagactttcgtttcgatgataagtccgaagtcaacggagcacctgacctggagaaatacctgatccaggacagaaaggagcccaaccaagaattcaaggtttatctgttcgatgacgaccttaagaaagtcacaagcaaactcgacatcgccccaggtgaatcatctaggtggttcggaaataaaatttgggccgcattgacccctaaacctcagcatcgcaaggacgacgagttgttttgcatcgagatgtattactttgatgctgacctcgaaaggaaggactcttcaaataggcggatatacttgaactcggagtttgacgcaaaaggatttcacaacacagaaagcgtggtaaagactaagcccggttcaggactgatcgtggacaatgatgcttatagtatggtttccaaagaaaaggtgtctctgagtaagattgcattcgccgagaatatcctttataagaaacaggggtttgaagacgtgaactttgaagggtttcgcccactgtttgagctgcttcagaacatttacaatcaggcgtatctgcattga

SEQ ID NO: 7772 - RNA, 1845 nt, synthetic construct
  source 1..1845: mol_type = other RNA
atgtccggagaggccgaccagagaggtatgtcaccaggcatgcaggccgcaatcgaccggctcaatctcatgggaaccaacacccaggaggctctgttcagcggctttgctcagttgacttccaaggcacaactgtgtcagtttctagggattaaaactgctaagctgaattttctgctgtacaagcttaagcccgcacataggtacaaaacagagactatcaagaaacgcaacggggacgatcgattgctccgggttcctgtaccgctgctaaagcaaattcagcgaatcatcgcctctgagctcgcaaaggagtatcgccctcgacaacacgtgtacgggtatgtgaaaggcaaaaatattgcacagaaggccagaatacacgtcgcccagaaatgggtagcccgcgtggatctgaaggacttttttcccagtgttaatttcggccgcgttctaggaatcttccggggccatccctttcatttcaacgatgagctggctacagtcctgacccaaattgtcatggacggcaacgaactgccacagggcgcaccaaccagtcccatcatctccaacctgatttgccgctcgctggacttcgaactgaagaggatggccaaggaacatcgctgcttttacacaagatatgcagacgacctagtcttttctacaagtcttaagcggttatctccgcagatctgttccccagcggcccctgatggtgtgtcaatacaggcgaatgtgggggacggactgaggacgctcattgcacgccaggggttcacaattaacgacgccaagacaagaatattcgatcgctcaagccggcagcaagtcaccgggctcacagtgaatgaaaaggttaacgtgtcgcgggagtacgttagaggattaagggctgtcttgcacgcttggttcaagtttggtgaggagagcgctgcctcatggttctttgccaatcactacaaaaggaacaggcctgattggaaaagcactccagcggatttcagagaagtgattcgaggccgattagccttcatccgttttgtaaagggggctgacgataccacttaccttgccctggctaagaagctcgcgaaactggacgacggcttccagctgggtgtggaagaacagattcaggtgaacagcccaaggcttatgttgtataccgagggagttaccgacaccattcacttacgtcacgccctccaacggttcaaggcagacggacagtattctgatctgaatatcgactgggccgaccatagcgatagacctcgtggcgaggggaaactgtggcaaaactgtctgaacgatgctaagcgcgacgaattcagacaccagacacaggtgtacgtctttgatagggactccgatttcgctaaaaaggccgaagataaatatggcaaactgaaacatcacgggaacaatacgtactctctcgttctccctatccccgagcataggcaaggccgggcacagatatgcatcgagcacttgtacgtggatgatttcctttggcagcaggacgtgcagggacgtagactgtttgctcgggaagagtttgagcacgacggcaatcatgtgggaaatgttgaggtgatgtataggcaccccaaagccactaccttgatcgtggatactgacgtagtcggttatggttccctcagaagcaaacccgtagtgatgtctaagaagcagttcgccgacgcagtggaactgggcgtgaaaccgtttgacgccccttccttggtcggattccaaggggtcttcgatatgcttcgggatttaacgaagaaccttaccggtgaagtgaaagccgatgctagtgcgtttgtctga

SEQ ID NO: 7773 - RNA, 1779 nt, synthetic construct
  source 1..1779: mol_type = other RNA
atgtcaaataccactcaagcagccctttttaatgcattccccttcctgacatctaaggaacagctttgtcaatatttcggcgtgccaccgcggaaactgaatttcctgctatacaaattagcccccgctgacaggtataagacagtcgtgatcaagaagaggtcaggagctgatagacagcttcgcgtaccagtgcctctcctgaagcaaatacagaaaatcattgccgccgagttagcaaaagaataccggcccaggcagcatgtgtacggatatgttaaaggtaagaacatagcccagaaggctcgcattcacgtggcccagaagtgggtcgcgagaatcgatcttaaggactttttcccctctatcaactttgggcgggttcacggactctttaaaagccatccctttcagttcaatgatgaagtagcgacaatcctgacccagctggtcatggacggtaacgaacttcctcagggcgctcctacgagtccaattattagcaacttcatttgcaggagtctggacacggagctcaagcagatggctaaagagcaccgctgtttgtatacgagatatgctgatgatctggtgtttagtaccaatcttaaacggttgtctccccagatttgcagcccagcagcccccgacggagtttccatccaggcgaacgttggagaagggctgcgagctgttatacagcgccatggctttacagtcaacgatgttaaaacccggattttcgataacagtgcccgtcagcaggtgaccggcctcactgtcaatgagaaggtaaacgtgtcgagagaatacgtgcgaggcttgcgaatggtgctccacgtgtggcaaaagatcggcgaggcaagcgctagcgcttggttctttgaaaagcactataaacgcaatagacccggctggaaaagagctgaacctgactttagggagattgtgcgggggagattgaccttcgtgcgctttatcaagggtgcgaacgacactacatatctgaccctggccaaaaaactatcaaaactggacgatggctttcgcctgggcctcgatgaagagattcaactttcctctccaaggttgatggtgtatacagagggcgttactgatactatccacttaaggcacgcactccaacagttcaaggcacgaggagtatacaacgacctgaacatagattgggcagaccacgccgatagacctcggggtgagggcaaactatggcaaaattgcctctcagacgcaaagcgggatgaattccggcatcagaatcagatatacgtgttcgaccgcgatagcgactacgctaaaaaggccgaggatagctacggaaaggtcaagcaccatgggaacaatgtgtactctttggtcttgcccatccctgagcaccgtcgtggcaggaagcagatctgtattgagcacctctacgaggacgcctttttatggcagtccgacgcccagggaaggagactattcccgcgagaggactttgatcaggaagggcatcatacaaaagggctggaggtcatttatcgtcatccgaagagtgccactctgatcgtggacgccgatgtactggggtacgggccactgaagtctaaaccagtcgtcatgtccaagaagcagtttgccgacgccatcgaccaaggtgtcaagcctttcgacagcccttccctcgaaggtttcgaaggggtgttcaatatcctcagagagctgaccaactccctggcaggagaggttaggtccgatgtgatcgacctggtgtcatga

SEQ ID NO: 7774 - RNA, 1824 nt, synthetic construct
  source 1..1824: mol_type = other RNA
atgtccagagaaacagagcagccagatcgcagggtcgccggattgtctgccaccattggtaggctgaaccggatgggaaccaccaatcagaccacgctcttcggctcattcttagaggtgggcagtaagcaggacctctgcgcttttctggggctgagcgaaagcaagctgaacttcttattgtataaactgaccagtgccgaacgatacaagactgaggtcattaagaaacggaacggatctccgaggaccctgcggatccccattgcaccactgaagaaaattcagaaggttattgcaggcgaattgagtaatctctaccggcctagacagcacgtctatggatacgtaaaaggaaagtcaatcatacagaatgcccaggtgcaccttgctcaaaggtgggtggcccggatcgaccttaaggactttttcccttctattaatttcgggcggacacatggcgtgttcaagggccacccctttcactttaatgacgaggtggccaccctcttggcccagatagcgacagaccagaacgaacttccccagggtgctcccacttccccaattatctccaatttcatctgtcgatcactcgacctcgaactgaagcagatggccaaagaacaccgctgtttttacaccagatatgcggacgatctgatattctcaactaaccttaaacgtcttagcccccagatctgcgttcctgcagcaccagaaggggtgagtgtacaagcgcatgtcggcgatgggctaagagccatcatcgagaagcaggggtttagtgtgaacgacataaaaacgcgtatctttgatcgctcaggacgccagcaggttactgggatcacagtaaacgagaagttaaatgtatccagagagtatattcgtggcctgcgatccgttctccacgtgtggagcaagcatggagagccccatgctgcagcctggtttttttctaatgagtaccaccgtaataggccaggttggcggcctgacccccctgattttagagaggtgattcgcggcaagctgggctttgtgaggtccgtcaaaggtgctgaagatacgacatatctcacactggcgcgcaaactcagcctgttggacgacaacttcaagctgtctcaggcagagcaacagcaagctgagtctcctaggctcatggtgtataccgagggggtgaccgatgctatgcatttgcggcatgctctacaccagtttaaggcagacggcctgttcactgacctgaacattgattgggccgatcacaccgatcgcgctactggcgaaggaaagctgtggcagacatgcctatcagatgcaaagagggaagagtttagacaccagacacaaatattcctgttcgaccgagatagcgatttcgctaaaaaggccgaaagtaaaccagggaagttgaaacaccacggaaacaatgtgtactcgttttgtcttcccgttccggctcatagggtggacaggacacaaatctgcatcgagcacctttaccatgatgagtttcttttccaaaaagacactcagggcagacgcttattcgccagagaggaattcgaacaagatggcaatcatgttcgacatgaggatgtcttttgtcggtactccaaagcgactctgatcgtggatagcaacgtctcggggatcgggagcctcagaggaaaaccggtggttctgtctaagaaacagttcgccgactatgtcgagcaagccgtggcccctttccaaagcccatccctggacggctttcagggtgtattcgaggtcctgcagcagttcgtgcacaaccagattcagggtgacgcatga

SEQ ID NO: 7775 - RNA, 1776 nt, synthetic construct
  source 1..1776: mol_type = other RNA
atgggaacggacaatcagcagtcaatgttcaattcattcacatctctgaccagcaaggtgcaactgtgccagttcctcggaattaccacaactcggctcaattttctgctctatgggttgccatgcgaaagacgctataaaactcacgctatcaagaagcgcaacgggggagaaagacgcatccgcgaaccaatccctcctcttaagaagatccagaagattattgctggagagctcgcaaagcagtatcgccctaggcagcatgtctatggctacaccaaaaacaaaaacatcgtgcagaaagcccgtgtccacgtcgcccagaaatgggtagccagagtggatctgaaagacttttttcccagtgtgaactttgggcgggtgaagggacttttccggggccatccatttgattttaatcatgagatagccacactactggcacagttagtcatggacggaaacgagctcccacagggcgctccaacctctcctatcatcagcaacttcatttgtcggagtctggattatgagctcaaaaggatggctaaggcccatagatgcttttacactcggtacgcagacgacctggtgttcagcacatcacagaaacggctgtcccctcaggtgtgtagccctttggctgccgacgggataagtgtgcaggcagttgttggcgacggactgagggcagtggtagagagacaaggctttgtggtcaacgacgcgaagacaaggatcttttctaagtcgagcaggcagcaggtgactggcatcactgtgaatgagaaagtaaacgtatccagggagtacattcgtgggctccgtgctgttctgcacgcctggagaaaacacggcgaggaggctgccgcctcttggttctttgccaatcactacaaacgtaataggccccactggaaaagccagcccgccgatttccgcgaggtgattcgcggccgaatgacctttgttcgattcgtcaaggggggggatgacaccacctaccttacccttgcgaaaaagctggcgcaactggatgatggctttcagctcgacgcagctgaacagcttcaggcgatgtctcccaggttgatggtgtacacggaaggggtcacagatactatacacctgcggcacgctctctccagaatgaaaggagacggaaggtatgttgatttgaatgtggactgggctgatcactctgatcgaccccggggggaagggaagttatggcagaactgcgtgaatgatagtcggcgggaggaattcagacatcaaattcaggtttacctgttcgaccgcgactcagatttcgccaagaaggcagaggacaaatatggtaagctgaagcatcacggtaacaacgtgtactccctcgtattgcccattccggagcaccgacatggccgacaacaagtttgtatcgagcatctataccgggatgaatttctgtggcaaaaagatgcacaaggcaggcgcctgttcccaagagaagacttcgacctggatggtcatcatatcgggggtttggaagtcctataccgacaccccaaggccggaacgttaattgtggactccgatgtcgtcggctatggcggtttaagaggtaagcccgtggtgatgtcaaagaagcagttcgcagacgccgtcgacttgagggttgaaccttttcacgcgccgtcctttgctggcttcgaggccatattcgacacactgagcgaactgtcccgcagccttggaggtggccacagaccagaggccagtgatctgctttga

SEQ ID NO: 7776 - RNA, 1854 nt, synthetic construct
  source 1..1854: mol_type = other RNA
atgggtactttaaatatcacctcccttctggatgaatcagtacagccccccctgatctctccatttctcctgctgagatctgtcgaagacctgtgttcattcctggatatcagccatagaagactcaactttctcctatatgtactcactcccggcgacaggtatagatcttacgaactgaagaagaagaaatcgtctgggactcggacaattaagtcacctattaagcctctgaaagaaatccagcggaggctcgccaatgagctgtctgcggtatacaagacacctctgaatgtgtacgggtatgtcaagcaccgcgacgtggtggataaggctaagcaacatgtgggacagaggtgggttgcccggattgacttggaaaacttctttggaaccttcaactttgggagggtccgtgggatgttcagagccaaacccttcaatttcccagactcacttgctacagtgctggcccagatttgcgttgacacgaacgaactaccacagggagccccgaccagcccgataataagtaatattctcttctggcgcctggatgcccgactgcgaagacttgcaagggagcaccgctgcgtatacactaggtatgctgacgacttagtcttttccaccaataagcgccatatgtcctcaggaatttgtaccgtgctggatgagctttccgagactcctacaatcagggtcggcgaaactcttcggaaggaaatcgagggagaggggtttaaggtaagcgacagtaagaccagactcttcggtcgcaccgcccggcaacaggttacaggactaactgtgaatgaaaaagtgaatctgggccgcgagtacgtgaaagaactccgggctattctgtacgcttgcagaaaatttggggtcgaagcagcaaaggagcgcttcatggccagccactatggcaaaaacgttcctcctggcaaggccgcaccagcattcgcagagataatccgaggccgcgttatgtacgtgggcagaatcaaaggctattcttccagagccttcttggctctcgccaggggaatgccaatcctcgatcccaacttccgggtgcctgaagaacacgctgcgcccagagcgtacctgtttacagagggggtgactgactatttgcatctggacgccgcccttaagcggttccgcaaagccggcgaattcgccgatgtgaccgttgagtgggacgatcatacgaaacgggagcaaatgggcgacaaacgtctcctgcagatctgcgatgacattgcaaaaggccctaagcaagaccggctctgtattttcgtttttgatcgtgacgtgccagatacgatcacaaaagccgaggcccctgacggcagcccgaagttacgaggtaacggagtcgtgtccatgtgcctaccggtgccaaagcaccgagatcagtcgagtcccatgtgtattgagcacttgtactccgacgagttcttataccagtatgatgctgacgggaggcggctgtttgcccgtgacgagtttttgccatcaggtttccacaagagtgaggattttcttagccggcagcccaaaaccagcttaatcgtggatagcgatgtcgtcctgagtgcaggagaacgaaggggcacctccgtggcgttgtctaaacgccagtttgcaatgttcgtgaacctgcagacggcaccatttagtgagccagaccttagcgggtttaggcctttctttgaagctctgagacaattgatggaggctcacgaggctatccaggcaatgcccgtcacaccccccgctaacgatcgtgggcagagggttcccccacctggaacaggtgcaggtgcgacccagatagaggcctga

SEQ ID NO: 7777 - RNA, 1824 nt, synthetic construct
  source 1..1824: mol_type = other RNA
atgggaactcccaacttgaagtcactgaattttgaaccggagcaggccgcattaattcatcccttcttgctcctccggagtgtggacgcgctatgtcagcacctgggagtgtctaaacgcagactgtccttcctgctgtacgttctccccgccgcacagcgttatagaagctttgagctgaagaagaggaaaagcaaggctacccgtaccatcaaaaatcctgtgaaacctctcaaagagattcagcagcacctggcaaaggaccttttggacatttatagagctcctctaaacgtatacggctacgtaaaggaccgcgatatcgtggacaaagctgagaggcatgtggggcagcgttgggttgcaaggatcgatttagaaaacttcttcggcagcttcaattttgggagggtgcgcgggatgtttcgcgcgaagccattttatttcccagatgcccttgctacagttctggcacaactctgtgtcgactccaacgaactaccgcagggggcccctacttcacccgtgatctctaatattttaatgtggcgactggacgccaggctgcgaaggatggcgagggaacatcggtgcgtttacacacgttacgccgatgacttagtcttctcaaccaacacacgaagaatgtccagcggaatctgcaatgtgctcaacgccgattctgatgccccaattgtgcggccaggtgatgccctcttgaaggagatcagagacgagggcctggcggtgaatgactctaagacacgcctgtatggccggactgagcggcaacaggttactgggcttacggttaacgaaaaagtaaacctcgatcgcgattacgtcaaacaactccgggccgtgctgtatgcctgcagcaaagtcggagtcgaggcagctgctgagcgctttttcgcctcgcactatcccaagaacgtgcctcctgggaagagagtgccccaattcgctgacgtgattatggggagggtgatgtatgtgggtaggattaagggctattccagcggagcttttctcgctctggcatccagactgaagatcctggtccctgatttccgagtcccagagatgccagtcaccccgcgggtgtacatacacacggaaggcgctactgactatcttcacttgcacgccgccctgaaaaaactgcagtcgggcggtgagtttacagacctttcagttggctgggacgaccactccaagcgtgagcagcttggcgataagagactgctccaactgtgcgaagatactgcaaatggtcccagacaggaccgactgaacgtattcgtgttcgatcgcgatatcgcagacaccgtgaccaaggcagaaagggagggggagcctcgagtgaggggtaatggagtggtgagtctctgtcttcccgtcccagctcatagacccgcgagttctctcatgtgtatagagcatttgtacaccgacgaatttctgtaccaacaggacacggccggtcgccgcttgttcagtagagaggaatttcggccagacggctttcataacactgaggattacctataccggcagcccaaaacaacattgatagtcgattccgacgtgcttgttaccagcggcgaaaatcgaggaaaatccatcgccctgagtaagaaacagtttgcccggtacgtctcagaacaggtagagccctttgctgccccggatctgtctggattccggcctttcttcgagaggttaagacatattatagaggcacacgaatttctgcacgacgttccaaagcgcggcggggaaggaagcgatatctctcgggtagccgtcgataccccttga

SEQ ID NO: 7778 - RNA, 1629 nt, synthetic construct
  source 1..1629: mol_type = other RNA
atggccaaagtggagctgcgcattcttacatggctggcttggggtttaaatgaacagaggaaatacaccactttctccatcgctcgcaggaatggtagcgtcagacagatcagtgcccccataaagcccctcaaggagtttcagcaggctctggcggaatctctgttggagggctatcgggcgccagctcacgttcacggattcacgaccggtcgtggaccccgaactaacgcagaggtccatgtcgataagttccacgtgttcagggcagacctcgcagacttcttcccgtctatcacctacaggcgtgttagggggctgttcagacgatggcctttcgagcatccggacgatctcgccaaagtcctggctaggttgtgttgtcaccaggacgcccttccacaaggggcccctacatcccccatcattagtaatttcatttgcagacggatggatcgcgagctggcacagttagcggccgcagaaaggtgccatttcagtagatacgccgatgatctcgttttcagtactaatcaacacctgtttccccccgccatcgggctagtggaggaaggaacggccgtggcaggggatagacttaagggaatagtgacaactaacggattctcaataaatgccgacaagacgactctgacacgcgaaacccagcgccaacgcgttaccgggatcgtggtgaatgagaagatcaacccccccagagaatatgtgcggagcctgcgttcactcctttacatatggaaaacatatggacaacctgccgcagaggccgctctggctaagcatgatcctccttctggcaaccggccaccgggcaaatccctccctagattcgaacaggtagtgagaggaagggtgcagtatgtcggctctctgaaggaatttagaaaccctacctactatcgattggcaaaacaactgtccgaagtagacgagggtttctcaccacctccgatgcctatcattgaggctaacctatacaccgaaggcccatctgattggaggcatgtcctcgccgcccagcgccattttaacgagttgggcgagtttaccgactttcacctcgtgaaaggcaaggaggctagccgagaaggtgaaagccagctgcggaagttcgctgagaggctgggggaacgcgaacagtcagagttcagtgtgtgtttatttgacagcgacgtaaaacccgctcttgaagcggtgggtccagatgggtggcggcgttacggacctcgagtagtggctgttggccttgccgtcccagcagccatggatcgccgggaacccctctttattgagaaactgtactccgaggaagtcctgaaaacaaagctggccaatggccggcgagtgtatctgggcactgagtttaacccaaagtctggccaccatttagaggaggactgctccattgtaggggaaggcaaggagtttattcagcagtccgttcacgcctttgatactcacagcgttatcagcctaacaaaagtggacttttcgaaggcggtgtatgacgacccagagcacttcggaaccgagatctttgaggggtttcggcccacctttgagcggattgatgaagcattgagagactcatgggaggtcttgcagtga

SEQ ID NO: 7779 - RNA, 1659 nt, synthetic construct
  source 1..1659: mol_type = other RNA
atgctgacccaccagctgagagctaggcggcgtgaaaccatgagatgccctgcgcagtatcaagaacgacagaaaaggcatgatagagccgattactattttatgaccctgaactccgcttactccttctcttccctagctgccgtactcggcattactcctaagcagctcggctattacctgcacaaacgtccattggcgagccagtacaaacagttcaagatcccgaagaaaagtggggattatcgagtcatctctgcaccggccacaaacctcaagctgatccagaagtccattgccaagcagctgaacgagatcagattatttaagccttgtgtcaatggcttcgtgccgaagagaaacatcaggaggaacgcatctatgcatgtgggacggcgatttattctcaacattgacctagaggactttttcggctcaatcaccttcgcacgcgtctacggtatgctgcaaaaagagccatattttctagcacagccagttgccgcagcaatagctaaagcgtgcacattggatggagtgcttccccagggagctcctagcagcccagtgattactaacctgatttgtgccaagatggacgccgaattaacaaggttcgccgaatcgaatcgttgtaaatatagtcgctacgccgacgatataactttcagcaccactcggcccactatgccctttgcctcagctcttaaagacgccgagggaacgactgtatacgagctcaatccaaccctgagagacatcatcgagacgaatggttttaagatcaacgaaaagaaagtccgcctgcgcgacgctactgctcggcaagaggtgaccgggctcatagtaaataaacgcgtgaacgtgaagcggcgggcagttcgcgagattagggcaatgcttcacgcatggagaacatttggcttgcccgccgccgctactatgggaaaggacaaatacgggcttaaaggcaactttgaagcagtcctccgggggaagatcgagttcgttggtcacattcgaggacggcctgaccccctttttagaaagctggccgaccagtttaattccctgcccgtggctgggcgaatcagaacggtgctgacacctgaagagattgcacgtaatgcgacctggataatcgagtcggatggtgacgtgcaagggacagccttctttgtggacggggtaggcttggtcagttgcagtcactgtgttgggcccaatgcctatatcttgcatcccacagaccctacaaagaagcaccgcgttaaaatcattaaggaggatagccaccgggatattgcgatcctggagtgccctaatggtttcagcgtaccaggcttccagctgcatgctgcctctatagtcaaagatggcaccgagattgtgctcctgggttatcccaatcatagggctggaagcaccatacgcgtggaggccggaaaattgctgaggaggatagtcagttctgccgttgagcactacgaaattaccccaaagattatcgggggaaactccggcgggccaattgttaatagcgattacgaagtggtgggcatcgctgtgaggggcctttcaggcaaggccaagttctctgatgtggaattcatcggcatcaactcctcagaactgaaactcgtcttatcaggaaagtga

SEQ ID NO: 7780 - RNA, 1554 nt, synthetic construct
  source 1..1554: mol_type = other RNA
atgccactcaataagatccacaatctgacaggcctggcctacttattggggtgcagagctcaacagttaggatattatatctacaagcgccccttgatcacacaatatcgtacattcgaaatccccaaacggcgggggggtacgagaaccatagcagccccgagtacaaatcttaaaattatacagcgcaacctggctaaggagctagatgcactgttcacctttaagtcctgtgtcaacggctttgtgaccgatcgtgacatcaagaggaatgctacaactcacgtgggagaacgcttcgtcctgaatattgacctcgaaaacttttttgggtcgatcaactatggcagggttttcggtttgctgtcaaagcccccacactccttaaatcgcactgttgccgccgccatcgcaaaagcctgcacactgaacgatgccctgccacagggagctccaacgtcacctgtgattagcaacctaatttgcgccaaaatggatagcgaactgctcaggtttgccgctgccaataggtgcaagtacactcgatatgctgacgaccttaccttttccaccaaccggacgagtatgcctttcgccacagccagcaaggccgccgacggaaagacctattgtgagatcaatgcctcacttagaaccatcattgagagtaacggctttcagataaacactaacaagctgagactgcgggataatacagctcggcaggaagttaccggactcattgtcaatgaacgggtgaatgtgaagcgacgcttcattcgtgagactagggccatgctccacgcatggcgcaagttcggactgcttgctgcggccgctgagcataaaaacaagttcggcggtggtactgcgtttgaatcgattgttcgagggaaaatagaattcatcggccagattagagggcggcctgacttggtgttcaggaggctggctgttcaattcaacgccctcaccacttctggcaaaattagaacagctctgagccctgaggaaattgtaaagcaggcaacgtgggtcatcgagcattccggtgatgggcagggcaccgctttctttatcgagaagtacggcctgatcacctgtgcgcactgcctcggatctaacccatacatttatcatcccgagaaccctgcaaagaaaatcgcagtcactgtactctctcaagataatcatagggaccttgcagcactcgagatccctgcggagctgaaaaccatctcaccgattcctttgtacaaggggcccccactaaaagacggcgcatccataaccctgtgtgggtaccccaaccacttcctggcgaaacccattagaatcgagcagggcaagctcatccgaacatttcccaaaagcgcagtgtcttacctggaggtcaccccgaaaatcataggtggaaatagtgggggcccattagtaactgaagacttttctgtggcaggggtggctgtgttgggccttagcggaagcgtgacactgtcccaggccgagtttttcgccgtcaatatagccgaattggtggcttggcttaaatga

SEQ ID NO: 7781 - RNA, 1560 nt, synthetic construct
  source 1..1560: mol_type = other RNA
atggacctatccaaagcctatgacctgacgtcgctggcgatcttgctcgactgtagcgccaaacagttgggctactacgtgtataagagggatctggctacacaatacaagcagttccagatcaagaaacggagtggcggagcaagaattattaaggcacctgccacaaatctcaaaattatccagcgctccatcgtgagggaactggaacggttagtgaggttcaaaccgtgtgtgaccggcttcgttaagggaagagatattaaaagaaacgcagtgctgcacgtggggcagcgacatgtactaaacgtcgatctgcaggacttcttcaatactatcaactatggcagagtgtatgggctgctgaccaagaaaccttacggcatagcccccaaggttgctgcagctatcgccaaagcttgcactctagacaacgcactaccgcagggagctcctactagtccaatactgagcaatttgatctgcgcaaagatggatgctgaactttcccggtatgccctcgctaacaaatgcatttacactagatacgcggatgacctgacctttagcacgaatcggcagttcatgccaatggcggctctgaaccttaattctgacggaaccccaatcaccgaattggcacgaccccttcgtgagatcatagaggccaatggattcgtaatcaatgagaggaaggtgcggttatctactcgcggacgcaggcaagtcgttacgggcctggtcgtaaacgagagagttaacgtacgtagatccgcaattcgggaagcgcgcgcattgttacacgcgtggcgaaaattcgggctcgtgaaagcctcatcagtcttcaacgagaagtttggaggggctgggagagattttgaggccgtcgtgcgaggtaagattggcttcatcggacaaatccgggggcgcccagacgagtcatttaagaaactcgccctcgagttcaataagcttactgcaaacgggaagatcaggacagcccttagtcgtagcgagatcgctgcccaggctatctgggtgatcgaacatgacggtgattcgcaaggcacagccttttttctggacggtgtgggcattgtcacctgtgctcactgcctgggcgagaacccttttatataccatccctctgaccacaccaagcgctttaagctcaaggtcagggccgaagataagcaccgcgatctcgctatactgtacgttcccgtggaactggaaaacgttgtccccctgtctgcctacaagggcgtcgccctcgcaaacggagctgacgtttcactgtggggttatccaaatcatttcgccgccacacctattaggatggaacgaggaaagctcatacggtcctttgtgaaatctgcagtctcctacttagagattagccctaaaatcattgggggtaatagcgggggacccgtgctgaatgatggctatcaggtgattgggatcgccgccgtagggttcggtggctctacaaagtttaccggtgtggagtttatggccgtgaatggcattgagctgagtgcgttgcttagcaaatga

SEQ ID NO: 7782 - RNA, 1605 nt, synthetic construct
  source 1..1605: mol_type = other RNA
atgcgcgtcaatagtaaacaggacctggcctgtgcaataggaattcccctggagctgttagagaggcgcgcttttggaataccccagcacattctatacagtcggcatgagtatcctaagagggacgggagtaccagactcatctattctccacactggcccctgcggcatattcagagccggctggccaacctgctagatgaaatctatgagccttcctcaagagttagcggcttcgtgaagggaagggggattagatataacgcgtctctccatgttggcaagcgcttgctgctgaacttcgatctgagtgatttctttcctacaatccattttgggcgcattcgcggtaggcttcgtgctcggccttatcagttaaatgccgttatcgctacaaccatcgccagattgtgtactcttgacggaaatctgcccataggcgcaccctcttcaccagtccttgctaacatcatctgctcccacttagacggtctactgacgaggctggctcgagagcacgggtgcttttactcccgctatgcagatgatattaccttctccaccaataggagatcatttcctaactctctggctacagtggaccacgagaatggtttagccgcggtaggcgccctgatctctgctgctgtgaccgaggcaggatttatcgtgaatcccaggaagacgaggatcctggacaaatcaagccggcaggaggtgagcggagtcgtgattaatcagttcttgaatgtgccacgtagctttatgcgagaaattaggggcgctctcaacgcctgggagaaacacggacacattgcgtctgagcaatacttcaaggaaaaatacaattggcgatccagccaatcatttgagaaccacctgagagggcgaatacagcacgtcattcatatccgtggcagcgacgatcttgtggtctggcgcctcgttaaccgtttcaataatcttccggatcgggcccattcttcgatctcctatgatcggccgaaggacgagcgggatagactgagcctcgctgtgtgcagggtcgaatccggtaacgacgagcttatggaatacaaccagggttcaggaataaagcttcccaacggcaacgtcttgaccaacttccataacatcgaaatctgcgggactgtcgcccctataatcgagatttacttgactgataacgcaccagttcccgtaccaatgcgggtactcaagcatgacttcgcaaaagacgttgcaatcctggagcctatcgaccctgaatggaaaatgccaatcgccgcagcctcagccgaactctcgttctccgaatgtaaggtgggtgacgacgtgaaagtgggcggcttcccgagttaccagttgggcgactcctgtcaaattgcaactggggaggtgcgcgccttttccaaaattgaaggaatcacatacttccgagtgtctgtccccattgtaaagggcaatagcggcgggccagtgtttaatattgatgggcaggtggtggggattgcgagtagaggcatagatacacacgagatcactaacgccgcctttaatggatgcctcgaactcttcagatttgaaaagttcctgcaaagctga

SEQ ID NO: 7783 - RNA, 1221 nt, synthetic construct
  source 1..1221: mol_type = other RNA
atgaagttccccccgacctcccctatcctctctaatctgattgtcatgaaaatggacgggcaattaagcaaactcgctaaagataatctctgcttctacacaaggtactgcgatgacatatacttttctaccaatcgaaagaagttcccccaaaatatagcttttttcgatcattcctctgataacagattttgccaaattggtggcgacctggagaagatcatcaaatctaacgacttcattatcaacgagaagaaggtgtatttgagtgataaatcaaacaggcagtttgtgacagggcttgtggtgaatgagaaaattaacgtaaaccgcaagtttatcaagaacatcagacctattctgaaaaaactgcagaaggatgagaacttcaagaaagagtatttcgagaagtttaacaagaacatcctgagccagctgcgagggaaaattgagtttattggcaacattaggggttacgatgatcccgtttatagaaaatatgccctggccttgtccaagttggatcctagctacatcttcaacaagagaaatctatccttcggcgatggacagcttgtcgagatttattgtgagggcattacagactacctgtttctgaaggagtacttgcgcctatttaaaaataggggaatgtttacggacttggaaatacggtttcgggaggactccaactttactggcggtgacacccagctgctggacgcatataagaagattcagcagatgaatagtagcctgaataaccatctcactatctttatcttcgacaaagacaaccaaaacatcatcaagtacttcgaaaatctggaaaacgaactcgatggcctaaaacacctgtttctgccatgtccagatggatactcaaatagcgagtactgtattgagcacctgttcaaattcgaggacatcctgaaggttatagacaacgaaaatcggcggatctacctcaagtcagaatttaacagtaaggggttccacgaagaagagaatcttatatacatgcgtatgaaccagaaaactcttgtcgcggacgacgaagtgctctgccttcgcacccagaaaaatgtggccctttcaaaagccaatttcgcagatttagctacgggaaagtatttaacactgctcgacctcagcaatttcgaaaagctcttcttggaaatcacctatctgaagaatgagttctataagtcgccacagtga

SEQ ID NO: 7784 - RNA, 1536 nt, synthetic construct
  source 1..1536: mol_type = other RNA
atgcctaaaaaggatgggggcatccgccaattgtatgttcccaaccagctgattaaaaagattcagaagcagatcttcgatgatctgcagccaatatactcgccaagagcatgtgcatttgcctatgttaagggccgaaatatcaaagagcacgccaagaaacatgtcaataagcggtggattcttcgcgtcgacctgcaagatttttttcctaacatccattttgggagggttagaggcatattcaagttactggggtgtaacgaagaaatatccacctacctggctcagctgtgctgctacgagggtaaattaccccaaggaacatctacgtcgcctctaatcagtaatattctcgcatccaaaatggataggcagttgtccgagatggctaaacagaatcagtgcttttacactcgttattgcgatgacctgtacttctcaaccaatcggaaattgttccctcagaacttagcctttttcgacaacagctctgggaacagattctgtcagcttggtgaagacctcaagaacattattgactctaacgacttcattgtcaatgagaagaaagtgtacctttccgataagagtaatagacaattcgtgaccggactcatcgtaaatgagaagctcaacatcaataggaaatttgtgcgttctctaaggcccgacttgaagaagctaaaggacaacccgaactacaagaatgaatacttcgagaagtacaacaaaaacctgctggccaaaatacggggcaagatcgaatttatcggctacatccgcggatatgaagatactttataccgaaagtatgccctggagctgagcaaactggattccagctacattttcaacaagaggaatcttagcttcggggatggaaatttagtggagatctactgtgaaggcgtaacagactatcttctactcaaggagttccttaagtttttcaagagtaatgggatgttcacagacttggagattaaattccgggaggattctaatttcactggaggtgactctcagctgctggatgcctacaaaaagatccagcaaatgaatagcaacctcaatagtcacctgacaattttcatctttgacaaggacaatcagatcatcgtgaagtactttgaagctctgaagaatgagctgaaaggcctgaaatatctctttcttccctgtccaataggctatgaaaagaaagagtattgcatcgaacatctctttaagttcgacgatatattgaaggtggtggacgaagaaaaccgccggatatatctcaaggacgagttcaatgcaaaaggatttcacaacaatggtgagtgcatttatatgagaatcaaccagaaaacccttattgcggatgacgaggtcctctcactgagcaatcagaacaacattgcgctgtcaaaatccaaattcgctgaactggccacgggcaaatatttgaaggagctcgatctgagcaactttgagaaactctttatcgaaattaccaacctgaagaacgagttttacactctgtcacactga

SEQ ID NO: 7785 - RNA, 1590 nt, synthetic construct
  source 1..1590: mol_type = other RNA
atgaaacggattaagaatctcacagccttcgagagacaagcactcacagaaaaagacatatgttcttacctgggcgtttacgattctgaagtgaataagatcattcggctgcctactaagtacaaatacaaagtgttcaccatccctaagaagaacggcgcccaacgaaccattcaggcccccacgtaccgcctgaaagagatccagaagcgcatcagtatcctgctgtgcgacttgtatccccccaagaagtctgcgtccgcttttattaagaaacggggcatttgctacaacgccaacttccacataaacaacaacctcattctgaatatcgacctggagaacttttttcccagcattcattttggacgcatattcggtttgctgaagtccacgccttataacctcagctttatcgtatccaagatcatagctaatctctgttgtgtagacgggagactgccacagggagcgcccagttcaccggttattgctaatatgatttgcggtaaactcgacgcccagctgtacaaaatcgcaagagagaatcagtgcctttacacaagatactgcgacgacatcactttcagtaccaagcagaactcttttcgaggaattgccacgatacacgatgatgaattcgcgttggtccaactgtccgataagctggaagatatcatcgaagacaatggcttctatgtgaacaaggataaggtgcatttcgcctccaagaagagcaggcaatcgatcactggcatcgtggtgaatgaaaaaatgaacgtccgccgtacatatgtcaggaatctgcgtagcgctatttacaaaatggagaaagatatcgacgcagccgaatccgagtatatcgcaaagtacaagaagagtatgaattatgcttcctcatcttcgatttttgaccatatctcagggaaactgtcttatctcaagatgattaagggggacaaagataaaacctacaagttgcttaaacacaggttcgatctactactgggcaaacagagcttcttttttagcactcaaagggaacagctcaccgccgcgatatgggccattgaggacaaaaacaccatagagactggtactggctttatgttaaagggcgtcggcatcataacatgcgcacatgtcattcgagataacccttgtgctattttagacaccaggccaggcgctccccttcgcaagatcgacatggaaattattaagagagacgaggcactggatatagccattctgaggccactaggagtggacatcagaaagtattatgctctggagaaatcagacgccgagttccacaatacaccagagcagttgatcttggccggatatccggggtatcggttaggacacacccttagcatcaaagagacatactgtatttctcaccgggtggagcacgccatccagctgatcgaactctccgatcagatccataaggggaattcaggtggccctgttctggatagcgagcttaaagtggtggggatagcagcaaaaggaggggaaccagggcagcaggatctcgctatccacattggtatgcttagcagtttagttatccggggatga

SEQ ID NO: 7786 - RNA, 1674 nt, synthetic construct
  source 1..1674: mol_type = other RNA
atgagcttgaaaccatttgcgaatctgcggcagatcgccttcgccttgcgaaggaattatcgaaaacgtttcgtgtacattgcgtacggactggcgccgggcgctagatacaaggagttcaccatccctaaaaagagcgggggaacaagacggatctgtgctcctcgtatcgcactgctgggacttcagagggacatcttaaggctcctggagtcagattatcgcccgcgggcacacgtccacggttttgtcggggggcaccaacgctctatcgtctcaaatgccagacagcatgtgggaaagaggtgggtgctgaacatcgatctggaagactactttgagacaattcattttggacgcatacgcggccgattaatggctcccccatacgactaccctgaagagatagcccaatttatcgctcacatagcctgtttccagactgaaaaagaagtggagggctctctgaggactacccatgtgcttatgccgggcgcagccctaagccccattttggccaacatcgtgagtgacaagctcgacgccgaattagccagattttgccgccagttgggatgcacgtacactaggtatgctgacgacattaccatctctagtaaccgaagaacatttcccgctccaatcggccggttcgctaaccctgacagtcacgacgattttatcctcagcgacactttccagcagatgatcgaagataatggcttccgtataaaccatgcgaagacgcgactcctgggagccgcctttcagcaggaggttacaggcctagtggtcaacgagaaagtgaacgtgaagcggaagtttgtacgcgacgtgcgggccatgttgcacgattgggagtttaacggttatgctgcagcttccgccagacactttaacgataaaagaccagataggggcaggctccccgagcaagaggctactaacttcgagtgggtgcttcgcggtaagattgagttcataaggcaagtgaaagggtccactgaccaggtatttcgcggcctggctgcaagattcaatgccctcagttcaggcgggcagttcagtattcccttagttgaagatagcgaggtgctcaacgcagccgtgtggtatctggaaaatgacacagacgggggttccgttggtacatgcttcgcagtagccgagaatttgttcgcgacctgtgcccattgcctgggaccaaatcttaggatttttccccggcaatctcccgccttcgccatggaggccgatgaggtcgcgcgtgatgaacacaatgatctggctctgattagactgaggaccccaatgccagccttcaatcctgccgccactctgcagatggcttccactgcagaggccggtgcacttggcattcggtcagctgttcaggcagctgggtacccttccaatctcgacagcacctctctgaccatcagagatacagaagtcacagggtttagccggcagaccttcgacggcacccctgctacgtcggataacgtaatcgcacttctgtcagggacatatgaaggaatgtccggtggccccgtcctattttctgggaaggtggtcggagttattgttcgaggccccaacgacgatgaccggaccattcctttcctcgcagtgcgctccgaattcgtcgatgcactgctcgcaaccctttga

SEQ ID NO: 7787 - RNA, 1605 nt, synthetic construct
  source 1..1605: mol_type = other RNA
atgacttatatcgcttacggattagccgtgggggcgcgttataaggagtttaatatccccaagaagaacggggggactcgcaggatttgtgctccacgaatcgccctattggaactgcagcgagacatcctgcgactgctggagggtgattacaagccgagagctcccgtgcatggttttgtggggggacacaagcggtccattgtcagcaatgctcagcagcacgtggggaaacgctgggttcttaacattgatctggaggactactttgagtccattcattttggaagggtccggggcagactcatggccccaccatatgactattctgaagaaatcgcccagtttgttgcccacatcggctgctttcagacggaaaaggaggtggacgggaacgtccggaccacacacgtgctaatgcccgggggagctctctcacctcttctggccaacatcgtatctgataaacttgatgcagaactgtccaggttctgtagacagctgggttgtacatacacgcgctatgcagacgatattagtatcagtagtaacagaaggacgtttcccgcatccattggccggtttgccaatcctgacagccaaaaggagttcgtgctctctgatacattccaacaaatgattgaggacaatgggtttagaataaaccactccaagactcggctcctcggccatgcgtttcagcaggaggtcactggtctggtggttaacgaaagcgtgaatgtgaagcgcaagttcgtcagagacgtccgagctatgctgcatgactggaaactaaacgggtgcgaggtggccagcgcaagacacttcaataagaaaaggcctgatagggggagactccccgagcaggaagctaccaatttcgaatgggtggtccggggcaaaatagaattcatacgtcaggtcaaaggatctaccgatcaagtcttcagaggactcgccgcgcgcttcaacgagttgtgtttaggccgcaggttctcaatccctcttgtggaggacactgaagttctggatgcgaccgtgtggtacttggaaaacgacacagatgccggttctgttggcacctgcttcgcaatttctgagaacttgtttgtcacctgcgcccattgtctgggaccaaatctgcgagtgttcccccggaaaaatcccgaattccagatggaggccgaagaggtagctagagatgatcatcacgacctggccttgattcggattagggaacctttaccagcttacaatccagcaaccgttctgcgtatcgcgtcaaccgccgatgccagcgagcttggaatccgctcagcagtgcaaatagccggctacccctccaatctcgataataactcgctgacaatccgggcaaccgaggtaacaggcttcagcaggcagacctttgactcaactcctaccatgagtgacaacgtcgtggagctgttgagcggcacatttgagggcatgagcggcggacctgtgctgttcagtggtaaagtggtaggagttatcgtgcgcggcccaaacaaacacgaccgtactgagccgtgcctggctgtaaggtccgaattcgttgacgctcttctcgcaacactttga

SEQ ID NO: 7788 - RNA, 1686 nt, synthetic construct
  source 1..1686: mol_type = other RNA
atgagtctgaggaggtttgctaatcttcgccaggttgcctttcacttgcaccgggactacaggagaagaatgttccatattgcatatggcctgcctgctggcgcacgatatcgggagtttaccattcccaagcggtcaggtggtacacggcgcatctgtgcccccagaaaagcgctcctcaacctacagcgggatatgctgcggctgattgaaccagattaccagcctagggcccacgtccatgggtttgtgagtgggcgccagcgctctatcgtgagtaacgccaggcagcacgtggggaagagatgggtgctcaacattgatctggaagacttcttcgaaacaatccatttcggcagggtgcgcggaagactagtggcaccgccttacaactatcccgaggagatcgcacagttcgtggcccacattgcctgctttgagactgagaaagaggtgaatggaaccaggcgcaccacttccgtgttaatgcccgggggtgcgctgtccccattattggctaacgtcgtcaccgataaactcgacgccgagttagcccgattctgcaggcagctcgggtgcacttacacgagatatgctgatgacgttaccataagctccaatcgacgcacatttccggcccctataggccgctttgcagacccagagtcttttctcgagtttactctgagcgacagctttcaacaaattgtagaggacaatggcttccgtatcaatcacgataaaaccaggctcttgggccaagctttccaacaggatgtgacgggcctggtggtaaacgagaaggtcaatgttaagagaaaattcgtgagggaagtccgagcgatgttgcatgactgggagtttaatgggcttgcccaagcatcagcccgccacttcgacgagaaacggccaaacaggggtagactccccgaacaggaggcatctaatttcgagtgggtggtgagaggcaagatcgaatttatccgtcaggtcaaggggagtactgatcaggtttttcgtgccttagccgctcggtataatgaccaatgctccggccaggaattccacatccctctggtggaagatcaggacgtcctgaacgctgccgtctgttacttggaaaatgatgcagacggtggagcagtaggcacctgtttcgccatagaggatgatctgtacgtgacctgcgcccactgtctgggaccgaatctgcgagtgtatccacggcagaaccccgccttcccacttgaggccgatgtggttgcgcaggatgaccataacgaccttgccctgatcaggattagaactcccctcccagcttttcgccctgctgctttcctccagcttgctgaggcaaccgaagctgccagtgtagacatcagatccgctgtgcagaccgctggctacccatccaatctgcattctgcatcgctgacaatgaacagcacagaagttacgggcttttcccgacagagcttcgatggaactccccctacatctgacaacgtcatctcacttctaagcggaaccttcgaaggtatgtctggcggacctgtgttgcatgaggggaaggtcgtgggagtcatagttcgtggacccaacgaagacgaccggacaattccttttctggcaactcgggtatcattcctggaaacactgagagccggggttagcagcgcgtcatga

SEQ ID NO: 7789 - RNA, 1674 nt, synthetic construct
  source 1..1674: mol_type = other RNA
atgtctctgaagaagttcaagaacctgagacaggtggctaatgccctagggcgggactacaggaaacaggttttgaacattgcatacggcttgccccctaaggagagacacactgagtttgcgatacctaaaaaaggggggggtactcggaggatttgcgctccacgcgctgccttgctgggcttacagcatgattgcctggaccttctgcagatggattaccgacccaaagctcaggtccacggatttgtgtccggcagaggcagatctatagtaagcaacgcacggcagcacgtcggcaaacgctgggtcctgaacattgatctggaggactatttcgagagcatccacttcggacgcgtaaggggaaggctgctggcctctccgtataattacagttctgaaatcgcacagttcgtggcccatattgcatgttttcagacaacaaaggagttcgacggggtccatcgtttcaatagtgtcctcatgccaggcggcgccttatctccactcctcgccaatatcgttagtgacaggctggatgcggaaatcggtcggctgtgtcgtcggttgggctgcacgtacaccagatacgcagacgacatcagcatctcgacggaccgacgaactttccccgcacccattgggaggtgttccgatcccgagaggctgcgggactttactctgtcggacggctttcaagagatcatcgagaataacggatttcgcgtgaacaattcaaagacgagaatgctcggacgggagttccgtcaagaggtgaccggcctggttgtgaatgacaaagtgaatgttaagcgcactttcgttcgtgaagttagggccatgctgcacgattgggaatttaacggctatgatgttgctgccgatagacattttaacgaaaagcgccccgatcgcggcagattaccagcttatgaggctaccaacttcgagtgggtggtgagagggaagatagagtttattcgccaggtgaagggggctgcagaccaagtcttccgagcgttggcagccaggttcaaccagctcacaagcgggcaggcttttgtcatccccctcgtggaggatagagaagtgctggacgccgcggtgtggtatttggaaaatgatgtggacgccggatcagtcggaacctgcttcgcagtaggtgaaaacctgtttgtgacatgtgcccactgccttggccctggattacgggtattctcccgcagatctcccaatttcagtctaaatgccatagaaatcgccagggatgagaaaaacgatctagcgctcattagggtggaatcactgccaagcggccttaagccagaagccatcctgcggctggccacacttgctgagtgcggtaatgtgccaactggtgccgctgtgcaagccgcaggttatccttgtaatttgcatccggactccctgacagtgacccctgctcaggttgccgggtttagccgacagacctttgatggttcacagcacaccgaagataactgcattggcctcctttccggaacatacgccggaatgagcggagggcctattcttcacgaggggaaagtcgtgggagtcatcgtccgaggccctaacgactccgaccggaccctacaatgtctcgcagtacggtccatgtacctcgaacgccttctccaggggctgtga

SEQ ID NO: 7790 - RNA, 1665 nt, synthetic construct
  source 1..1665: mol_type = other RNA
atgacgctgaaatcagtgcctgatctgaggtttctggctgctgctctggggagaaacctgaaaagaaggctgacctacattgcctacaaacttccttcaagtagcaagtttagggaattcactatccctaaacgctcgggagggactcggaacatccaggcccctaaggtcgccctgctgaacctccaaaagagcattaagcccctcattgaaaaggattacagaccaagggtgaatgtgcacggattcgtcgccggccagggacgatccatcgtatcaaatgccgaaaagcacgtgctgaagaagtgggtgttgaacatcgacctcgaaaactattttggtagcattcatttcggacgcatcgctgggcggctccagagcaagccatataactatgctccggaaatcgcccggttcgtcgcacatatagcttgctatcccacacagactgtcatagcaggccagatccaggacagttctgtgctcatgaccggtggggcaattagcccattgcttgccaatattgtgaccgataagttagattccgaaatagcacgtttctgcagtcagctcggttgtacctatacccgctacgcggacgacattaccatctcctctaaccggaataagtttcctggaaaaatagcgcgatttgaggatccagatgaccagaagtccgtggtcctgtccgaggagttcctagacttgatcgagggcaacggcttcgctgttaaccatgccaaaacacggctgctgtcccggatattctctcaagaggtaactgggttgattgtgaataagaaagtgaacgtgccccgcactttcatcagacaagtgcgtagtatgctccacgactgggaagctaacggatacgccgcggcacaagagaatcacttcaccaaatacagacccaaccgcggcaggttacctgcatatgaagccaaggattttcagtgggtggtgagagggaaaatcgagtttatcaagcaggtcaagggggcaaccgatcaagtttttcagacactggccaggaagtacaatagtctgacctctggaaagaagattgccatcccgatcgtcgagacgaatcgaatcatcgaagaggccgtttggtacctgcacacagagaaagacattatctccacggggacttgttttgccgtggagggcggggctttcatcacgtgcgctcattgtataggtcccaatatgactgtgtttcctaaagccgcgcccaagttccctgtggctacagcagccttgaacgtcgacggcgttaatgatctggcactactagatttaaccgctttacttccagcgcacgccccgaagggccttctgaaactcgccaacgtagccgaggtaagcgccctgcaggtaggcgacaaagtgcagattgcaggcttcccaggcaaccttaatcctgacgctgtgacaattgcagaggccacaattacacgattttcaaaaacaaccttggatggctctattcccgcatctaataacgttatggtgcttgacggaggaaccttcagcgggatgagcggcggaccagtcctctttaaaggtaaagtagttggcgtcgttgttcgcggtcccaatgataatgaccccaatgagaagtgcgaagctgtgttctcaactctggtcctcccaatgttttga

SEQ ID NO: 7791 - RNA, 1665 nt, synthetic construct
  source 1..1665: mol_type = other RNA
atgaccctgaagagcatcccagacctgcgtttcctagctgcggccctcggtcggaaccttaagcgacgggtgacctatatcgcctacaagcttcctccatcttctaaattccgagtctttaccatcccaaagaggtcagggggcactaggacgatccaggctcccaggatcgctctactgtcattgcagagatcagtcaggcttctcttggaacgcgactattcccctcgggttaatgtgcatggcttcgtacccggccacggaaggtcaatcgtcagcaatgccgagaaacatgtactgaaaaaatgggtactgaacattgacctggagaattatttcggaagcatccacttcggtagaatagccggaagattgcaatccaaaccttatggctatactccagagatcgcaaaatttgtggcgcacatcgcatgctaccccacccaggcccttatagacggaaaaatacaggactccagtgtgctgatgactggtggtgccctgtcccctctcttggcaaacattgtgagtgataagctggatagcgagattgccaggttctgcagccaactgggctgtacctacacacggtatgcagacgacatcaccatttcctcaaaccggaataaatttccaggcaagatagcacgacttgaggatcccgaagaccaccgctccgtggttctctctgaagcttttctggatctgatcgaagggaacgggtttgccgtgaaccatgccaaaaccagacttctccctcggtctttcggtcaggaggtgacggggttggtggtcaataaaaaggtaaatgtccctagatctttcatcagacaaatacgcgcaatgctccatgattgggaaacaaacggctacgcggctgctcagattcgccacttcagtaagtttaggccgaatcgcggacgcctcgatgcccatgaggctaaacactttcaatgggtcgtgagggggaagattgaatttgttcgaaacgtgaaggggagcactgatcagacctttcagacattagcccggaagtacaattccctgacaagtgggggaaagattacgattcctattgtggagacaaacagaattattgaggaagccgtgtggtacctggtgaatgagaataaggtcgttaccaccggcacttgcttcgcgatagagggcagtaagtacattacctgtgctcactgtattggacccaacatgactgtaacacccaagagcgccccaaagttccccgtctctgtgaaagctctcaagcaggatcgtgtgaacgacttggcgacgctggatttatcggctctactgcctgcccacactccaaagggtatgctgaaacttgcaagcatcgccgaggttggggctctcaaagtcggcgacaaagtgcagattgccggatttcctggcaacttaaatgaagaggccgttactatctctgaagcaaccatcacaagattttccaaaacaacactcgacgggtcgatcccagcaagcaacaatgtgatggtcctggacggcgggacattctccggaatgtcaggcggacccgtgttattcaagggtaaggtcgttggggtggtggtacgtggcccgaacgatgatgaccccaatgaaaagtgcgaggcagttttcagtactttgatcctgccgctgatctga

SEQ ID NO: 7792 - RNA, 1677 nt, synthetic construct
  source 1..1677: mol_type = other RNA
atgcctgccccaactccgttgctgaacagtatcttcctcccacgtcaattagccagcgtcattggcgtgggattccggaggttcgcatatatcgtgtacgtcattcagggttccctaaagtatcgcaactttaagctgcccaaacgcaggggcggcgaacgacttatcgaggcacccaggtggccactgctgagaatccagaaggagttaagaccactcgtggacgagctgtacagaccccggggggtggtacacggcttcctgaaggataggtcggtgttaacaaatgcgcgggtgcacctgaaagctagatgggtcctctccctggatctgcaggatttttttcatgcggtaacatttggtagaatcaaaggcagacttgaagccaacccctttaatctcacccctccgattgcccacgcaatagcaaatgctgcttgcgtcagcggcaggctccctcaaggaggagcccttagtccagtgctcagcaacatggtcgcagatagattggacggtgagctgtccaggctgtgtcggaagttccggtgtcgttatacccgttacgcagatgacataacaatttccaccggcgcagctcgattcccccatgctcttgctcacttggacgacggtgagaagaggaccctgattattggggaagccttaagagcacttattgagtctaacgactttaaactgaacgaatcaaaaagccgcctgtctggacgaggtgaccgacaggaagttaccggactcattgtaaacgagaagctaaatgtgcctcggactttcgtgcgccagatccgggctatgatgcacgcctgggagaagtttggccgcgtagccgctgaagcggaacatctcaccaaatggcgcaagtcagacggacgattgcgcaagcatgaccgcgacaattttgaacacatcctccgtggaaagttggagttcctcaaatgtgtgcagggcgagaatgagcctgtctgcaggaaactgctgctaagatttaatgccctccccgaccgctccaccacttcattccggctgctgccagcctctgccatcgaacttctccgtgaatctacctactgcctggatataacaaagtatgtcgggccaagctctgagggctcagcccatgttcgggagtacttcacaggaacggctttttttctcaaaggggtcgggctggttacttgcgaacattgcacaggggacgagatgcagatataccatcctgatcggaaacacctaaaataccgagtgcacccccttaaggtggatgccctggcggacgttgccatcctggaggttcttgatacgatgctgcctagcccaagggtggaattggaggcagccgtttccgccgtagcgatcggcgatgaagtacgcgtcgctgggttccccgcaaagttccctgagggcagtatcagcattgccagaactgaggtgatcgcaacttatgataggtccagacaccccgtgatatggaaaggggacgctacagttcggtatttaatcgagaagggtgttccggatggagtgagtggagggcctgtcttggacgccaggggcatggtgattgggctgggcgtgaagggtccctctgaggatgaccctttggtgccgtgtgaagtggtgccaatctcagctgtccaaaggctgctgagaacgagttga

SEQ ID NO: 7793 - RNA, 1740 nt, synthetic construct
  source 1..1740: mol_type = other RNA
atgaaaaataaaacaactctccctacacccacaaaggagctgttacaggcttcctccaataaagatctggcaaggttgttgggcttccgtacgtctagcctttgttacatactttacaagctcccaagcaggccttacaagaaattcgggatccctaagaaaagcaaaggagtgcgcataatttgcgcgccacgtaaacctataactacactccaggagaaagtgtaccacctcttgctgccgctatatcggcccaagaagtcagcttccgccttcattaaaaatcgatctattgtcttcggcgccgataagcactccagaaagaggcacctcgtgacctttgacctgaaagatttctttgatagtatccactttggccgcgtccaaggcctgctcatggccacaccctttaacatccacccagacgtcgctcagagtctggctaacatcatctgttatgaggacaagcttccacagggagggatcacctctccgcttatttcaaacatgatctgttggaagctggacacacagcttacagaactcgccgtaaatactggatgcacctatactcggtatgcagacgacatttccatctctacgtggaagaaagaactgccaccagagatcggtaccctgagcaaatatgatatcaccttgtccgaggaagtccagaaaatcgttaatgacaacgggttcgaggttaatccatcaaaaacacgctacacccatcctagcacccgaatggaagtaaccggactaactgtgaacaggcgaccaaatatccagcgcaagaagatcagaaacttacgcgcccttttacatgattgggacataaacggttacgtggaggcagagcagagatacagggacaagtcctcgaatcctcctcgggaggaggccaccctggaggaaattgtttgcggcaagctggcttttttaaaaatggtgaggggggaaaacgaccccgtatacagaaagctcaaacgcaaacatctcatactgtctacagggtctattcccactggcctactggatgccgtccccacccttaacgctgatagtaattacctatttggcgagggacagaccgactggaagcatctgtatgcggcctttcgttactttagaaatcaaggtctgtacaatgggctgaatcttgtgattagtccccccccagctgtgtgggaaggaggtttttcgaacttgaagatgatggtggagcgatataagctgctccacaacacgaactcaaaattgttcttcctctttgacacagacgagcaacaagccgtgaagtacgcccggggcaggaaggataattctaacctgtaccatcaccaggggtcaaacgtgtataccctgttgctgtcccacacgcctaatctctgcatcgagcatctgtatcctgaagaggaactgaagagagccaacagcgcaggacggagactgtatctctccaatgagttcactgagcagggcgtcctgaaagataattcaagcatcacttactgtagtgaaaagaagcccttcgataagcggtgggttcacaaaaagcatatcctggacgctgatgtgataaaaaccattaacggcaagaaaaagaacattgcatgcagcaagaaggactttagtagccaggttttggcccggccggatactgaactggtctttacattcgatgaattcaagcccattttcgacgcaattgaaaaagctttagcagcgtataaagcctga

SEQ ID NO: 7794 - RNA, 1614 nt, synthetic construct
  source 1..1614: mol_type = other RNA
atgctgatcacactgtctgctcttaccccgccaaattttctcgacctcaagagcttcagcgatctcgccttgttttttggcattccctcaaacaagttaggttatttgctgtatgctctgcaagacagtgataagtacaagtcttttaatgtcccaaagaaaaccggcggcactaggcagatctcagagccacatcccctactcaagaagatccagcgtaaactggcagactccctcctcgaactgtacaagcctaagcagtcagtgcacggctatctgaaggacaaaagcatagtatctaacgctaagatgcaccttcggaaaagatatcttctgaatttcgaccttgcggacttctttacgagcattaacttcgggcgggtgcgaggcttgttcctgaatcacccattcaattttccacaggaggtcgcaactgctttagcccgcatttccactaaagaaaactccttgcctcagggagcgccttcgagtcccgttatctccaacttcatgtgttgggggctggacaattacctccgcaagttctgctaccagctgggctgtacttacacccgctacgcagatgatattagcatatccaccaatagagagaacttccccacagaaatcgctaacgtgaaacacgacccatactctgccgtcatcagcgagattcttactacaaaaatcgagcagaatggcttcacgattaataatgctaagacccggtttagcacacctaggcaatcccaagtggtgactggcctgaaggtcaacgagtttgcaaacgtttcgagaaaatatgtgaggaatctccgggctatgctgcacgcctgggaaaaattcggactagacaaggccgagtctgagtttagagaaaagtacgtctcaaagcatcgagccccctttcttcctcccgtcagtttcaaacaagtactgcatgggaagctgacctttctcagatccgtgaggggccccaatgacgatatctaccagaaactgttgggacgctattctctggtggcagacctgaggaggttaaccaaatttggttttcctaagcagattaaccgtgcactttggatcttggaaagcgatctgtttgaagatgattactaccaaggaaccggtttctgcctagatgggattggcatagtcacatgtgcgcacgtgttaaagcccggcaccaaagcacggcgcatatacaaccatctggagtcactcaatattgaaattgtggagagaaacgacgccctggactatgccataataaaagttatcggaggggtggaggaggtgagtctaatcgccgatctggacttcaatcatcagctgggggggcaggttcgtacgatcggtttccctgctcacgatggcacagcctccgtggcgtacgaggacggagttattgtacagtctcggtataacgcagccggacagaagtggttccgagtcaacaccaacatcgtagccggcagcagtggagggcctgtgctcaatagtgaaatgaaagtgatcgggattgttgcctatggagccacaaacttgtcagggggtggcgatccaatcaattccggatatattccgatccagtgcttaaacggtccggcttga

SEQ ID NO: 7795 - RNA, 1515 nt, synthetic construct
  source 1..1515: mol_type = other RNA
atgagaatcattacttctctgtggcagctggaagaggagtggggctatgaagctggaaccttagccttcgttgcttatagaaccaatatcgactcgaggtacacgacttacaatatcagaaagcgcacccagggctaccgtcagatcgacgaaccagacgaactccttaagggtgtccagaggaaaattaaagagttcctcgaggacaaatacgtgccgaccacttcagcatacgcctacgtgtccaaccgatcccctgtgaagaatgcagctctgcacacgcggaaaaagtggatagtcaacatcgacatcaaagactttttcccatctatccactttggccgaatttgcggtgttttgcaatcaaagccctttcaccttgaagcatctactgccaaggtactagccacaatttgcaccaggaatcacgctttgccacagggagccccttcctctccgatcctcagcaacatcatttcctacagtctcgatatagcgcttatccaatttgcccggtcacatggcttttactacactagatatgccgacgatattaccttcagtacatggcagagcaagtttcccaatcagcttctcacagtggatcatgagggaacccgtgtggcagattccttagagcaaataattagcgggaatggttttactgtgaacggcctgaaaacccgctgtctggagaggcgacaacgccagagcgttacaggtctgacggtaaacaagttcgtgaacgtccgccggaagtatatacgacaggtgcgggggatgatacatgcgtggcagaagtatggggaggaatctgctcagaaaacctttgaggaaaaacacctgaacaagcattatgttcccagcgggagaattcccaagttcaggtgggtcctcctggggcggttgcagtacatcggccatgtgaggggatggcaggaccctgtctatcgtaagtactttagacaacttagcgaactctggccagacctgtcgaagagaatgagggatcggttcgatatattggcccagaacttccttgagttgagtaatatgacagatcaccgggctaaggggtatgcactggagaaattcatttacgagctgtgtgacgacggaacagtcggagtgtccggccaattccgacgccagaacaacattgagcagattgatggtgctatctccttcaattctaatgccgtgctcatcgaatgcaaattctactctgagaggattggcgctcttctgatcgatcccttttccatgaagttagctcgctcaggggccggaacacaaggcctactgatcagcatgagcgggtatacctcagaggcactcgaaactattaaactgaaccctggccagaatctgatgctgttaactgatgccgatctgcaggtgtggttggaccgccggctcacaacctatgaggtaatcgccgcaaagctaaaagcgctgcaggttctgagagaacctgcgttgagtctggccgaaagtgtcgagatcgaggaatga

SEQ ID NO: 7796 - RNA, 1641 nt, synthetic construct
  source 1..1641: mol_type = other RNA
atgccatctgacacctcaacgccaacacagcgtaaagcaagggaacctggtccacccgccatcacaattaacgggcgagcgctgcagacacctttcgatgtggcccaatactttaaagtggcccacagccacatgatgtgggtactgttcaaggcccccgccgcgagcagatatcgaaccttcgagattccaaaacggacaggcgggatgcgattaatcagcgctcccaatgggttggtgcgcgacttacagaccaagctggcaccagctctcgctgcagcttatgaggcccacccgtcggcccacggattcttgaaagctaagtccgtcgtgactaacgcacatgagcacattggccagcggctggtcgtcaacattgatcttgaagatttcttccctacgattaactttggaagaatacgtggcctgttcatgtctcggcccttttacatgggagctggtgctgcctccgtcatggcccagatcgttacgcacagaaacggcctaccacagggcgcaccaacttcccccgccctaagtaattttatagccgctaccttggacagaaggctaacaagattagccaaggaaaaccgtctgcgctacacacgctacgccgatgacattacattttcaactaatcagcccacatttcctccttctatcgtgatgaccgatgtggctactggacgggtggtccccgcggaaactctggagagagcaatcgctgcggctgggtttgccattaataggaaaaaggtcaggctccagactaggcatcaacgccagaccgtgaccgggctggttgtcaattctagtactaacgtgcatcgcgcacggatacggaaaatcagagctatgattcacgcctgggagaagtttggtctggacgcggcagcatctgagcatttcgccgtacacaggggtagcagtggcaagatgcctgaccatccagcagcagccttccgaaatatcgtttatggccaactgtcatttgtaaaaatggtgcgcggcaaagccgaccccgtttttctcaagctctgcgctaagttgattgatttggacccgaaccccagtaagttcatccgccaaatggtgttcggcgcagatgactatgatgtcttcatctcgcacgctagcgaggacaaggaaaccattgcaaggcccatcttcgaagcctgtgctaggcggggcgtgaaggccttccttgatgaggcccatataggttggggagaagattttaccaagaagatcaatactgcccttgggtccgctcggaccgtcctgtgtgttatcagccaggtgtccgtgacgaaagagtggccgctcgcagaggtcaatacagccctttctatggacgtgatcggacagaaacgggtggtcccactgatcgtgggcagccctgacctgtccaagctgcctctcatcagaggacgcgaccagcttgtttggaggggagatgcggagattgttgccgccgaactggttaaggtggtaagaccgccaaaacccgaggtaaccaaaggcggtgccgcagtgcctgtgatagctcctaactcacccgctgaagccaaacgagcagcccaagctaaaggggcgaaaaaggggggaggcttttttgggctcttccagaagaagtga

SEQ ID NO: 7797 - RNA, 1638 nt, synthetic construct
  source 1..1638: mol_type = other RNA
atgccttctgaacccgggtcggaaaaacctgtcagagatcctggccccccagccattctttggcgcggaaaaccgctcgaaactccatttgatgtggccggatacttcggggttgcacataatcatctaatgtgggccctgtacaaagctcctccccagaccagataccggaccttcgagatcccgaagagaaccggtggcatgcggttgatctccgcacccaatgggctggtaagagatctccagaccaaactggcaccagtgctggcagcagcttatgatgcccaccccgccgcacatggctttctgagtggcaagtcagttgtctccaacgcccgagagcatgccgaccaaaggctggtgttgaatatcgacctggaggatttttttccaaccatcaattttggcagggttcgagggctgttcatggcacgccccttcttcatgggtgccggagccgctgctgttatggcgcaaattgttacccaccgcaacggattgccccagggagctcccaccagtccagtattgtccaactttatcgcggcaacgctggacagaagacttactcggcttgcaaaggaaaacaggctgcgatatacacgctatgccgacgacatcacgttctccaccaaccagccgacatttccgccttctatagtgattacagaccaggccagcggaaagatagtccctgcagaaacattagagcgggccattgccgccgctggtttcgcaatcaataggaagaaggtgcgcctccagaccagacatcaacggcagagtgtgacagggcttgtggtcaacacagctcctaacgtccaccgtgctcgcgtgaggaaagtcagagctatgattcacgcgtgggaaaagtttgggttacagtctgcggcgtacgagcactttaggaaataccgtggggcctctggcgctatgccagacgaccctagcactgccttcaggaacatagtctacggccagctcagcttcgtaaaaatggtgaggggccgtgacgacaaggtgttcctgaagctctgtgctaaactcatcgatttagacccaaatccctcaaaattcatcaagcaaatggtgttcggcgctgatgattttgatgtgttcatttcccacgcatcagaagacaaagagacaatcgcccggccaatctatgaggcttgcgcccgcttgggcgttaaggccttcttggatgaggcccacatagggtggggagaggacttcaccaagaaaattaatactgccctgggcgctgcccggacagtactttgcgtgattagtcagactgctgtgactaaggagtggcccctggcagaaataaatactgcgctctcaatggatgtaattggacagaagaaggtggtgcctctaatcgtgggtcagccagacctaagcaagctgcctctgctgaaggcccgagatcagatggtgtggaggggtgacgccgaaatggtcgcacgggaggtggccaaaatcgccaaaccacctaagccagatgttgtcaagggaggcgctagcctccccgtcattgcacccaacagcacgatcgaggctaaacgagcggcccaagaggctggggggaaaaagaaaggcggaggtctgtttggatggtttggcaagaagtga

SEQ ID NO: 7798 - RNA, 1716 nt, synthetic construct
  source 1..1716: mol_type = other RNA
atgccaccctccacctccgatgccccacctgaacccccacaagctggcgctccagttccaccgcctcctttgggagccctcgccattgacggagcgcctctgaggaacgcttacgacgtagcaagatattttggcgtcgcccacggcacaatggtctgggttctgtacaccgctcctgagaaccagcgttaccgtacgtttgagatacccaaacggagcggcgggatgagaaggattgacgcccctactggtctagtacgccaaatgcagaagaagctggcacccatcctggcaggcgcatatgaggcccatcccagcgcccacggcttcattaaagaacgcggggtgctttcaaatgctaaagggcatgccgggcagaggctcgtgctgaacatcgacttggaggactttttcccttccatcaattttggaaggattcggggcctgttcatggctgctccctttctttgtggccctggggccgcaacagttctcgcacagatctgcactctacggaatggacttccgcaaggggctccaaccagccccgcattgagcaactttatagctgccagtctggataggcggctcacgcgcctcgcaaaggatcacaacctgaggtattctaggtacgcggatgacatcactttctcaactaatcagggagttttcccccctgcggtcgccatgaaagtgcagaccgagggtgcctctcttggggttcgacccggtgaggcactggatagagccatagctgccgccggcttcgccattaatctgcggaaggtgcgtcttcaatctagatccgtgcggcagaacgtcaccggcttaacagtcaacgtggccgcgaatgtggagagatccaggattcgcaaggtgcgcgcgatgcttcatgcatgggaaaaatttggtctggacgccgcggggagtgaacactttctgaaacatcgtggagccaagccaaaaaagggccgagggcctgtaactccaggagcagcgttccgaaacgttgtctatggacagctggcctacatcaaaatggtacggggcccagccgatccggtgtttctaaagctttgcggccgcgtcctggacctggatcccaatcccagcaaattcattaagcagatggtgttcggggccgagaatttcgaggtgttcatcagccacgctagtgaggataaggaactgattgcgcggccaatctatgaggcctgtgagaggctcggcctcaagacctttttagacgaaccccacatcggttggggagaaaacttcaccaagaagataaacacagcattggggtccgcacgcacagtgctcgcaatcgtgtcaagtaactcagtagctaaagactggccagtgttagaaatcaacaccgccctggccatggaagtgaatggtcagaaaagagtcgtccctctcattgtgggtaagccggacttagcaaagttcccattgctgaaaggcaagaatcatgttgtgtgggcctctgatcccgacaaggtggccttgcgactcttggatgcagcaagaccgccaccgaaacctcgcgctgctcgaccagcttcgaggacagctgtgcccgccactggagcataccagcctgtccccgctggtcccaatgctctgccaccactgtttgccccttacccccctcgggctcctaaacccaagagatctttcctggagtggatctttggcagaagaggatga

SEQ ID NO: 7799 - RNA, 1683 nt, synthetic construct
  source 1..1683: mol_type = other RNA
atgcagcccccccctaccgatggagaagcctcgaagcctgcagctcctgctccctcacctctgagcattgacggggtacccctccgctctgcagaagaggtagcgaggtttctgtctgtgccctatggcaggatgatctatactctttacaagagccccgacaaagcgaggtacaggggatttgagatacccaaacgcagtgggggcatgagactcatccagtctcccaatggactgttgcgtgagatgcaggagaaactggggcccgtgctccaagctgcttatgaggctcatcctgccgctcacggattcatcaagacacggagtgtggtgagcaacgccagactgcacgttgcccagcgcctggttcttaacatcgatctagaagatttcttcccaaacgtgaacttcggccgggtgcgaggcatctttatggccccaccctttagttgtgcaccagccgctgcgtctgtgctagcccaaatttgcacacacaggaatggtctgccccaaggagcccccacatcaccggctctcagcaacttggcctctgctactctggataggagattgacacggttagcaaaggaaaatgggctgaggtactctcgctatgccgatgacataacattttctagcaaccattcccagtttcccccggccgtggcgattttcacggaggatggtaaaaaaggcctcgccgttagaccaggcgaagcactcgagcgtgctattgccgccgccggattttcaataaatctccggaaggtgcgcttgcagccacggcacgtgaggcaagcagtcaccggactgaccgtcaacgccgcgcctaatgtcgaacgaaagcgcatccggcgcgtacgggccatgcttcatgcgtgggccaaatttggcgccgaagccgctggtgcggagcacttattaaagtatcggggggcccattccccaggagagcagtcagcacgggcttttcggaacgccctttacggggagctcgcctacattaagatggtacgcggtcaggaagaccgaatctttctcaatttgtgcgcgaaggtgcttgagctggatcctaatccgtccaggttcattagacagatggtgttcggggctgacgactacgatgtgttcattagccatgcatccgaggacaaagatgaaattgctcggcccatcttcgaagcatgtgggagagcaggcctgaaggcatttctggacgaggcacacatcggatgggggcagtccttcacccagaagataaattccgcccttggtgcggccagaacggttctggtgatcgtgagctcaactagcgtgtcgaaagactggccagtcctggaggttaacaccgccctacagttcgaggctgcagggcagaaaaaggtcgtgcccgtcatcgtcggcaagcctgacttatccaggctgccactgctgagtggcaaggacgggatggtttggagtggcgatgctgatgctgttgctaccaggctgcaggccgccgtcaaaggtgacgcaccacgtcgtccagaacgcggtgcagcaaaaccaccggccagagccgctcctcctcaaccaccaccacgagcagctggacgaccgggaagaactgctgtacctgtcactgcccctcgaggccctagaaggggcttctggtcctggttgttcggcgcacgccctagatga

SEQ ID NO: 7800 - RNA, 1692 nt, synthetic construct
  source 1..1692: mol_type = other RNA
atgccagatcctagtacgcctagcgatcgcaccagagcccctgcctttggggaactccgtttggaaaccgtgtctgacatcgctcggttgctgcgtacacatccaggccagctgagttggactctctataaagccccagagactgcacggtatagggcattcgagatcccaaagcgctcgggcgggatgagacagattcatgcacctattgcccacgtccgggactggcagacacgccttgctcccatcctgcaggcagcctacgaggcccacccaagtgcacatgggttcctgcgtgagaggggcataatgactaatgcccgaacccacgtcggccagaggctggttctgaacatcgacctggaggactttttcccctccgtgaattttggaagggtacgggggctctttatgcggagccccttcaattgtggccctgcagcggccacggttcttgctcagatttgcacgcataggaacggattaccacagggagccccgacctccccagcattgtcgaatttcgcggcagctgccctggataggagactaacccgcttagctagagacaacaacctccggtactcccggtacgccgacgatattaccttctccacaaatcagccccagtttcctccagccgtcgcggaaatgcgagccggtgaaggggacgccctgaaggtgcgagctggcgaagcacttgagagagccgtcgctgctgccggtttcagcattaaccacaaaaaggtccgcctccaaagaaggtcacagagacaatccgtcactggagtggtcgtcaacgcccgcactaacctgacaagacagtgcgtacgccgggtacgggccatgcttcatgcctggaaaaagtatggactggaggcggccggcgccgaacactttgatcgctggcgcggggcacaggccaataaaagagctactacagtgggccgggccttccgtcacatcgtgtatggagagctctcttttctgaagatggtgcgaggtgcagacgatcccgtgttcctcaaactgtgcgcacaactgatagaactggaccccaatccttctaagtttgtgagacagatggccttcggagccgacgactacgacgttttcatcagtcacgcttccgaggacaaagatgcggtggcgaggcccattttcgaggcttgttctaggttaggcgtgaaggcatttctagatgaggcacatatcgggtggggccaaagctttaccacaaagatcaacaccgccttgggagctagcaggactgtcctggccatagtctcaagccactcagtgacaaaagactggccggttttggaggttaacaccgctttagctctggaggcgaatgggtttaaaaaagtggtgcctcttttcgtgggcgcacccgatctctcaaagctccccctgctgcaggcaaaggacgccatggtgtggaagggtgatcccgatatggttgcaaagagagtgcaagctgcgttgaagggggaagctcctaggcggcctgctgaagtagctccccgaccacgatggatgggtggccgttctgccacagctctcccaatagtgggcgtagctccgagaggagttgccgtgcgcgttgatccccctccaattcttcctccgcccaggcggaccctatgggaatggatctttgggaggcgaggtccgccaagctctcgctga

SEQ ID NO: 7801 - RNA, 1671 nt, synthetic construct
  source 1..1671: mol_type = other RNA
atgcccagttcatcccaggcggagactgcagaaaccgctctgcttcacaacgggaggccgatactgactgcctacgatgccgccaagttttttggagccccacttgggaaactggccggggtcctctatcgtgcgccagaggaggaaaggtacaagtcctttgaaatcccaaagcgcaccggcggtatgaggccaatcttggccccgatcggcttaactcgcgagctccaggagaaattggcaccagttctgcttgagcgttatagtgcgcatccagccgcacaagggttcctgaaagaacgcagcatactgaccaacgctcgagtgcatgccggtcagagactcgtgttgaacattgatctggaggacttcttcccctccattaacttcggccgggtgagaggcctgttcatggccgaacctttcaagctcggccccgctgctgctgccttattcgcacagctgtgtacataccggaatggtctgcctcaaggcgcacccacaagcccagccctgtccaactttattgccgcagacctcgatagacgcttggcacggttggctcgagagtctaatgtccgatacacgcgctacgcagacgatatcacattcagtagcaatcagccgacacttccccagacactcatcgtcaccgtcgccggcgaaggaagagcctctgtgcaggtagctgaacccttagagagagcgatcacagcttcaggattcgctattaaccacaaaaaagtcaggttacagacgcgacaccagcgccagtctgtcactggtctgcatgttaatgccaagcccaatgtgtcacgtgctcggatcagaaggatgagagcgatgctgcacgcctgggagcgctttggactggatgcggccgcctacgagcactttctcaagcacagaggcatgctgaaacctcctcgggacccatcgcgcgcatatcggaacgtggtctatggtcagctgtctttcattaagatggtgcggggaggggatgaccccgtgtttctagggctggcagcaaaactgattaaactggacccgaaccctagtcgattcattagacaaatggcttttggcggtgacgacttcgacgtgtttatatcgcacgcgtccgaggataaggatgaggtcgctcgacctatctttgaagcttgcgcccggctgggcgtgaaagcttttctcgacgaagctcatataggctggggacaatcttttacccagaaaattaacaccgcccttggctccgccaggactgtgttggccatcgttagccaaaccagcgtgaccaaggagtggcccgtaattgaggtgaatacggccctctcactggaagcaagcggacagaagaaggttgtgcctctcatcgtgggaaagcccgacatgtctcgcctgccgctaatccatgggaaagacgcaatggcatggaatggcgatgccgctaatgttgcaaggaggctcaaagcggctgttgatggggctgctcctaggaggccagccgcacaacctgcaaccactgccgtacccgtaactacagataagcctcttgccctaagagcacggagccaggcccctcttgccatccaggaacgtggaccatggcggcctccacccaagccaaagagaggattgttcgactggctaggggggcggaagaggccctaa

SEQ ID NO: 7802 - RNA, 1464 nt, synthetic construct
  source 1..1464: mol_type = other RNA
atgctgttacacgagggtaagcctatcctcactgcctacgacgccgccaagtacttcggggtgagtgtaggtaagctcgcacgtgccctttacaggagtgcagacgaggagcgctatgtacgttttgagatcgccaagaggagcgggggcatgaggcctattagcgcccctgttggattgactcgcgagttgcaaaccagactggcccccgttatgcaagcccggtattctgcgcacccagctgcacaggggtttatcaaggagcggtcaatcctcaccaatgcgagagtgcacgtcggccaaaggctggtgctgaacgtggacttggaggacttctttccatccgtcaacttcggacgggtgcgcggactctttatggccgagccctttaaactaggcccagccgcggcatctgtcttcgcccaattgtgtacctataaaaatggcttgccccagggcgcacccacatctcctgctctgtctaattttattgccgctgatcttgatcgccggcttgctcgtctcgccagagagtccaacgtgcggtatactaggtacgcggacgatataacctttagtagcaatcagcagtccctcccgcagacgctaatcgttcatgcgcagggaggcgatggccatggtgttgctgtggcagaaacactggagagagcaataacggccagcggcttcaatatcaaccacaaaaaagtgcgactacagacacgccatcagagacagtcagtgacagggctgcaggtcaattcacgggctaacgtctcgagggagcggataaggcgcgtgcgtggaatgctgcatgcctgggaaaagtttgggctgccagctgcagccagggaccatttcctcaagcaccgaggcatgttgcggccgcctaaagatcccccgagggcgtttcgcaatgtagtctacggacaactggccttcatcaagatggtccgaggagccgacgatcctgtgttcctgaacctggcagccaaacttatcaagattgatccaaacccaagcagattcgtgagacagatggcattcgggggggatgactttgatattttcattagccacgcctctgaagacaaagatgctatcgcacgccccattttcgaagcatgcgctaagttaggcatgaaggcttttctggacgaagctcacattgggtggggccaatcattcacccagaaaatcaacaccgctctgggttccgccagaactgtgctggccatagtgtctcaggtgtccgttaccaaagaatggccagtaactgaagttaatacagccctcagcctcgaagtcagtggccagaagaaggtggtgcccctgcttgtgggacgacctgatctgtccagactgcctcttgtccaggggaaagactgcatggcatggaacggtgacgccgcagctgtagctcggaggttaaaggccgcggttgagggagctgctccccgataa

SEQ ID NO: 7803 - RNA, 1671 nt, synthetic construct
  source 1..1671: mol_type = other RNA
atgcctttaacatccatagaagatgctgaaggacttcggctgccggacggtcggcttgtgttgtcagcccgggacgcagcgatctatttcggagtgagtttcggcaagctgacccacgcgctgtatagagcagacgacgagcagcgctacagagcctttgagatccccaagcgcacgggcggaatgaggcagatctatgccccccacggcatcattagagagtgccaggagaagctggccccagtgctgcaggaattctacgccgcccatccagccgcacacggattcatcaaagagaggtcgatcctgtccaacgcaaaactgcacactgggcagcgttacgtgttgaacgtagaccttgaggacttctttccttcaatcaactttggcagagtgagaggcctgttcatggccgcccccttcaagttgggacctgctgctgccagcgtgtttgctcaactgtgtacacacaggaacgggttgccacagggtgctccaacaagcccccccttgtcgaactttatttctgcgcaactggaccgcgcactgtcacgacttgcccgcgaaaatggggtgaggtactctcggtatgctgatgacataaccttcagcaccaatcaaggggccttcccacctgctattgccgtcacctctaggggggaagacggaggagaaggcgtgcgaacaggcgaggcactcgaacgcgccgtgatagcctccggcttcgccatcaaccataggaaggtccgcctacagaagagagatcagaggcaaagcgtcaccggcctaaatgtcaatgagaaagctaatgtggcccgcaaaagaatcagaaggatcagagcaatgctgcatgcctggcagaaacatggcctcgaagcagccgctgctgagcactacttgcggcataggggcatgctccagttgccccagaatttcgatcgggcatacaggaatgtagtttatggccagctcgcttttgttaaaatggtacggggggccgacgacccggtattcctcaacttatgcgctaaagtgctggaaatagatccaaatcccagccgttttattcgacagatggtgttcggtgcggatgattacgatgtatttatctctcacgcgtccgaggataagcacgagattgcacgaccgattttcgaggcatgtgcaaagctcggactgaaggccttcctcgacgaggcccatattgggtggggacagagctttacccagaaaattaacactgctctcgggtctgccagaacagttctcgccgtggtcagtagcacatctgtcagtaaagagtggcctattgtcgaagtgaacactgctttagcgctggaagtttcagggcaaaagaaggtggtccccttaattgtgggcaagcccgatctgtccaaactacctctgatccggggcaaggatgctatggtctggaacggggactccgctgctgttgccaagcggctcaaggccgctgtgagcggtgatgctccccgaagaccagtgatcaccccctcacgtacggcactgcctcccgttagtgcagcacctgcctccgcgactgcaccacttcgccaagcacctgttggaactggtccttgggcccctccaccaccgaggaaacggaagcttagtttttttgagctgctgtttggtcgacgtaaacgctga

SEQ ID NO: 7804 - RNA, 1770 nt, synthetic construct
  source 1..1770: mol_type = other RNA
atgcatgccgacagacggcccgatgatgcacctccccaagctcctgctattctggtttctggcagggcccctcagtcagccagtgacgtggctgctctgtttgacgtgtctgcctcctggctcacctatgtgttgtaccgcgccgacgagtctcaaaggtaccgggcattcgaaatccccaagagatccggcggcgtaagggagattaatgctccaattggagtggtccgggattgtcaggaaaaactcgcccctctgctcctagcggcctacagagcccatcccggagcccatggctttatcccagagcggtcgatcctgaccaatgccaaagcccacgccggccagcgtcttgtgtttaacgtcgacctcaaggatttctttcccactgtcaatttcggccgggtgcgagggctcttcatggcatccccctttttcatgggtcccgcggccgccacaattatggcgcaggtttgcacccacaagaatggtttgccacagggtgccccgacttcccccgttctgagcaactttgtagccacagcactggaccgcaggttgacgagactggctcgcgagaatggcgtgcgatactcccgctatgccgacgacatcacttttagcacgaaccagaccggattcccagctgccattgtcgctttcgagcaagacggggaaaaacggagagcagtggtcggggatgctctggccaaggccattgccgatagtgggttcgcagttaacttcggtaaagttagattgcagactcggcacgagcgacaaagcgtgacagggctcgtggtcaatgcgatgcccaacatagagcgggccagagtgaggcgaataagggccatgttgcatgcatggagcaagttcggactggaagccgccggcgaggagcactttcgcagatggcgacgcgcgaagcctaaggtaaaagatgggactgctgggactgctttccgcaacgtggtgtatggagagcttgcgttcgtgaagatgatccggggcagggaagatcctgtgttcctcaagctttgtgctcaggtgctagcgctggatccaaaccccagcaaatttgtgagggaaatggcatttggtgcagcggactatgatgtcttcatctcacacgcttcggaggacaaggacaccatcgcccgcccaatctttgaagcttgcgagaaattagggttgaaggcttttttagatgaggcacacatcgcttggggggcctccttcactgaaaagataaatgtggcactcgggtctgcccgtaccgtcttaacaattgtcagccctgcatctgtcgccaaggattggccggtgctcgaagtaaatacagctctggctctagaggtttcaggcgagaaaaccgtagtccccctgatagtgggaaagccagatctgagcaaacttccgctgattaaaaccaaagaccagctggtctggaccggcgacgcgatgttcgtggcaaaaaacctgaaggcggccgtagaaggcagagttggtgttaagcagagacggacacctgacggaggactggcccctgcaccagcagcaacaggagctccaggccctgctgttgctgcaagggccgagagttctcgtggagccgctcagggatggaccccaggttggcagtcaacggcacccaagccgtttgaaatcaggcgcaagtccaaaagtgggggccgttggttcgtgacagcactttgggctgcacttgctgccgccttagccgcagccgcttttctgtttggcttcggctga

SEQ ID NO: 7805 - RNA, 1536 nt, synthetic construct
  source 1..1536: mol_type = other RNA
atgagcgagaagttctccgcacaggagttggatcagctcctgaatctgaaactggaaaccgctaacgacgtgtctaagtttctgaagatttctaaaccgcagctgctctttgcactttaccgagccagcgacgagcagaaatacgactcttgggagattccaaagagatcaggaggcatgcgcagaattgactctccgcgccgagtgattcgggacggtcaaaaagctctgctaccatatttagaggccagacagaatgcccatccagccagccatggctttttgtccgatagggggattgttactaatgctgatgcacataagggacagagaatcgtactaaacatcgatctcgctaactttttccccagcgttaatttcggccgcgtacgcggcctgttgatgaagcctccttttgagatgggggaggctgcagcaaccatctgcgcacagctgtgtacatttcgcaacggcctgccccagggagcttgtacatctcctatcctctcaaacttcattgcaacctcactggatcggcggcttctcagattagctcgcgcgacaaggatgcggtatagtcgatacgccgacgatattacttttagtacaaatgccgaggccttccccgaacaaatcgtcaaggtctttagtgccgccccgctcactgacgaagctctggaggcagccatggaaggccctgcttctaaggcgccaaaacccgcagctccagcccctaaaatcggacccgctctggaaagggccctcacccaatgcggcttcaaagtgaatcctgctaaggtccgggtgcagcgtcgggatgaaaggcagacggttactgggctgaccgtgaatcagtttcccaacgtggaaagaaggcggatacgcagaatccgggccatgatacacgcctgggaaaagtttggtttgcagaaggctgggcacgagcacttccaccgatatgcacccaggcaaacctcgcctggcttcgatgtggcgcgggcttttcgcaacgccgtgtatgggcaactcgccttcgtcaagatggtgagaggagctgaagatcccgtattcctaaagctttgttccaaactgaccacgctggacccaaacccaagcaagttcatcagacgaatggttttcggagccgatgactacgatgtgttcatatcccacgcagccgaagacaaagacgcggtcgcgaggccagtctttgaggcctgcgagaggatgggtctgaaagcattcttggatgaggcacacattggctggggtgagaattacactacaaagatcaacgcagccatggggtccgcgaggtgcgttctgttaattatcagcagtcattcagccagcaaaccatggcctctggccgaaatcaacacagcgttatccttggaagtcatcggcgagaagatggccgctccccttgtggtggggaagcctgatctttccaagattccgctcatcaaaggaaaagactacatagagtggagtgacaatcccgacctggtggcccgtcgtcttaaagacctctga

SEQ ID NO: 7806 - RNA, 1677 nt, synthetic construct
  source 1..1677: mol_type = other RNA
atgcctgaaaacccagcctctaccgccggaccacctacacctcccacacctcctgctttacctcagcatctgcggttgagggggcgaccgctccaaacgtcacaggatgtggccgactatctggggatacggcaccggcttatgatagatactctgtataaccagcccccaaatgcacggtacagacactttgaaatcccaaagcgcacaggcgggatgaggcctattcacgcccccgtgggccacactagggctatgcaggacaggctgctaaccgattttaaggcactttaccggccccatcccaatgctcacggtttcatcgaaaagaggtccgtgacatcgaacgctacctgtcatacaggacagcgctgggttctcaacatcgatctcgagggctttttcccatccataaacttcggtagggtgcgcggcctgttcatgaggccaccatttgagatgggtcaagcggcagccaccgtttgcgcccaaattgtaacatttcggaatggacttccccagggggctccgacatcacccgtcttgtccaacttcattgcggctcagctggacagaaccctgtcccgtctagcacgccagaacagactcgtgtactctcgttatgccgacgatatcacttttagtaccaacctcactcagtttcccgcgtctgtggtagtgcgggagatggtggtgggcggaggctacaaagtccgagcaggagacgccctcgaattggccatccagaaatccggattcgagattaatgagaaaaaagtcagactgcaggcccactattttcaccaggatgtgaccggtctgtgcgttaatgagcgcgtcaatgtggctcgcgaaagagtgcgaaagttacgcgctatgctccacgcttggcggaagttcggactagagagggctggccaggagcacttcgcaaaacataggggaagtaggagattaaagccacctagccagcctggggccgcatttagaaatgtcgtgtacgggaatctctcgttcgtcaagatggtacggggggctgatgatccggtgtttctcaaactgtgcgcacaagtactggcccttgaccccaatccatcaaagttcttacgccagatggtatatggcgccgacgactacgatgtgttcattagtcatgcaagcgaagacaaggaagctattgcacggcccctttttgaagcatgtaatcgtctgggtctgaaggccttcctggacgaggctcatattgggttcgggcaatctttcgccgccaaaatcaacaccgcgctgggcgcttcaagaacgattttggccgtggtcacccctcactctacaactaaggactggcccctgcaggaaatcaacacggccttggccctggagatctctggcgagaaaaaagttgttccagtgatggtgggctcccccgatcttacccatttgcctctgcttcgaactaagagatggattagttgggagggaaacgcggattccgttatacgacagatgaagcagcaggttggcccactgcgcgaggcgaaaaaagcaggtagcgtccccggcatcgcaggtaagaaggctgcccgtccggtccctcaagccaaaccgatgagcggggcccagagccaaactaccccaagaagcgacggatggatcagcaggctctttggcaagaagtga

SEQ ID NO: 7807 - RNA, 1686 nt, synthetic construct
  source 1..1686: mol_type = other RNA
atgctctctagcgacaccagcaaccccgcaccagaaaccccgaaagagactctgcaggaacccccactggagccccatccatttgcctggggcgccctgcaaacagtggcggatgtagcagagttcctcggagcgcgcaggagcgatctagcctattggctgtatacagcctcccctgacaaaagatacaccgagttcgagattcccaaacggacaggcggaatgaggctgatctctgcaccaaccgaccagattaagacatggcagaatagggttgctgagaagctcgcacagtcttaccgcccacatccctccgcccatggcttccttgaaaagcgaagtgtgctgaccaacgctagggatcatacaggtgtgcgatttgtccttaatgtcgatctgaaagacttcttcccctcgattaacttcgggcgcgttagaggattgttcatcaaacctccttttgcaatggctccgcccgcagcgactgtgcttgctcagctctgcaccttcagaaacgggctgcctcaaggagcccccacatctcccatcctgtccaatttcgttgcatccgagttagatcgtcgccttactcgcctcgcgaaatccaatggagtggcctattcgagatatgctgacgacatctcatttagctgtaacagagccgaatttcctcctgacctggcccattacgaagtggatgcaggcgggctgaagacactcagacttggggcggctttagcaaaggaaatttctgctgctggttttgccccgaatctagggaagctccggctgcagacccgtgccatgaggcaagccgtgaccggactgacggttaacgccaaggctaatgtccagcggaggcggattcggagagtaagggccatgctgcacgcgtgggagaagtttggcttacaggccgccggccaggagcacttctctaggtaccgacccagcgccgccgctttgagagatccaggcccacgctttcggcacggcgtgtacggtcagctgtcatttatcaagatggttaggggcgtagatgatcctttgtttctgcgcttatgcgctagagtattggacctcgaccccaacccatcacggttcctgaaaaagatggtcttcggggatgagctatacgacgtgtttatcagccacgcatcagaggacaaagacgccatcgcaaggcctatcgctcaggccttggcccggcaagggttgaaggctttcttggatgaagcgcacatagggtggggagagaatttcactaagaagattaacaccgccctgggcgccagcagatatgttctggctatagtttccagtcactccgtcactaaggactggccaatcttggagctcaacgcggctctcgccatggaagcaaacggcctgaagactgtgatacctgtggtcgtgggtaaacccgaccttggcaagttaccgcttctgcaggcaaaggattggtacgtgtggaaagacgatgtcgaagctctggcactccgggtgcgtcaggtggtgaaaggtgagctacgcggagccgctcgtcgccaagctgtggaagcccgagggagttcagctagtgccgtccctacggaagtcgcccaggagggtactggcccaccagtagcaagtagcgacattaataaaaagcctggattttttgcacggctgttccgaaaacagtga

SEQ ID NO: 7808 - RNA, 1509 nt, synthetic construct
  source 1..1509: mol_type = other RNA
atgtttcgggccatcgtctctgtccgcgatgtcgctgacctgctcgaattagactggagccagctgtactacataacctcaagggccgccgaccgctactcctatcgaacctttgccattccaaaaaagggggggggcgagagggtcatacaaacgccccatcccaccgtgcgaatacttcagcacaagctactggaagtgttgtccctagtataccagccccacccagcagcccatggattcgttcacgagaggagtattaagacaaacgctacaccacacgtgaaccgccgctgggttttaaattacgatctccaggatttcttcccgtcaatcacatttcctagagttcggggcatttttatcaagagatttaggctccctcctggcccggccactgtattggctagactttgttgcaatactggtgatactcctgaccatctgccacaaggcgccccaactagccccatcatttccaatatgatctgtcactctttggaccaccagtttgtccagcttgcaaagcggaatggggtgttctatacgcgctatgcggatgacctgacctttagcacaaaccggaccgcctttcctctgggcatcgccgagacatctggggcccagcttatcggcgtcgggaatgatgtcaaggagatcataaaacacaaccatttcgacctgaaccatcgcaaggcccgaatttcagggagagcgagtaggcaagacgtgaccggtctgactgtgaataaacgcatcaacgtgaggcggcgattaccccgggagatccgcagtatgctccacaaatggaaagcccacggctatgaagcagctgaggtagaattccataccaagtttgatgtatacggtcgcggagccaattatagaaacgtggtgtctggaaagctcgctttcttgcggaacgttcgtggaattgatgacagagtgttcaggaggttatacggctgggccaaggaactcgataacgatagtttctctgagctaccccccctggcaacaaacgcccccagcttggcagaggcagtacgcgactttcccaccattaccgcttccgataataaacagacacgacggggctatctgaagagaatgttcgcgtccgctcggggcacactgtgggttgtggatccaaatctgaaggctgacctcctgactgatctggttgcgtccatcgaacctggaagagtctcggacatcagactgcttagccgggacgagagactgtcaagccgtcagaaagtgaaatacactacaagcaggcagagcctgctcgctaaaggggtgaacctcgaatggcgagtgctgccaccgccacagcgttatttccatgacaggtggctggctgacgactccgattgcgtgtcaattggaggtcctttttctagtatttacgatccgaggcctcccttgggtcaaaatcttctggcacgtagaccagagcagttcgacacgtggtggaaccgggcaacccctctcactaccggatga

SEQ ID NO: 7809 - RNA, 1782 nt, synthetic construct
  source 1..1782: mol_type = other RNA
atggcgtcaaaccatcctgaggtgcccagcgatccaagacagctgagggcctccttcgttgcgcttaagactccacaggaggtggcaaagttaattggcatttcctacgggcagctctgttcgataatctacgctaagcccggcaaattcccctacgaaacattctttattcccaagaaaaacggcaccctgcggaccatttctaagccgcatccagccgtgcgatctctgcagaataaactgctcccctttcttacttccgcatatcgacctaaaccaagtgcacatggctttgtcgtccaaagatccatcgtaagtaatgccaggccacacgtaggaaaacgcttcatcttaaacatagacctcgaggactttttcccttcaatccatttcgggcgcgtgaggggaatgctcatggcagtgccttatcagttgccatcatcagttgccagcgtcctggctcggatatgttcgaatgaaggagtcctccctcagggagctccaaccagccccatcatatctaacatgatttgcgctcggatggatgctgatttgcagaggcttgcaggaaaacatcggtgcacttacagccgctatgcagatgatctgaccttcagcacgacaagtcgccgttttcctgagcaacttgccgtgcccagacacgggctggtgggtgaaaatctgcagataggcgagccactcattgccacaatcacagctaacggctttcggattaacactgcgaaacagcgattacaacctaggcaccatcaccaggaggtcacggggatcacagtcaatcgcttcctgaaccctagaaagaagctcgtccgtcaggcccgagccatgatttttgcctggaagaagtttggacttcaggccgccgcggccgaatttcgggagaagtacgatcccaaaccacgccgcgcctctaaaccgcagccaagcttcattcgtgtggtattgggtaaggtggagcacatccgaaatgtgggaggcgaggggcacccaggctataggaaactgctagctgctcttcaccaggcagacccgcaccacttcgagaagcccgccgaagccagaacctggaaccccagacccgcagacaccagttcctgggggtatctggccaagagatttcggaattctgtgttccacctggaggtgactaacaaagaaggggacctacagaatgggacgagcttcctctgggacgcaggctatctcgccacagcccaccataacttgatcggccccgttagcgtgatgatcaatggcatttcctcacctgttggggccggtgatcaactacaccatcccaaggctaatgagggcgtagatgctgccctgctgaaagtggcgcatacagcgactgcaggtaagctggctttcaagactcgggaatccgcaatcgaaatcggagagtccgtggcagccctgggctttcctaccgttcctatgtacgactctgccttgatcgtgagaaccggaatagtcgagggcaccgctccccagtacagcaaccaaatcgacggtattcaagtgtctatcaagttaacaggagggttcagcggcggcccggtgattgattccagtggtaggctggttggggtcgtgatggaagctaccttcgagaaaactgctgctggagtcccggggggtgaatttcaacacattctgcctgcaaggtacctcacagagatcagtaaggactctgccgaaacgtcacctcagttgccactgcagctgaaagtagttgattcaaagcaggacaccgactga

SEQ ID NO: 7810 - RNA, 1419 nt, synthetic construct
  source 1..1419: mol_type = other RNA
atgctcacagagatgtacgtgccaaaagctgctgcccatggtttcgtcctaactaggagcattgcatctaacgcccggagacatgttcggcgcgagttgcttctgaatgtcgacgtggaaaacttctttggatcaatccactttggccgcgtgcgcggcatgttcggcaaacctccattcagtttcccaggcgttgtagcggcaaccttggcgcagttgtgcacagacaccggaactttaccacagggcgcgcccaccagccctatgatttctaacttcatttgtcggcgatttgacaatgatttacttcgactggccgggaaacaccggtgtgtatataccagatttgccgatgacatctcagtctctacacaagaattggccttccacgagtcaatagtgaaatcattcgactcctatggagcagacgtaacacttggggccgaacttgtcgcactctttgggaagcataagttcacggtgaacgccaagaaaacccgggtgcagtctcggcatcgcagacaggaggtgacagggctgatcgttaaccggcgactgaacgttcccaggatctacaccagaaggctcagaagtattatccacagttggcgtaaattcgggaagaccggggctgaaaccgtttttaagacactggatgcagggaggaagacccgctcaggagcttccccggatatccgatcccaccttaggggaaagatagagttcctgcgcatggtccgcggaggcggagacttgatctataccaagtacgcactggccgcctctaagctggtgggatacgatagacctggcagaattgagggggctgctgccgccatatttgagttttatagggaagctctctgggtcgtcgtgggcagagatgccctcggctcgctcatttcccagggtacagcgttttttctggacggcgtgggtttcgtgagcgcactgcatgtcctttaccctgctgactccagcattacaaagtggactctgattcgtgggtgcgcaccttacgatgaattcgcagtggttggctgtacacggcacccagcactggacctaacgatcctccagactgacgcaaggacgcatgccctgctgcgtggagatgagggccaaactctgcccggacaggccgtcgtagtgctgggtttcccaaattggcacactagcgccgataaacccctgagggccgatgccctgatcgtgcagcaaaagaccatcagtggttgcaaactagctagcgtgaactatccgcttttatccggggcctctggtggtcccgtcttgaatgccgaaggctgggtggtgggcgtgactgtgcacaatgctacttcccctgttctccccaatagttttctcgcgatagagcattttgctagcatcgtagggagccccttccacgctctgtga

SEQ ID NO: 7811 - RNA, 1674 nt, synthetic construct
  source 1..1674: mol_type = other RNA
atggccaagagagatcaggtgaacgacgtggagccgttaggtacggacgcccacctgcgtgaagcctttccccgtcttatgactcgatgggacgttgctcgcctgttgagggtagatagtaaggatctccactattggtgttaccggaacggcgctcggtaccgagagttccaactccccaagaagtctgggggctatcggacgatttctgccccagaaggagggatcaggctggttcagcggaaattgtgccagattctcaatgctatttatgtgccgagacactctgttcatggcttcgtgccgataaaagggcgcgggatacttacaaatgctgagccccatgtcaaacagcgttgggttctgaacgtggatctgagcgacttcttcgactccattcactttggacgggttagaggcgtgttcgaaaggtttggcgctggtcctgacgccgcggatctgatggccagaatctgttgttttagaggccgcttaccacagggcgtgcccacaagccctgtcgtgaccaatctcgtgtgtcgcagcctagatcgcgctctgcaggccttcgcaaagacccataggtgcgcagtaacacgatacgcggatgatataaccctatcaactggaagagcagggtttgatgacgcggtggtgtctgtcaagcatgacgagggcaggcgggtggctgagattggacacgggcttcgctttcttatcgagagccacaacttctcagttaatgagagcaaagtgaggctctcgggaaccttggatcgccaagaggtgaccggtcttattgtgaatcggaagaaaaacgtcccaagggaatacgtgcggaacgttcgggcaatgattcacgcagtagaaaggtacggtgttggcgaggctgaaagagtattccatgaccggttctcccgatctagacgaccagaccttcctgccgccgactttcttagggcactgcgtggccggctggaatttatcaggatggtcaagggggatcatgacgctacatttgtatcactgtggaatcgcgccgcacggttccaccagtggctgactcccagaatcgtggacttgtcccatgtagagcaggccctctggatcgtagagtccgaggtggccactcagggagtgtccatcagacgtcacggaaccgcattcgtcctgaaggacgtgggattggtcacagctggtcattgcgtcggggaaagaatgcgcatctggcacccaacacgacctgcagagaggttccctgcccgaataagagcgctgtgcacggccagtgacctgtgcgtgctggaacctcctcctcgcgatcgactgccagctctggacagaggtgatgcaggcactgtcgccgaaggagtcgaaatcggcactgcaggatttccagacgaacctgttaaagtggcccaattggagggacgggtcagtatgatcagactgcggtttgggcaccgcaacctattccccagctttgagacaaggaaggggatgtcaggggccccattactcgatgccaggctccgtgtggttggcgtggtcctgtatggccccgacaggagcccctctggtgaggaagatcgcgtgcccagttcggctgtcgcgatcgatctgattgacgagctcccaaaattcaccggctcctcccccgccttactcacctga

SEQ ID NO: 7812 - RNA, 1467 nt, synthetic construct
  source 1..1467: mol_type = other RNA
atggtcgatagacctgttaaatctctgctctccgtgaggacgatcaccaatctagccgatctgctcgatgtgactccgaatcagctcaagtatcttatgcgagggttgcgctcagaggagcgatacttgcggtttcacattccaaaaagaaacggaggcctgcgggtaatctattctccacgacgtgagctgaaagccattcaggaaagattttctcgcttgcttgtgggcatttacaacccaccaggaccggctcatgggtttaccgccgcacggtctatactgacaaacgcaatcccacatgttcggtgtaggtgcgtccttaacgtcgatttggaggacttcttccccagtataaatttcggccggatccgtggcctgttcaaatcattaggtgtgcccgaaagcggcgccaccgtgatggctcagttatgttgccacgatggcatcctgccccaaggagcgcccactagccctgtgctcagcaatatggtgtgcctgagcctggacaggaaactggtaaagctggccgcagtgcaccggtgtcgttacacaagatacgctgacgacataacattctcccataagcaccaaattctgccctccgagcttgcttatgtcgacgacaagggagagcctgtagtcgggcatgagctctatagggcgatcaaggagagtggatttgaagtcaatgtgaagaaagtccggttatttgacaacaggcatcgccaggaggtgactggactgactgtgaatgagaaacctaacgtgccaagaagattgattagacagatccgcgctatgatccacgcctggcggaaacacggtgaagctgctgcagaggaggaacacttccaatgttactataggagggtggggcggcgatctcccacgaatagttttagagacgtcctggtgggtaaaatgcacttcgtgcgcatgatcaagggggccgatgataggacttaccgtaacctccagaggcagctggcccatgtttatcctgagtacctagcggttatgcagaaagagaatctcaccctgaagaaacggcatctgttcatctgccacgcctccgaggacaaggaatcgtttgtccgccctctcgttgatcagctgcttctcagaggggtttcagtgtggtatgatgagtatgaacttacagtgggcgacaaccttcgcgagaagatcgacgaaggcctcaagagctccctgtacgctgcagccgtgctaagcacatcatttttcggcgacaaaaagacctggaccaccagggaaattggtggagtcactgccctggaagatgcagacttaagacctcgaatgttgcccatatggtacaacctgcgccagagtgaggtagcaaactacgctccaaccctggcggggattgttgccttgtccagcccccgccaaacaattgaagaaattgccgatgaactcgcaaagaaggtactaaagaagtga

SEQ ID NO: 7813 - RNA, 1419 nt, synthetic construct
  source 1..1419: mol_type = other RNA
atggccagcctgcttgacgtgagctcaagacagctgaactatctgctatatgtacggggcgagtccgagcgctatatcgctttttctatacctaagcgtcgaggggggattcggcagattctcgctccccatgatgatctgcgccatgtccaacacagactggccgaggttctcaatagcctttacgcacccccggacgtcgctcatgggtttgtggcgggccgctctatattgtcgaatgccgatgctcacgtgcgcaggcggcatgtgttgaacgtggatctggaaggattcttccccagtattaacttcggccgggttagaggcatgctcctgtcccctccctacagtctgactgcccaggctgctaccgtgtttgcacagatctgctgtcacaataatgaactgccacagggagctccaaccagccctgtggtcagcaacatgatttgccgacggttagatcgacagctatcgagactggctggcaaccacggatgtggatatactaggtacgtagatgacctgaccttttcccggagaacgggggccttccctcctcaactggcgaggtggggggaatctcgacgctgtatagtttctgacgagttgcgctgcatgattgaagagaatggattctcaatcaaccccagaaaaacctggctgttcagtagatgccacagacaggaggtgacaggcctgaccgtcaacacaaagaggaacgtcccgcggaaatacgttagacagattcgcgccatgatccacgcgtggtcaagatacggcatagaaagagccggccaggtgcacgcagccgaattttaccgacggcaaggtcgccaaggcgatgtccccccattcgcactcatcgtgcggggaaaactggaatttttgaggtccgttaagggcacaacagacccagtgtacaagaatctccagagccaactcgtccgactggacccagcctatttgcaggtgatgcttcgggagaatgccatgcttaatcgtagggatgtatttattagtcatgccagcgaagacaaagacgtcatcgcgaggcctcttgcagaagagctaatcaggctcgggctgaccgtatggttcgacgagtatgagatctcaataggtgattcccttaggcagaagatcgatgacgggctgagccagtctgccttcggtgtggttgtgctctcacacagttttttcgccaaaaggtggacaaggcgtgagttagacggattaactgcccaagaggacgctacgaaccgcaatcgcatcctcccagtctggcatgagattacccacgccgaagtgtctaagcattcccccacattggccggtgttcgggcagcaaggacttccgatcagactgtgcagcagatcgctcacgagattgcagaagtgatccgtaacgcatcctga

SEQ ID NO: 7814 - RNA, 1716 nt, synthetic construct
  source 1..1716: mol_type = other RNA
atggccgacctccgcttgacgagccccccttacgttctggttgctgcatttcgcagtctaacctcagtcggcgatctcgccactctcctgcaggtgcgcccggatcaactccgacactatacatatgggagggggtatagataccgcgccttcacaattaagaagaggaggggaggggtcaggaccctcaaagaaccacactccgggttaaaaatcgtgcagcaaaagttagcacaagttctgacaaccctgtacgaggcgccagactgcgtgcacgggtttgtggcaggtcgcagcatcgccacaaatgcccacttgcatatagggagtgaatgggtgttcaatgtagacctgaaagatttcttcccgagtataaacttcggccgggtgcgaggactgttcatcaagaggtacggactgcctgcgaacgtggccacggtgatagcccgcatttgtacccacaagaatgagcttccgcagggggctccatcctcgccaatcgtatctaacatggtggcggagcgactggaccgcgatctgcagagactggcacggaggtaccggtccgcctatacccgctatgcagacgacctgactttctccagaaacgatcggtttcctgacgcaattggttattgggaccctatagccctcccagtacggcaaagccgggtgggacacttactggaagccgccgtcatgaaaaatggttttgagattaaccctgcaaaggtacaccttcgcctaaaggacgagaggcaggtcgtaacaggactagtggtgaatcgtaaagtcaacgtccgcaagctttttgtgaggcggattcgtgcaatgctgcacgcctgggaaacccatggcgagaaagaggctgaacaggaatactttaacagatacgacacgaaggacagagctccccatgctatcttttccttcaggcgggtcgtgaaagggcacatcgatttcctgggcatgatccgtggcacagatcatagttggtaccgacgattcgttatgcagtacgcccacctggtgccaggttatgttgctcgtccagaacattgccggaggcctaatcatctcaggacctggaaggatgctatctgggtcctcgagactgaagagtcccagggcacagccttcgagctcactggctacggcctggttaccgctgcgcatgtggttagggatacgactttgcccggacatcctccatactctaatcctcacgtctttagcccccggaatgaggcacttaaacatccggtgcgaattgccgcctatgacgccgacctggacttggcaatcctcgaatttgatgcccccacacgttgtgccttgagaactagaatggctcccgcggctgtggctggagatcctattagagctgccggatttcctagctatgcgcccgggtcacagttgtgggaagagtccggctggattaaccatgttcggagacacatcaccgcacccagatatgtcgtgacaaccccaatcatcgccggggcctctggctctcccgtaatggaccttgagggacgggtcattggcgtggctaccaccggcgtgctgtcgttctcagctgctgcagctagatcaactggtgccgccggactgcccgattacggtgtggtgccaatagcgttacttgcaagagtctctgttgccgctactcccgcaagctttagcgcccctgatgcacacggctctccctga

SEQ ID NO: 7815 - RNA, 1494 nt, synthetic construct
  source 1..1494: mol_type = other RNA
atggccgccactgaagtcgtctccgccctaggcggagtgaggacacgcagtgacgtggccaacctgctcgcaaccagtgacgcccagcttcgttacctgctgtatgggagacatgaggatagccgctactgtaccttcagagtacctaaaagaaaacgaggctttaggacaatcgaggcgccaagggaggaccttaaactcctccaacggcgtctggtcgtgattctttcggctatctaccaaccccgcgctggggttcacggcttcactgtgggacggtccatagtgaccaatgcaaggcagcactgtgggcggagatacgtcctcaatgttgatctgaaggacttcttcacaagtatcaacttcggtcgcgtgtttggattgttccgcgccccacccatctctgcgagctacgagacagctactgtgctagcccaactgtgctgtcaccggaacgtgttaccccaaggcgcccccacctcaccgatcgtttctaacatgatttgcgctcgcttggaccggcaattgagcaagctggcacagcggaattggtgtaggttcacgcgttatgctgatgacattactttttcaaagcagcgaggggagttccctgaggaaataggttacctcgaccgagaagatgtagctcagcctggcagtgaactgcggagaatcatagaggcaaatggattcgctatcaacccatccaaagtcagcctgcgaaccaaaaagcgctctcagtctgtgaccgggttaactgtaaacgagaaatgcaacgtgcaccgcaactttgtaagacaggtgagggccatgattcattcatggcagaagtttgggttcgacgcggcccataatgaacatacgtcgcgttattacagaaggcttgggaaactgggtaaccctccacggctcgatcagatcattaggggaaagctcgccttcgtgcggatggtcagaggcggcttggaccccgtatataagaatctgcagcttcagttgtgccgagtggatccctcctatttggacgtgatgaggaaagaaaatgatcggatgaagagaagagacgtttttctgtctcacgcttccgaggacaaagagactctggtgcgacctctggcagattctttaatcgcagccggcatatcagtgtggtatgacgaatacgagattcagctgggcgacagcctgcgcgaaaagattgatgaggggctggcaaagtcaaggtttggcgttgtggtcctgagcagacacttttttagtaagaggtggccacggagggaacttgacggtctgacagctcgcgaggatgccagccatggaaatatgatcctgccggtgtggcacggattgtccaaggccgatgtcgcaggatatagccctaccctcgcgggtttaaaggcccttctaaccgatgggaagccactagctgaggttgccgtcgaactggttgcacagctccgtggcagactcaaaaaaacaggcggatggtcctga

SEQ ID NO: 7816 - RNA, 1479 nt, synthetic construct
  source 1..1479: mol_type = other RNA
atgcggatctggacggtgtccttcgagcccaccgtgttccaagaggtgactagtatcgtggacgtcgcaaacctcctcgggacctctgtaaagcagctaatttacctgctgtatgtgcgatgggaaacagaaagatacacaagctttgcgattgcaaagcggaccggggggactaggacaatttcagcccctaaacccgagctgaaacgaattcaaagacgccttgctgactttctgcaggacaacttgaccccaaaaacctgcgcacacggatttgctaggggccgaaatatagccagcaacgccgaggaacatgtgcaccatcgtatcgtccttaacatcgacctatccgattttttcccgacgatcaacttcgggcgtgtacgaggggtctttatggcccagcccttcggcgcatcccctaaagtcgccaccctcttggcgcagatctgctgccacgaaggtagcttaccacaaggagcacccacttctccagtcgtgagcaacatgatctgttttagaatggacgcccaactcatgaggctggccaaggagcacggttgcttctatacacgatatgctgatgatatcagttttagcaaaagaaagggagagtttccagcggagctggcaaccgtgggcgacaatggcaaggcagttgtgggaaaaagcttgcgcgacattatcgagcataacggcttcagggttcaccccctgaaagtgcaccttcatcacaatactaccaggcagatggtcacggggcttaccgttaacaatcgggtcaatgtgccgcgcgccttcatcagaaacatccgggccatgattcatgactggcgcgtgaatggctacgaggccgctgaaacacggcaccatgccaattactattctcaccctcaccgctccgttaaaccccctctgcgcaagattattgagggaaagctgtctttcctcaagatgatttccggagtcgatgacccagtgaggcagaatctgcagcggcagttcgttaacgtatgtgaagaatacaaagcggtgatggaggacgagggtataatgcatgattttttcatatgtcacgccagtgaagacaaggacgaccttgttagacctctcgctgaagccctgcgcagctggggagtaagtgtctggtatgacgagtacatgctcactataggcgatgatctgagagaaatgattgatgcaggcttggccaattcgaggtacgggatcgtggtactgtcccctaggttcttcggcgtgaagaagacttggcccaaacgggaggtgggtgccctgttcgcaatggaagacgctgatggcaagtctagggtcttaccaatctggcatgaagttactcagcctgatgtggccaagcggtcaccaacattagctcgtatcttggcttggcactcagctgatttttcacccgaggagctggctgctaagtttagagattttatagtgacacggagacgctga

SEQ ID NO: 7817 - RNA, 1677 nt, synthetic construct
  source 1..1677: mol_type = other RNA
atgttcggaataccagccggtctgcacgagtgttttacagtgagtgacctgtaccaattcctcggtgtcgatcccgagactacagggggctttctctacggggacgccaccaaatacagagtttttagcgttcctaaaaagtcagggggggagagagagatagtggctcccacaaaaaggctcaaatacctgcagaacaaagtgaaagccgagcttgagagttactatagtccaaggaagtgtgtacacggcttcgtgtccggacgctctgtaataagcaacgcccagtcacatgttcggaaggaatatgtgctcaacattgatctcgaagattttttcggaagtatcaacttcggccgtgtgtccaagctgtttcagaggcctccattgaacctccctcatggcgtggcatccgtccttgctcacatttgctgccaccggggagttttgccacaaggcgcacctacatcccccattatttccaacatgattgctttcaagctggatcgacagctgagggagctggcttataagtgtagttgcacttacacacgatatgcagatgacatcagcttttccttcaccaatagaaagaagtctttacccaaggccatcgccttttttgattcgaatgacgaactggtgctgggcaaagaactgaaggacattatcgaagacaactggttcaaaatcaatgataagaagacccgtattcagcatcgcacgcagcgtcagtctgtcacgaatataaccgttaatgagaaagttaacgtgaatcggaaattcattagacagacctcctctatgctgaatgcattgttcaagtatggagctgtggaagccgagcgcgaatatttcgaaaagtaccataagggctatattgccaacagacagcgggctaaaatgagcgagcaaccaggaaaattattcacccagaaaattaggggccgactcaatttcataagaagcgtacgcggatcaagttgcaacgtttggaggtcattgatgtaccggtatactgtggctatcggtaatccgaacgaaatctacaaccgctcttggtgggagatcgccgcagagtcaacctatatcttatatgacctctcagcggaaggcaatgggcagggaagcggattcctgcttgatggcatcgggctggtgactaatgaacacgtcattgccggcgtcgaacagaacaacatagtggataccctgtccatcgagtggctgcccaacaccaaaaaggagtttatcgggctaaacgtggcctggaagaatgcggaaaaggacctagcagttattacgagcgactttgtattcaatgatactgtcccgctgacactagagcgaaatcccaattactcggtggggacagagatctttgctatcggttaccctgcttacgagacacggggggccaacaaggcaaccatccttcaggccaaaatcaccggcgaggtggttcgcgaaggacaagacagggtcgtgattgaccagcccattatccacggccattctggtggggtcgtattgaatacagacgggagagtcataggtgtcgtggccaacggcaacgctgagggtgaagtgaggactactccttctgcgtttatcccaatcagcgtcctgcttgaagagcacgatcggcaaactaaggcgagctccgtggaggcatga

SEQ ID NO: 7818 - RNA, 1677 nt, synthetic construct
  source 1..1677: mol_type = other RNA
atgttcggaacccccaacggcctgcatgaatgcatgacagtcagcgacttgtatcgcttcttggggtatgacgaaaagaacacgggcggatttctgtatgggtcagcgattaaataccgagcattctctgtggccaagaaagggggaggcgagcgaaaaatctactccccaattaaaaagctcaagaacttgcaacacattgtgaagagtgagctggaaagctactatgttcctcgccaatgtgtccatggattcgtgagtggtaagaacattatttcaaatgcccagccccacgttagaaaggagtatgtactgaatattgatctcgaggatttcttcgggtctataaatttcggccgtgtgcgcaaactcttccagtcatcccccctcagccttcccccgtctgttgcctcagtgctggcccatatctgctgttaccgcggagcactgccacaaggtgctcccacctcgccaattgtatcgaacatgattgcttttagactggacaggcagctacgggagttagcatataagaattcctgcagctacaccaggtacgccgatgacatctcctttagttttactaaccgcaagaaatctctccctaaagcgatcgcgttttttaacggagaggacgaactggtcttagggaaggatctgaaagacatcatcgaaaacaactggtttaaggtcaacgataaaaaaacacggatacagcacaggacccagaggcagtcagtgaccaacatcaccgtgaatgaaaaggtgaatgtcaacaggaagttcattcggcagacgtcttcaatgctgcatgctatcattaagtacggcgccgtgaaggcagagcaggagtattttgagaagtaccacaaaggctatatcgccaacaaacaccaggctaaaatgcgtgaagaaccgggcaaactgttcgttcagaaggtccgtggtcggctcaattacattggaagcgttagaggcaattcctgtgatgtctggaggaaattgatgtataagtacaccttggcaattgggagccctaacgaagcttacaacagaagttggtgggagatcgccgaagagagcacttacatactctacgaccttagtgaagtgggcaagggacaggggtccggctttctgcttgagggtattggcctgattactaatgagcatgtagtgacaggtgtagaacaaagcaatatcgtggattcccttgtgattgagtggctgcccaatcaaagcaaacagttcatcgacttaaatgtcgcctggaaagacgtggacaaagatctggcagtcatcacatctgattccatttttaatgacactgaacctctcaaggttgaacccaatccaaattattcacggggcaccgaggtatacgccataggatatccagcctacgagagtagaggtgataagtctgccacaacactaaaggcaaagatcactggggctacaaaacgggagggccaggacagaatcgtgatagacaagcctatcatacacggccactccggtggagccgtttttaatctggacgggcgcgtgatagggatcgtggccaacgggaacgctgagggcgctatcaaggctacgccatccgcgttcatccctatcagcaccctacttgatgagcacgatatccgaatgaaggcacagtctactcagacctga

SEQ ID NO: 7819 - RNA, 1692 nt, synthetic construct
  source 1..1692: mol_type = other RNA
atgttcggcgtccccaccaagttacacgaatgtcttaccgtaacagacctgtatcagttcttgggcgttgatgaggacaaaactgtgggtctgctttatggcgataatatccgttacaggtcttttcaaatcccaaagaagggcggtggggaaaggacaatttttgcacctgtgaagtctctcaagaacatccagaaaaaggtccaggcggaattggaaacgtattacaagccacggaaaagtgtgcacggcttcgtcgcaggacgatcagttctgactaatgcgaagccccacgtacgaaaggagttcgtcctgaacatcgacttaaacgactttttcggctcaatcaatttcggtcgagtgtctagattattccagagcccaccactcagtctgaatcagaatgtcgcttctgttctggcccagatttgctgttatgaaggcgtcctccctcagggagctccaacgtcccctgtgatctccaacatgatatcctttagactggatcggcaactgagaaaccttgcacatagacattcttgcacctacacaagatacgcagacgatatcagctttagcttcacaaataaaaagcgcagcctccccaaagagattgcattttttgatagcaatgacgagcttgcgctcgggcatggtctgacatcaatcatagagtccaactggtttgagatcaatgacaaaaaaaccaggattcagcatagaacccaacggcaaagtgtgacgaatgtaactgtcaacgagaaagtgaacgtgaaccgcaaattcatcaggcaaacatctagcatgctgaacgctttgctaaaatttggggccattgaggccgagcgggaatattttgagaagtaccatcgcggctacatcgctaatcggcaacacattaagattgccaagagccccggaaagatctttctccagaaagtgcggggacgtctgaactacattaggtccgtccgagggaagacctgttccgtgtggcgcaagctaatgtttgactataccgtggccattgggaagcccgacgaaacttacaaaaaatgcttctgggagattgcagccgagtccacttacatagtttatgacataacagccgaaggagacggacaggggagtgggttcttactcgagggggtgggcctggtaactaacgagcacgtgatcgaaggcgtgaccaatgagaatatagtagacgcactggttttgaggtggctgccgaatgaatctaaggaattcataggcctggaacttgcctggaagaataaggccaaagatcttgctgtcataacctcggatttcattttcaaagataacaatcctctcgagatcgagccggagccggattattcagagggagccaccgtgttcgctatcggataccccagcttcgagtcagaacatggaaacagagctacaatcctgaaagcaaagattaaacgccagatgactcgtgaaagtcagcccaggattctaattgatgagccaatcattcacggtcactcgggcggggttgtgctcaacgaacacggtagggtcgtgggggtggttgccaacggcaatgccaaaggagccttgcgcctggcccctgatgcgtttatccctatccaggtgctgatcgaagagcacgctaaccggcagtccgctaagaaggctgccgttttgcaggcagtgaactga

SEQ ID NO: 7820 - RNA, 1674 nt, synthetic construct
  source 1..1674: mol_type = other RNA
atgttcgtcacccctactggcctgcatgagtgcaaaactgtctcagatctctacagattcctcggttgtgatccagcgaccttcggcaattacatttacggaaatggcatcaagtacaaagagttcaccattcctaagaagaacggggattcacggaccatcctggccccagttaagaagttgaaattcctgcagcagaagattaaagctgagttagaatcctattacactccgagacagtgtacacatgggttcattccaaagcgatccatcatcagcaacgccaaatcccacgtccgaaaagaattcgtccttaacattgacctcgaggggtttttcagctctattaactttggtagggtgagtaagctcttccagagcccacccatgaacctgccacccaacgttgcaagcgtcttagctcacatctgctgttacaaaggctgcctgcctcaaggtgcccccacatctccagtgattagtaacatgatcgcttatcgtctggacaggcagcttcgcgaactcgcatataagaactcctgttcttacagccgctacgccgacgacattacgttcagcttcacaaataagaagaagagtttgcccaaatctattgtgttttttaacggggaagatgaattgactttgggaaacgacttgactaccgtgatagaggggaattggtttaaggttaatgagcagaagactcggatccaacataggacccagcgccagtccgtgacctccataacggttaatgagaaggtgaacgtgaacagaaaatacatcagacagacaagcgccatgctgaatgcactgcttaaatacggtgccgaagaagctgagagagagcactttgaaaagtatcacaagggatatatagccaataggcagtatagtaagataactgagaggccgggcctgctgttcacgcagaaggtgcgcggaaggctcaacttcatattaagcgtccgtggacagtcttgcgagacatggcgaaaactgatgtataagtacaccctagccatcggcgagcccaaagagcaatataataagtcttggtgggaaatcgcagctgagtccacatacgtgctatatgacatatcacaggatggcgacgggcaaggttcagggtttctgctcgagggcattggcctcatcacaaatgagcacgtaattgagggggttgaacagcaaaacatcatcgatacccttaacattgaatggctttcgaacccatctaaaacgtttctggccctggagcttgcgtggaaagataagcaaaaggacctggcagtaattaccagcagtctggcgtttaatgacgtcgaacctttgaaggtggagcctaatcctgacttttccgtcgggacagagattgtagccatcggctatcccgcatacgaggcgagaggcctgaacgaagccaccatcctcaaagctaaaatcacaggtacccagaaacgggagaatcagcctcgcatcgtgatcgacaagccgattgtgcatggccattcgggaggagtggtactaaataaagatggccgggtgatcggggttgtggcaaatggaaatgctgaaggatcagtccgggccactcccagtgcttttatccctattactgtgctgatcgatgaacacgaacaccagaaaataaagaaaacagagccctga

SEQ ID NO: 7821 - RNA, 1698 nt, synthetic construct
  source 1..1698: mol_type = other RNA
atgattaaacccccacccatcttttttagctgggatattctgaacatgttttgctccgttaccaagttgcacgaatgtaagaacgtcgagcaactgtattactttcttggatgtgaggctgcggagatatctaagttcctgtactcaggcgtgatcaaatacagatcctttagcattctgaagaagaatgggaatctccggaatattcgtgctcctgtgaaatacctgaaggagatacagtacaagatcaaagacgaacttgagaaatactacacgccaaaatcttgcgcccatgggttcattactgggaggaatatcatcactaatgcaaggcctcacgtgcgcaaagaatttattctgaacgtggatctgaagaacttttttgactcaatcaacttcggcagagtaagtagactcttccaaagtcagcccctgaacttgcctgagaatgttgcgcacgtgctggcccacatttgttgttacaataaagctttacctcagggtgcacccacctccccaatcatttccaacatgattagctacagacttgacagacagttgaaagaattagctaggaataatgcctgcacttatacccgttacgccgatgatatcacattcagctttactaagacaaagaagtatctaccgaagtctatcgtttctttaagcaaggataacaacattatcctcggacatgagtttaagaaagtcattgaggacaactggttcgagataaatgaagagaaaataaggctgcaacacaagacgcaacggcagagcgtgacaaatataaccgttaacacgaagatcaacattagtcgcaagttcaagaaacagactagtgctatggtcaacgcattattcaaatacggagccgctgaggccgagagagagtacttctcaaaatatcacaagggctatatcgccgagcggcagtataataaaatcaaggagaaacccggcctcctgttcacccaaaaggtgaggggccggctcaattatataaggttggtatgcggtaagaataatgaatcctggcgtaaactgatgtataagtacacacttgctattggccagcctaacgaggaatataatcgaactctttgggatatagcaggggactcgacttttatcctgtgggcaaattcatcacaggggtctggtttcttcctcgaaaacataggtctagtcacaaacgaacacgtaattaaaggcattgaggactccaatatcaacaacgacttgataatcctgtggctgcctaacgaacgaaaggagtacatcgaactgcatttggcctggaaagacgacaataccgaccttgcagtcataaccagcaacatcagttttctcgatatcaagccgctccaggtggaacccgttccaatctacgatatcgggaccgaggtttatgctgtgggatatccaaactatgatgcccgcgggtccattggcaaaccgaccatcatcacagcgaagatcacaagcatcatcacccgggaacgccagaaacggattgtcatcgaccagcccatcgtgcacggacattctggaggcgtggtgctaaacgccgatggacgagtcattgggattgtagccaacggtaatgcagagggcgaactccgcgtggtgccaaacgccttcattcctattgagacactgctgaatgaacataagtcgcgcaccaagctgtga

SEQ ID NO: 7822 - RNA, 1608 nt, synthetic construct
  source 1..1608: mol_type = other RNA
atgctgtcttatctgtacagcaaggatatcaagtatcgcaatttcgaaatagacaaaaagaacggcaagaagagaaaaatcgtcgctcctgtgaagaaattgaagttcctccagtacaaggttaaggctgccctcgagccatattacaaacccaagaaatgcaaccacggatttgttaaagaccgggacattgtcaccaatgcacaggcacatctgcgcaaagagttcgtgctcaatatcgatctggtggactacttcggaaacatcacattcggtagggttaaacgcctgttcgagtcaaatcccttaaacctgagtcactctgtggcaacagtcttggcacaaatctgctgccataacggctgtctccctcaaggcgccccatcttcccccatcgtgagcaatatggttacgtttaagttggacaatcaactccgagctttagcgattaagtcatcttgttcctatagcaggtatgcagatgacatcactttttcctttactaacagagaaaggagcctgccaaaaatgatcgccttttacaagaacgagaaactacagctggggagtagtctggaaaaggtgattgaagagaatggattcagtattaacgacgacaaaaccaggatgcagcatcggacccagagacagtcggtaaccaacataactgtgaacgagaagattaacgtgaatcgtagatttatacggtccacttctgcaatgatcaacgcccttattaaatatgggccagccgccgctgaaaaggagcacttcgaaaaatacctaaaggggtatatcccagcccgccaccatatgaaaatggctaaatatcccggaaagatgtttatccagaaagttagaggtcgactgaactttatacgaatggtgcgtggaaacacatgtgatgtttggcgtaagatgatgtacctttacaccgtcgctataggtgctcctaatgaagattacaatatgtcatggcttgaactggccgcggagtccacactcgtgattcacacctacactgattccaatatggcacaggggtcaggatttatagtggaggatattggcattattaccaacgagcacgtcgtcagaggcataacaagcaagaatatcaaggatggactggagatgcataggtggaataatgaaacagccaagttttcctttgtagaattgatcgggatggatgaggatatagatcttgccatcttcgaaccatccattcacttagccaccttcacaccgctgaagatcgagaacaatcctgactactcgaacggtaccatcgtgcatactatcggatatcctaactaccagagcggtgaggagcctacgtacatcacagccaagatcatcggcaaaaccaaaaggatgcttcaaccccggattaagattgacgaaaacatccggcacggcaattctgggggcgtggtaatgaataccgatggcaaggtgattggggtcgtctcaaatgggaacgccatcggcgctacgtctcagaatgacagcagtttcattccgattcagactctcctggaatatcacgagaaactgcggaacttggtagcgcgccccttccttgacgaggtggacagcctctga

SEQ ID NO: 7823 - RNA, 1698 nt, synthetic construct
  source 1..1698: mol_type = other RNA
atgcggcaaaaccctcccgccttccttcgcgaactgaggtatcttatggactctcagactgtgctacccccacgggctaaactggccaattgctcaactctggatcagctggcctctctgctgaatacagaggtagataaactgctaaagctgatatatccccataacaggcagtacattagtttttcaattcccaagaaagacgggtcccggaggttaataagcacgccaaaaccgacactgaaaaactaccagatgatcattgcaagcgagcttcaccatcattacatcccgagagcatccgctcatgcctttatcgagcaaaaatctgtgctcaccaatgcttcccctcatgtgaataaaaggtacgtcttgaatttggatctggaggacttcttcggaacaattacttttggccgcgtcaagcgtcttcttcagagccctccactgtctttaacccacaatgttgctactgtggttgcacacatttgttgctacaagggcagactgccacaaggagccccgtcttcaccaatcattagtaacatgatcgcattcaagctggacaatcagctgctgaagctcgccaagcagtaccgattcacttacacccggtatgcggatgatatcacgctcagtttcaaccagaagcggaagacaagcctgcctaccgatatagtgaagtttgatgaagactcgctggccctcggtcggttactgctgcgtacgatcgagtctaacggattttcagtcaatgacgacaaaaccaggctagccactaaaaacgaccgccaggccgttacaaatttgaccgtcaaccaatttgtaaatgtcaacagattgttccttcgacagacctctgctatgatcaatgctctcaatgtgtatggagcccaggatgcagaaatcgagtacctaaagaagtaccacaaaggctatctttcaccccgaaagcagttaaagcacaagaatgagcccggcaaattctttaagcagatggtgcgtggcagactcaactttatccgcatggtcaaggggaaggatagcctggtctggcgaaagctcatgtaccgctacacagtcgcgattggtgagccaaatgcgaggtatgcgttgtctcccgcagaactcgccaaaagatccctctttgtaattcacaacctgacagatgattccgagggggtggggaccggtttcaagctgaacacatttggcatggttactaaccaacacgtgattgcttatctcgacaattcgaacctggccgacttctgtgtgattgagtggattgaaaaaatggaccagcaatttcccagtgtacagctcatcttgagtgatgaaaagtccgatattgctatagtggaaggggcatccatgaatatcgtgcctgccttggacgctagcacatccccagattatacccctggcaccacgtgcacactgcttggattccctaactataaaaccgaagacagcccaaccgttatagaatgtagaatcgtgcgcgagatcgaggtcgataacgaacccagaatcgttgtggacgagaaagttacacacggaatgagcggtgggcctgtgatcgacagtgacggcttggtgatcggcattatttcaaacggtagcaaatacaattccactgacgacagggtgaacgcattcatacctatcaagaccttactgctcactaaaaactga

SEQ ID NO: 7824 - RNA, 1722 nt, synthetic construct
  source 1..1722: mol_type = other RNA
atgttcaccctggaggatcacatcaatccaaccagacttgagcactgttcagacctccatattcttagccgtctgttaggggtgaggagggattacctgcttaaactgctttattcggagaataggttgtactatcacttcgacatctcaaagaaaaatggtgataaacgcactattcacgctccgatcgagccactgaagaacctacaaaggaaaataaaggtggagctcgagaagtactatatcccccgaggttctactcacggattcgttaagaagcggaacattataaccaacgcaaccccacacttgcggaagcgccatgtctttaacattgatctcgcggacttcttcgggaccattacgttcggacgcgtgcagcgcgtgttgcaaagttctcccttcaacatgccttataacgttgctacagtggtggcccagatctgttgccatgaaggcgctctgccccaaggcgcacctactagcccaatagtatcaaacataatcgcgtttaagctggacaatcagctgcttaagctagcccagaagtacaggtgtacatacactaggtacgccgacgatatctctttttcgtttagacaacagcgtaacaagctgcctgaggccattgtttccttcaatggcgacaaagttataccgggggctaaactcactgacgtcatctccaagaacggcttcaaaattaattccagtaagacccgcttgcagtccaagcagaacagacaggccgtcactaatatcactgtcaatgagaaacttaacgtgaatcggcggtttctgaggagaaccagcagcatgctcaacgccgccttgcggtatggatttcctaaggcggaaagcgtacacttcgagcattttcactccgactacatccctccccgccacagcaaaaaaatgcatgaagaacccggcttactgttccggcaaaaattaagggggagactgaactttatccgcgaggtgagagggaaatcctgccccgtgtggcgtaagctgatgtacatgtatacagttgcaactgaagagccaaatgaggattacaatcttagcatagatgctatcacggcccgaagtacggtggtcatatgggacctcagtaattcatgcggcgaaacattcagtggctcaggtttcatgttgaaaggggctggtctagtgacgaaccagcatgttgtaaagggaattatcagcggcagagaggcaacagaactgcagatcgactggctcgaaaagaaatgcctgaattttctcgacgcccgaatcgtgattgcagatggatgtgccgacgtagccctgatcacaagttctatcgccgatcggcacatggagcccctcgatattgaaccctatccagattactccgtgggcagggctgtcaagctgattggataccctgattatcgggaaggcgacaccttttctgtaaccgataccgtgattgttcgagagtacgggcaggctgacagccgcagaatcgaagtcagagagcagattttccatgggatgtcaggaggagtggtcctgaatgaagacgggcgggtcatcggcatagtgtctaacggtattaaatatggcacaacatcccagctgccaagcagttttatccctatctcaacactgacagcaaaggtgaccaactttcgaaaggtgaaaattgagcagttactctccattttcgcatcctctatcaattctacctga

SEQ ID NO: 7825 - RNA, 1662 nt, synthetic construct
  source 1..1662: mol_type = other RNA
atgttcgatatcatcgaccccaagacactgaacgaatgcttcacagtagagctcctcgctaaattcttgaatactgactacccgaatctgagtaaactgatttatggcaagaagtcaccttaccgaactttttatatcccaaaaaagagcggggggactcgtgaaattaaggctccaatcaaaaccctgaagctcatccagcaaaagctgaaagtggaattcgaagattatagctcaccccgcgtggcttctcacggatttgtgaaaggcagatccatcctgacaaacgcaaaactgcatataaaccggaattatgtgctgaacgtggatctcgaaagcttcttcaacagtattaattttggccggatcaagaagttgtttgagtctacccccttcaagtttacttcccctgtggccaccgtgttagcccaaatctgctgtcatgagaattcccttccacagggggcacccacttctcctattctgagtaatatgatcgcgttcaagctggacggagagctgatgcgcctggctaagaagatcaacttcaggtatactagatatgtcgacgacctaactataagctgccagtccttagcccagcttgagaaacataagatcatttacaggtcgaaggaagcgaaatacgaggctggctttacgctatcacgactgattgaaaagaacggtttcaagatcaacaacgagaagactagattacagcagaggaccgagcatcagggcgtcacaggattgaccgtcaacgtgaagctgaatgtaagtagaacatttatacggcagacctcctcgatgattaatgcactcattattcacggagctgagaaaagcgaacacgagcacttcaccaaatacttcgatggctatgtacccaatcgccaacagcagagaattagcaagaagcctggtgatctttttataaaaaaggtgaaggggagggtaaactatattaaaatgatccggggagccgcatgcccagtttatcgcaaactggcctaccagcttacgtgtggcctcgggtgtcccaatgaagattataataaggattggctcgattggatctctgacagcgttttagtgctggacaataatctcgacatcctgcagggcacagccttttacgcagacggattgggtatcgtcaccaatcaacacaacctcgagtccatcaccgaagataacattgccgggaatattaccttggtggagccactcaactattcaaagaaataccagctgctaggcttgaacaagacatccgaaaaatacgacattgcgctgatcgacttcggagtgcacgccaaatcaaagagggctcttgagatcgcagattctccgctgtacaaaacagggacaacagtttacgctatagggtaccccaatcactctgagggcactaaacctacgatacttgaatgtaagatcgttaacaaaaccaagtggcagggtgagtgccgttacaaaatagaccaaaatatccaccatggatttagcggcggcccggtcatagacaccgatggcaaggttattggtatcgtgagcaacgggaacgccgtgggagcaagtaaatccaccgaggacatgtttattccagtcgaaacggtcatgaagtttgccaacgacgccaaacctgaggattgttga

SEQ ID NO: 7826 - RNA, 1647 nt, synthetic construct
  source 1..1647: mol_type = other RNA
atgtttggtattaccgagcccaagactcttaatgagtgctttaccgtggaatccctggccaagttcctgggcactgactattcaagtctggcaaagctcttgtactctaagagatccaactatcgaactttctacattcctaaaaagaccggcgggactagggaaattaaagcacccaccaaacgtctgcgcttcatccagcagaagctcaaggtgattttcgaagaatattccagtcctagggctgcgtcgcacggctttgtcaagaagcgcagcatagtgacaaacgcacagcaccatgtaggccgcgccttcgtgctgaacgtagacctggaggatttctttggctccatcaactttggccggatcaaacgactgttcgagagccagccctttaatctggcccaccccattgccacagtgttggctcagatttgctgtcatgagggttgtctcccacagggggcgcctacaagccctctcctgtctaacatgatagcctttaaacttgatggggctctgatgaagatggctaaaggcgtgaattttcggtacactagatatgtagacgatcttacaatttcatgccagtctctgacccaactcataaagcataagattgtgcagtgtgataaggacgggaagtattctgttggcttcatcctcaaccagttgatcgaacagaatggattcaagactaagagcgacaaaacaagattacaaaagcgaggagaacatcaaggtgttacagggctgactgttaacgagaaaattaatgtctcgaggaccttcatccggcagacctctagtatgattcacgccctgatcaagttcggagcagagaaggctgaaaaggagcactttaccaaatactttgatgggtacatcccaatcaggcagcaacagaggttgtcaaagttcccaggggatttattcattaagaaactgaaaggacgggtcaattacatcaaaatgataagagggagtgcttgcccggtgtaccgtaaactcgcgtaccagctcacgattgggctgggctgtccaaacgaagactataataaggactggctgaactggatcagtgagagcgtcctcgtcttggacaataaccttgatagcctgcaaggaacagcttttttcgctaaagacattggattcgtgacgaaccagcacaacttgaagagcatcaccaaggataactttagtggtaagatcaagttaactgagcccctgaattatagcaaaagctatccccttatctcctttctaaaatcatccgaggagctggatattgccctcatagactttaatatccatgagaaatccaagcggcccttagagatcgccgaatccttcgtgtgcagagcaggccagacggtttacgccatcggataccctaaccacgcagagggctcacctccgacaatccttgaatgtaaaataatcgaccgcgccaaatgggataaccaacttcgcattaaaattgaccagaatatccatcacggcttctcaggaggagcagtgatagacacggatggtaaactggtgggtatagtttctaatggcaatgccgtcggggccccacactctaccgataatatgttcatcccaatcgaaacactactaacctttgcgtccgaggactga

SEQ ID NO: 7827 - RNA, 1638 nt, synthetic construct
  source 1..1638: mol_type = other RNA
atgctgttcgggaccacacccaaggatctcaagagttgcaacacagtagaaggtctggctcatctcctgggcacagactataattccttgggaaagctactctatgggaaaaagactttgtaccgcgcttttgacatagtaaagaagtccggaggcgtgcgtgaaattacaacgcccatcccatcgctgaaagtgcttcagcgcaaacttaaagatctgatcgaaccctttacaagccaccgagaggccgcgcacggattcatcagaaaacgaggggtgctgacgaacgctaccaggcacgtcggcaagaagcacgtgctaaatactgatctggaagacttttttgggactatcaactttgggcgcgtgaaacgactgttcgagtctagtcccttcgaattaagcagccaggtggcaactgtgctcgctcagatcgtctgctacaagaacagactgccacagggggcacccacctcaccaatcatctctaacatgatcgctttcaaactggatggtaacctcactagccttgctaggaaggccaaaagtacctacaccaggtacgcagacgatctgaccttctcctgtcattcatccatgctgttggagaaaaacggcataatcaaattcgacaaagataataaggccattgctggcaaggagctggtggccattataaaatcgaatggcttcgagatcaaccatcaaaagaccaggctgcagtcacgcggatctcatcaaggggtcacaggaataaccgttaatgagaagccaaatgtttctaggactttcattcggaaaacttccagcattctgtacgcaattaatcgctggggcgctgagcaggcagaagaggagcactttgccaagtaccgccgtggatattctccccctcgggcccaattgaggcggaagaagaagccgggcgacctcattctgaagatggttaagggacaggttaactacaacagaatgatccgtggtgagtcttgtccagtctatagaaagctagcgtaccagcttacaatcgcccttggttgtccgaacgaagacttgaataaagattggcggagctggattgctgagagtacattcattgtggacaatgtggaggatatttgccagggttcttgcgtgttaattaaggatatcggctttgtctccaaccaacacgtgctgaacagcatcaccaaatccaattttaccgccaacgtaacgatctgcgatccctatgactactcacggaaatatcctcttataagcctcctgaaaatgtccatagagaaggatatcgccttaatcgacgcaggggtacacgcgctcagcctgagaggcctcgaagtcgccgaatcacctaattacaagatcggcaccaaagtgatcgcgattggcttccctaatcacactgaaggtacgcctcctacaatactcgattgtaaaataatcggcagaactaagtggcatcatgaacctcggatcaaggttgacagtaatatccaccatgggttttcaggaggggccgtcgtggacttagacggcaaagtgattggaattgttgccaatggaaccgcagtcggtgctccgaaggccgcagacaacttgtttattccaattgagacagtggcccagtatgcctga

SEQ ID NO: 7828 - RNA, 1650 nt, synthetic construct
  source 1..1650: mol_type = other RNA
atgatagacttcttcccaaaaaagttgtctgactgtgctaatgtggagatgctggcctaccttttagatacaaactatgaagcacttgggtccttcctatattcaaaacgcaagttgtaccgttcgtttgagattccaaagaagagtgggggcatgcgcgaaattaccactcctatcaaacccctcaaagagatacagcggaaactgaaaccgctgatcgaaccgtatacctcccacagagaggcagcccatggcttcattgagggaaagagcatcgtgagcaacgcctcccgccatgttcgaaaaaattttgtgttcaacctggatctgctggattttttcggctcaataaatttcggcagagtgaagagactcttcgaatctgcccccttcaacctccctgcaaaggtcgctactgtagtagcacagattgtgtgcttcgataatcagcttccccagggggccccaacttccccattgatcagtaacctgatagcctttaagctggacggcaacctgaccgctctggccagaagggcgggtgtgaattatagtcgctacgctgacgacctgaccttttcatcaaacagcttaaatctgctgaagaatcacgggatcctgacgatagatgagagcgcccaagtaaaagtgggaaaggaccttaaaaacatcatcaaggcaaacgggttcgatatcaatgtgaacaaaacccgtttgcaaggcagaggtcagcatcagggggtcaccggaatcactgtcaatcggaaggtcaacgtcactaggtctttcgtaaggaaaacagccagcatcctgtacagtatctgcaagtggggttctgctaacgctgaacgggagcacctgaagaagtatcgcacaaagtcgttgtctccccgggcccggcaaaggacctttctaaacgagggcgacttaatcctgaagattgtcaaaggaagggtcaattatattaggatggtcaaaggagaagcaagtccggtctaccgacgactagcttacagattgacagtggcgcttggctgtcctaatgaggattataataaggactgggaaaccttgctggccgaatccgtgtacgttctccataactattacgactccacccagggttcctgtgtgctgatcgagaatctcggctttgtgactaacaagcacgtgctcaagtgcgtgacgacttcaaattttgaggggcatgttgttattacggggccatttgattacgccaaggacctccctctcataagctttctcggggcgagcgacaccaatgacgttgccctaatctgcccctccgtgcaccaacactctcagcccagcctcaaaattgctagtagccctgattaccgtaaaggcacaaaggtggtggcgatcggattcccaaatcacacagagggcacacctcccgaaatcctgtactgtaccatccagggaaagacaaagtttcagaaaaacgatcggtatctgctctcatgcaacattcaccatggcttctctgggggtgcagtgcttaatcttgatggagacgtcatcggcattgttagcaacggaaacgaagtgggtgcccgcaaatccgttggaaacatgtttattcctattcaggatgtagctgaggcattatctcacatttccaaatga

SEQ ID NO: 7829 - RNA, 1806 nt, synthetic construct
  source 1..1806: mol_type = other RNA
atggctgccttcgaatttaatttccccacaactatttgtgtcgggcatttttctaccgctgttttacactcgaagtttgcagataagttcgtagcgcagctggcgatcgaaaagacttggccgccactctttcacatacggattttcatgcctagcttcagtttaaaagagtgcaatgatgtgtggaagctctgcgatctcctgggtgtaaatttcgagaacctgagcaaaaaggtgtatccttctaacaatagactttatcggtgcttctttatcccaaagaagagcggcggccttagagagatttattgccctattaagtctctgaaaaacctccagaaaaagatcaagatcgagctggagaaggaaatcaaatatcgttctccagcccatggcttcataaagggtaagtctattatcacgaatgccgagcaacatatcggaaaaaccatagtcttaaacctggatctcgaagatttcttcaagaacattcacttcggccgcatcaaaaaactctttgaaagttccccactaaatctaaaacactccgtgtccacttttctggcccacatttgctgccgtgggggggtgttgatagccggttcaccaacatcacccatcatctccaatatgatctgttacaaacttgatggacagctgcagagactcgcaaaaaagaatcactgtacttacaccaggtatgccgacgacataacattctcatttacatgttcagagcgaaaactgccccgaggtatagtgcatattgacgagagcagccttctggggtttaagctgggagacgagttatccgaaatcatcagttccaataacttcacccttaacgagagcaaaatcaggttgtctaggaagagccagaggcaggaggttaccggacttatcgttaattctaaagtgaacgtcaagagggactttatccgcagaacaagctccatgatccatgctctcaagattcatggtgccgaagacgctgagaaggaacactacctgaagtacaagaaaacatacatccccgagagacaaaataaacggcagaaagacaagccgggggacttgtacaccaaagtgatcaaaggaaggctcaactacctgcgcatggtccgaggcgaagactgtaacctatggcggaaactgatgtacgatttcacagttgccatgaaaaacccagacgagtcatataagcgcacttggctggatgacgcagcagaatccaccgtgatatttaatacctatgacggctgtggaagtgggttcttgattaaccacgacatcaagaagtatccaaacggccttattataacaaattaccatgttatccccgagattaacagtgataacatctccaacattgaagtgcacacctggatgaatccttcaaagggctttttgctcctgaaatttgtggcatctagcaaggacctggatattgctatactgaccgccgatatcccgtttcctgtgtcgaaatttctggtcgtcaacagttgccccaattacagacctggcataaaaattcacacgattggctatcccgattactccagtggtgaggaccctactttcatctcaaccaagattaagggaaaaacgacttatcatggccagttgcggtaccaaatcatcgatgaaattaaacacgggaacagcggggggcccgtctttgatagcgaccgcaaggtaatcggaattgtgtctaatggaaacgagaagggcgctcctaagaataataagagctccttcatccccattgaaactttgctggacttcattaactgccagaagtga

SEQ ID NO: 7830 - RNA, 1647 nt, synthetic construct
  source 1..1647: mol_type = other RNA
atgcaagtgcccctacccaacaaccttaaggactgttcttgtgttgaaggacttgcccagtatttaggctttactaactacgatgacctgaaaacactgatctacccctccgtcgatcacctctataaaggattctcaatcccaaagaagaacggcgagttccggctgattgatgcgcccaagaaggagttgaagaaaatacaaagattcctcgcaaatgaattggcccaagtgtacaccccgcgcaacgctacccatggattcgttaaagaaaggagtatcgtaacaaatgcctccaaacatgtcgacaagaaatacgtgctgaacctcgacctagaggacttctttggttccatccacttcggccgagtgcgcaatctttttcagagccacccattgaaccttcaccacagcgtggctactgtgctgagccacctctgctgtcacaacggcaagctgccacagggcgcccctacttcccctataatttctaatatgattgcctatcgcctcgataagcagctccagacgttagcgtctaaaaatcgatgtacttacaccaggtacgctgacgatataacctttagcttcactcagaccagagggcggttgcctaaacccatcgcagtcctgaccagggatttacaactcagcctcggaaacgagttgaaggagcttatcacggaaaatggcttcgtcatcaattcagacaaaacaaggatcgcagcccgaagcaatcgtcaggaagtgacaggggtgatcgttaatgagaggatgaacgtgagtcgcaaatatataaagcaaactcgctccatgctgtacgcttggaagaaatttggcctggaggacactgaggaaacgtatctgcgccagttccatggcaagaccgtttttgagaagcaccagagaaggatcgacgaaaagaagggtcagtttttcaagaaaatcgtgaaagggagaattaatttcatcaagatggtgcgtggtgcagatgacttaatttacagaaaggtggcctatgagttctcggtgctcatcggaaagcctaaacccgagctggtgcagacacctctggacaaagcctgcgattctatttttgtggtcgagaatctgctagatgactctcagggcacagctttcctcctaaaagggattggaatcgtcacaaatgagcacgttgttagaggaattgatgaagatctctcagaactgctggagttgtttagacatcacgaacaagaaaccaagcggccagtcaagttccagaaatcttgccggagccgtgacctggccattctgaagccaactacctcatttaacgggataaaaaggctgcaggtcggtgacgattcccagatcggcataggaagtgtggtaaccgtattgggctttccccagtactcaccaggggagacgccttatatcaacacagggaaaattattcagtcgaaggtcctttttggcgaacgggtgtggctgctggatattcctgtcattcatggtaacagtggggggccagtgttgaacgaccggcaggaggtaataggcgtagcagcgatcggttcccccacccatgacctgagtacaaagcttcatggattcatcccgattagcaccctgctggcttacgttgaagagtgcaattga

SEQ ID NO: 7831 - RNA, 1716 nt, synthetic construct
  source 1..1716: mol_type = other RNA
atggtagatattgccaaaatcgcagccatcgccgcctcatcctcatttacttcggtgcccgtaccagtgcagctgaaggattgtacttgcgtggaaggcttagctaagtacctgggcttcaaagattatgacgaactgaagggcattgtatatccctccacttcacaccattataagtctttccgaattcccaagaagaatggcgactttagaaccatcgaggcccctaggaaacaactcaaaaagctgcttaagcgtatctccacctctctggaagaggtttatagcccacggaacgctacccatggatttgtgaagggacgcagtattgtcactaatgcgagcaagcacgcagacaagaaatacgtcctcaatttagatctgaacgacttctttggtaccattcatttcggacgtctgaggaatctcttccaatcccacccacttaatctaagtcattctgtggccacagtgctgtcgcacatctgttgccacaacggtaagcttcctcagggtagcccggcgagtccgattatatcaaatatgattgcttaccgccttgataaacagcttcagacgctagctagcaaaaatcgctctacttttacaaggtacgcggacgatcttacattcagttttacccaaacaagaggaaggctgcccaagcagatcgtttctttgtccagagatctccagctgaaactggggcacgagttaaccgacatagtgaatgaaaatgggtttagcattaacagcagcaaaaccagaatatccgcaagatctcatcgccaggacgtgacggggatcatagtcaacgagcggatgaacgtcacaaggaaatacatcaagcagaccaaatcaatgatatacgcatggaagaagttcggaatcgagaatgctgaagatgagtacttgaagaactatcacgggaaaaagatcttcgaaaaacaccagaggagaatcaacgagaaaaagggacagttcttccggaaaatcgtgaagggcagggtcaatttcattaaaatggtacgcggatcagatgacctaatctaccggaagctggcctatgacttttccgctctcattggaaagccaaaacccgacctgatacgaactcctttggacaaggcctgtgactctattttcatcattgagaacatgctggaccagagccagggcaccggctttctgttgaagggaatcgggatcgtcactaacgagcatgtggtgagtgacattgacgaagatctcagcgacctcttggagctctttcgacaccatgaacaggatatcaaaagacctgtgaagttccagaagtcttgcaaatcccgcgatttggccatactgaaacctaccacttcctataatgggatcaagcggctcccagtgggtgatgatagccagctgggcgtcggttccaaagtcaccgtgctgggctttcctcaatactctcccggcgagacgccatatatcaacacaggcaagattatacagtcaaaactgttgtacaacgagaagatttggctgctggatatcccagtgatccacggcaacagcgggggtcctgttttaaatgagcggcaagaagttgttggggttgctgcaattgggagccccaaacacgacaatagtacaaagcttcatggctttattcccatcagtacactcatcaattacgcccaagaaaacaacaagtccaacaacaataacaactga

SEQ ID NO: 7832 - RNA, 1680 nt, synthetic construct
  source 1..1680: mol_type = other RNA
atgaccagcgcaatatccattttttctcttatctcccctatcaccacacccacgacactgaatcagtgcgtttgtgtcgaacggctggccagattcctcggtttcgctagttacagcgagcttcaaaatctcttctacccgtcaacttcgatccattaccgggggtttcatatccccaaaaaaaacggggaatacagactaatagaggcacctaagaagaaactgaaagagatacagaagctgatttctaaggaactctctgcgctgtatagcccaaggaaaagcacgcatggctttgtaccagagagaagtattgtatccaacgcttcttgtcacgtcgataagaagtatgtgctgaacctggacctcttagatttctttgggagcatacacttcggtagagtgcgcaatctctttcaatcccacccggtcaatcttccacttcctgtggccacagtgctggcgcacttatgttgccacaacggcaagcttccccagggtgcccctacaagcccaatcattagtaacatgattgcttatcgccttgacaagcaattacagactcttgccgcaaataatcgctgcagttacacacggtatgcagatgacatcactttctctttcacccaaacgcggggccgtttacccaaccagatagtgaccgtgactagggagctgcagctctatctgggtacagagctcaagaacgtgatttctgaaaatggtttcaccatcaactcccagaagacgagaatcgccagcaggtcccagaaacaagctgtgacaggaattatcgttaacgagcgcatgaacgtgagtcgaaaatttatccggcagacccgctccatgctgtatgcctggaaaaggttcgggctggaacaggctgaatctgaatacctgcagtcgtaccacgggaaaaccgtattcgaaaagcaccagcgccgtattaacgagaaggccggccagttttttagaaaaatcgtgaagggacgtatcaacttcataaagatggtcaggggcgccgacgatctgatttatcgaaagatcgcatatgattactccgtacggattggaaaaccaaaacatgacctcattaagacaccactggataaggcctgtgagagtatcttcatcattgagtcagagttggactacgcgcaggggactgcttttctcctcaaagacattggactgatcaccaacgagcatgttgttgacggaatcgatgaggagctgtcagagctattgaacgtgtacaggtatttcgaacaagataagaagcgactcgtgaattttgaaaagtcctgcaaatctagggatttagccatcttgaagcctaccactgactttaatggcattaagagactgaaggtcggagacgatagtatgctgaatattggctcaaaagtgaccgtcctaggctttccccagtacagccccggggagactccttacattaacaccgggaagataatacagtcaaagatgttgtatggagaaaaattgtggctgctagacatcccagttatccacggcaattcagggggccccgtgctgaatgacaaatatgaggtcattggaatcgcagctatcggcagccccaaacatgataattcaactaaattgcacggcttcatccctatttccacattgctggcctacgctaaagaaaagagctga

SEQ ID NO: 7833 - RNA, 1668 nt, synthetic construct
  source 1..1668: mol_type = other RNA
atgcttaatttttccacgagcttgatcatcaagactcctacatgtctcaaagagtgcaagtgtgtggagggattagccagatttctaggcttcacatcatactctcagctcgatgaactcgtgtacccgtccatcaaccacttgtactatagcttcaagatacccaaaaagaatggtcataagaggattatcaaggcccctcgtaaatctctcaagtcaatccaagaactgattaacatcgaactgggtaactacttcagccctcgcaacagtacgcatggattcatcaagaaccggtcaattgtgagtaatgctgccaaacacgtggacaagaagtacgtgctgaatctcgatctagaaaatttcttcgattcgatccactttggcagagttagaaatctgttctgttcatatccactggtcctgtctaaaccagtcgcaacggtcttgtcccacctttgctgttaccagggaaagcttcctcagggggcccccacatctccaattatatcgaatatgattgcctataggcttgataaggagattcaatatctcgcgtccaacaatcgatgtacatacacccgttacgccgatgacctgacgtttagctttacccagaagcggcggaaactgccccggagtatagtgaaggtttcaagtgacctggacattaccataggccacgaccttaaggagatcatttccaaaaatggctttacaatcaacgattctaagaccaggatcagctctaaatgccaaaggcaggaagtgactggcattacagtcaacgagcgcatgaatgttccgcgcagctttatcaaacaaacacggagtatgttgtatgcttggaaaacttttggactcgagaacgcagagttccactacctggataagtaccataaaaagaccctgttcgaaaagcacaagcgcaaaattgacaaaaaggagggcgtgtttttccagaagattgtaaaggggcgaataaacttcattaaaatggtaaggggaagcgaagacatcatctatagaaagatagcgtacgattattccgtgctgactggtaaaccaaattccgatctgatcaagactcccctggataaagtctgcgactccattttcatcatcgagaatatgttagacaccgcccaagggaccgcttttctgctgaaagacatcggtatgataactaacgagcacgtggtagacggcattgatgaggacaaccctgaactactcgagttctttcgacattttgaacagaccaacaaaaaaaacgtgacctttaagaaatcctgcaaaagcagggatttggcaatcctgaagccaacaaaggatttcaatggcatcaaacgcttagacgtcggggacgattcatcacttgatatagggagcgaggtcaccgttctgggattcccgcagtattctcccgacgaaacaccctatattaacactggcaagattatccagtctaaaatcctctacgaccagaagatttggctgttagacattccaatcatacatggtaatagtgggggccccgtgctggataaagaccagaaggttattgggatcgctagtagaggaagcgcaaaacatgaccagagcaccaagttgcacgggtttatccctatttccactctccttaagtacttcaaagagaagtattga

SEQ ID NO: 7834 - RNA, 1698 nt, synthetic construct
  source 1..1698: mol_type = other RNA
atgacccttcccaacactatactgctctccctgaagaccgcaaagttacagctgaatccaacaaagcccacttgtattacgggttgtcattctaccgatagcctggccttgttcctgggttttcagaattacaacgagctacaaaagttgatctatccatccgtgaaaaatctctacagggcgttttacattgataagaagaatggggataagagactgatttccgctccaaagaagaaactgaagtccatccagcggattatttcgcaaagtctctcaaatgtctactctcccagaaaaagcgcccacggctttatccaggggaagagcatactgacaaacgcctccatgcatgttgacaagaaatttgtcctgaatatcgacctgctgggcttcttcgattgcctccacttcggccgcgtgagaaacctgtttcagagttatcctcttaatcttaccccctccgtggcgactgttttagctcacatctgttgcctgaatgggaaacttccacagggcgctccaacctctcccataatcagcaacatgattgcatacaaactggacaaggacttgcatcaactggcacttgcaaatcggtccacatatacacgatacgtggacgacattactttcagttttacacaatctcgacgccgtttgccacgcgacatcgtgacagtactgaagggcaacaatttgaaattaggggagaagataacttctatcatcgaaaagaacggatttaagatcaataccgataaaactcgctgtttctctcaaaactttaggcaggtggtaacgggccttgttgtgaatgaaagagctaatgtgagtaggaactttatccgtcagactagatccatgatctacgcttggaagaagttcggcttagtaaatgccgccctggagtatctctcaaaatatcacgacaagtcaattctggagaaacacgaattcttcatcaagaagaacaaggacaagggtgtttttttcagcaagatagtgctcgggaggatctactttataggcatggtacgggggaaaagtgaccgattgttcagggaaattctttactcgtacactgagtgcattggaaaacctaaccgggccctgattaacacccccctcgataagatcggtgaaagcattttcatcattgataacctcctcgacgatagtcagggcaccggtttcttgctggatggcgttggactgatcaccaaccagcatgtcgtggatgggatagagaaagagaacagcgagctcctcgaaatttatcgctattacgagcaggacaaaaagcggaaatccaatttcgaaaaagcctgccgtgccagagatctagccatcttgaaacctacaacagaatttaatgggatcaagaggttaaaagtcggagacgatagcatcctaaaaataggatcaaaagtgacggtgatgggtttcccgcagtattcacctggagagacaccgtacatcaactccggcaagattgtgcagagcaaaaaactgttcgagaataatgtctggcttgtggatattcccgtcattcacggaaacagcggcggacctgttctgaacgacaaactcgaagtgattggaatcgcttcaatagggtctgcacggcacgaccagtcaaccaagctacatggctttatccctatttctaccctgatcaactatgtcaacgagtga

SEQ ID NO: 7835 - RNA, 1701 nt, synthetic construct
  source 1..1701: mol_type = other RNA
atgatatatataaactacttcgtctcacagctgtccactcagcttccaaaaattacgttgcgaccttgggtccgaagtctgaagcactgtacatcagtggacgacttggcgcactttctcggatttaattcatacggcgaactcaactccctggtgtacccacataccaagaacctctacaaatctttctccataagcaaaaagtctggaggggagagaaatattaaggcaccaaagtccaagttaaaatctatccagaggtggattggccaggacctggagaattattataggcccagatccgctagtcacgggttcattaatggaaagagcatcatcaccaatgccaaaggccatgtggataaacgctttgtgctaaacattgatttggaggacttttttaccactatccactttgggcgggtaaagtcgttgtttcaggctcatcccctgaaccttagccactcagtggcaaccgtgcttgcccacatctgctgcaatgagggcgtgcttccccaaggagcccctacttctccaatcatatctaacatgatcgcctataagttagacaaggagctgacaaacctggccataaaaaatcggtgtacctatacgcgctatgtagacgatatcacattcagcttcactcagaaactgggtcggctgcctagaagtatcatcaaggttacgaagcagaacaaacaaatcttggggaacgatctcctgggcgtcatttccaccaacggctttcggatcaacagtaagaaaacaaggttgctctcccgggatcaaaggcaggaggtgaccggtcttactgtcaacgataaacttaacattcccaggaccttcattagagaaacgagatctatgctatacgcttggaaaaagcacggcctcattgaagcggaggaagagtacattaagaagtaccacaagaagaccttaacatataatcagcagcggatgctcaaacataacaaaggtaacttctttcgtaagatcgtccatggaaaagtcaattacataaagatggtacgcggagaagatgatcctatttaccgtaaaatagcttatcagtacctcagtcgaatcggtaagcccgataaagacctgcttaaaactccacacgacctgatagcagactcaacctttataattgagtgctacctggatcaagggcaaggcacaggattcctgctggaaaatatcgggctcgttacaaatgagcacgtaattgaaggaatcgatgccagcgacgccgacctgctggagatttaccgttactatgagatggacaataagcgcaaggtgagcttcggtaaatcggataagtcactagacttagggatcttgaagccgaccactgatttcaacggaattaagagactgaaaattggcgatgatagcaccctatccgtgggccaaaaagtgacagttatcgggttccctcagtattcccccaatgacaccccttatatcaataccggcaagatcatccagagtaaagtcctgtttggccagcagatctggctgctggacattcccgtgatccacggtaactctggcgggccagttgtgaatgaaaataacgaagttattggcgtggcaacaaggggggctgaaaagcatgaccagagcacaaagttccatggattcatcccgattagccgcctcgttgagtaccatactacagacacttga

SEQ ID NO: 7836 - RNA, 1656 nt, synthetic construct
  source 1..1656: mol_type = other RNA
atgtttgatccatttaaggtcgctcctcctaaattaaaactgcatcagtgtgtcgatgtgcacgaactgagtgctatcctgggaactaattacaaccagctgtcaaagctgatctatcctaccactcagaattcttactactgcttcagcattgacaaaatgaacggaaataaacgcgtcataaatgcaccgaaaaataaactgaagtccatacagcgaaggctcgcatacctgctcaacgagtattatcccgtgagagacgtagcacacggatttatcaagaacaagtcaatcgtcagtaacgccgaacagcacgtgctaaaaaactgcgtattcaacattgacttagagaacttctttggacaaatccattttggacgtattcggaacctgttgttctctcccccttttaacttctcgacctccgtttcgacagttatctctcacatctgttgttctgacgggttcctaccacagggcgcgcccactagcccaattatttctaaccttatctgctacaagctggataacgagctgcgcaggctagctgtgtatcataaatgtacgtatacaaggtacgtggatgatatcacattttcatttacgtgcaaggcaaaccggatccccagtcagatcgtggtgtcctccggtaataccgtgactcccggcaatgagatcaatgcaatcattacacgcaatggattctccatcaatgacaagaagactcgcctccaacaaaagaatgagcgtcaaatcgttacaggtatcgtggtgaataaaagaaccaatgtgcagaggtcttttgttaggaaaaccaacagcatgctctatgcctgggagaagtttggggccattctggccgaaaaggactactttgacaagtacaacagcaagatcaagacaattaagttgaaggacttcatagataaccccggtgagttattcaaatccattgtgaagggcagaatcaactacattaaaatggtgcgaggcaaagacgatgtaatataccgcaagtttgctcaccggatctcatgcttgttcggtaaatttgacaacagataccttaagactccgtacgacttcgccattgagagcacgttcgtcctcgaaaatcggtgcgacgacagccaggggaccgcctttttgctcgaaaggattggccttgttacaaatcatcacgtcgtcgaggacatctgtgacattaccgatgagtttatagaccttttcctgtggaacgaaattgggaacatccggaaaacaaagttcattatgtccaataagctgttcgatatagcggtcttcgagagaactagcgatttcgacaatattaccccactcaaaattggcgatgattcaggcatcaaaaacggtaccgtaataactgtgattggatttccccagtatagtcctggggagtccgcttatgtgaataccggtaaagtgatccagagtaagaccatgtatgggaataagttttggctgatagacatcccggtgatacatggcaactccgggggaccagttctgaacgataagttcgaagtcatcggcattgccagcatcgggacggccaagaatgatagcagttcaaaacttcacggcttcataccaatttctacattgctccgatataccggcgaagataaaccttga

SEQ ID NO: 7837 - RNA, 1650 nt, synthetic construct
  source 1..1650: mol_type = other RNA
atgtttaacccctctaacatcttacctccaaaaatcaaactcaacaagtgcggggacgtgcacattttagcggctctatttaacctgacctatgaggagctgtcaaagttgatttacccgactcccaatagaagctactatcaattcgccattgacaaaaaaaacggctcaaagcgcgttatatcagcccctaagaaaaagctgaagatcgttcagaagaagatcgcagatgaactacttaccctctaccctattagggacgttagtcatggtttcatcaaaggtaaaagtattgtgagcaacgcagagaaacacgtgctgaaatcctgcgtgctgaatattgacttggaagatttcttcggatcaattcattttggaagagtcagaaacctcctcacatccccttcctttaacataccattgcccgtggccaccgtgatttccaacatatgctgttataatgggtccatcccccaaggcgcaccaactagtccgataatcagcaacctgatatgttacaagttggacaacgaacttcgccaactcgcgggcaaatacaattgcacttatacccggtacgtagacgatataaccttcagctttacttacaaagctaaacggataccccatcagctggtaacgagtgatgctaacatcattaatattggcgtcgagctggaggaaatcatcacgaggaacggattttctataaacaagaataagacccgtctgcaatctaagaacgagcgccagactgtgaccggtattgtcgtcaataagaaaaccaatctgcagaggaaattcatccggcagacatcaagcatgttatacgcctgggagaaacacggcgtcgtcgcagccgagaatgaacatttcgtgaagtacaatgagaaaaagaagctcatcaaacttcgggatttcgtagacaagccaggagaattgttcaaaagaattgtcaagggaaggattaattacatcaagatggttcgaggcgaagatgatataatctatcgcaaattcgcccaccggatctcatgtctgtttgggaacgtcaataataggtatctgaagacaccttcggactttgccatcgatagtatcttcatacttgagaacgaagtggatatctctcagggcaccgccttcctgctagaagacgtgggcattgtgacaaattatcacgtagtgccaagcatcgatgagtacaatgacatcgacctgagcctctttagatacaatgagctcgacaacaaacgtaaggtgaagtttattatgagcaacaagctgtacgacttggcaatttttgacacaaatgggaacttcgatgatatcaaaaagttcagcataggcgatgactcgaacctgaaagttggatctgagatctccgttatcggatttccgcagtataccacgggggaatatccatatatcaatacaggcaagattgtgcagtctaaggctcttttcaacaataagatttggctggtggatatccccattattcacggaaacagcggtggtcctgtcttcaatgagaagtttgagatcatcggggtggcttccaacgggactgaacgaaatgaccagtcttccaagcttcatgggtttattcccatctccacactcattaaattcatctctagtaagtga

SEQ ID NO: 7838 - RNA, 1797 nt, synthetic construct
  source 1..1797: mol_type = other RNA
atggatattgacgagattttcaaggatctgtttggaccagggtttaagtctttagacggtttttgccagctcctgaaagttgatcaggacaagctgctgaatttcctttacaaacggaaaggtagccactatgtcagcttttctatcttgaagaagaacaagacccacagaacaatcaaagccccaaaacgggtgatgaagaaaatccagcatgccctactacctcatctggagaagtattacagccctaagccgtcatcccacggattcgtgaaagggcgaaacgtaaagactaatgcccagattcatagtaggaaacgttacgtgttcaatatcgacctgaaggacttctttgagagcattcattttgggcgcgttcgcaatctgtttatggcccaccctttctctgctcctcataatgtagcaactgtgatggcacagatatgttgctccgatgggaaacttgctcagggggcaccaaccagcccactcatctcgaatatgatctgtcggaaactggattcccagctgcaggccctggccaagtccggaaaatgtcactttacccggtatgccgacgatataaccttctcattcacctctacagccaagtacctccccaaagacattgtggaagtctctgaagacggaagggcaattcctggccgtgagctagaagagatcatcaaatccaatggtttcatcatcaatagtgaaaagaccagactgcagcataggacgcaaagacagatggtgactggcctcgtggtgaacgagatgcccaatgtgaccagggagtttattcgcctcacaagtagcatgattaacgcgttaaaaagatatgggcctgaactggctgaggcaaaatacctcgaaattctgaagggagaaaaccaacgcctgcagcctcgacagatcctgaggacaaaggactcagcaggcgatttttttataaaagtcgtgaaaggccgtctcaattatattcaaatggttagaggacgaggggataatatctataggagactcgcatacgagttcactgtggctataggcaaggaaaaccccgagttcaagaagagtccagaggaaattcttggtaactccatattcgttgtcaacaacatcatagaggagtgccaaggcactgctttcctgctggagggtgttggcatcgtcacgaatgaacatgtggtcaccggtgtcagcaagaccatcgctcgccactcaatctcattctcacgggcgggggatacacgggaatactccgctgagctgattctctcagacaagaaagctgacctagcgattttccaccccaacgaagaatttcgcaacatccccgctctgcggaagagtgacaagactatagtacgacccacagatccggtgctgagcatcggattccccaaacaccgagacgggacaacgcattacatcgccaagggccacaccacacaaaggagacggcaggtagacttggatctttggttagtggattttactttgatggagggcaattccggaggcccaatatttaacgactctatggaggtgatcggtgttaccgccaggggagccaagaacaatattgatgccgccctgtatggctttattccattggatagccttaactcttttacttcccgcgccgacttccttctgttgaaaaggttgtacgactatctcggcaacggctcgttgtctcttttacccggaatcctcggcaaagggattttcagcagtgcttaccagacaaaactgcacaaggagagattacagaaggcaaaggcggcctga

SEQ ID NO: 7839 - RNA, 1797 nt, synthetic construct
  source 1..1797: mol_type = other RNA
atggacattgatagcatctttaaggatctgttcggtcccggctttcaatctctggatgggttctgtcggctgcttgaagttgatcagaacaaattgctgaactttctgtacaaccgcaaggggagccactatgtgtccttctcaattctcaagaagaacaaaacgcatcggtccatcaaggccccaaagcgcgtaatgaaaaaaattcagcacgcactccttccccaccttgagaagttctacagtcctaagagctcaagtcatgggtttgtgaaaggcaggaatgtaaaaactaacgcacagattcactctagaaaaaggtacgtctttaacattgacctgaaggacttcttcgaatccatccactttggccgggtcaggaacctgttcatggcacaccctttcaacgcgcctcataacgtcgccactgtaatcgcccagatctgttgctcgtacggaaaactggctcaaggagcccccacttccccgttgatatctaatatgatctgccgaaagttagacagtcaactacaggcactggcgaagacctctaaatgccatttcaccaggtatgctgatgatattaccttttcctttactagcaccgagaaacaccttccaaaagacatcgttgaagtcagcgaggatggacgggccatcccaggaagagagctggaggaaattatccgagccgctggtttcgccatcaattcagagaagacacgcctccaacacaggacgcagaggcagatggtgacagggctggtggtgaatgagatgcctaacgtcactcgtgagttcatcagactcacatctagtatgataaatgctctgaagagctatggtccggagttagcagaggcgaaatacttggaaatcctgaaggcaaagaatcacacccttcaacccaggcagctactgagaacgaacgacgggaatggagatttttttattaaggtggtgaagggccgtctcaattatattcagatgattagaggacggggcgacaagatataccgccgcctggcttacgaattcaccgtggccctcggcaaagaaaatccagagttcaaaaagtccccagaggaaatcctggggaacagcatcttcgtggttaacaatattatctcagagtcgcagggtgccgctttcttgcttgaaggcgtcggcatcgttaccaacgagcatgtggtgtccggagtatcaaagaccatagcccggcattcaattagctttcaccgtgctggtgatacaaaggagtacagcgcagagttgattctctcagacaagaaagccgacctcgccgtgtttagacccaatgaggaatttagaaacattcccgttctgaagaaatctgacaagaccattgtgcgggctatggatgcggtcctatccatcggtttcccaaaatatcgcgatggcactgcccattacatagccagaggccataccacacagcggcgacgccaggtggatttggacctctggctggtggactttatgctgttagaagggaactccggggggcccatgttcaatgattccatggaagttattggcgtgacagcaaggggagctaagaataatatcgacgcagccctttacggctttatacctttagagagtttgaacagcttcacatctaggagtgactttatcctactcaaccgacttcacgactatatagggaatggaagcctgagtctgctgcctcagacactgggcaaaggagtcctgtctatcacctatcaggctatgctccgaaaacagcacctcttgccgttaactgaaaattga

SEQ ID NO: 7840 - RNA, 1797 nt, synthetic construct
  source 1..1797: mol_type = other RNA
atgaacatcgaggagatcttcaagaacctttttatcccaggattcagctcgctcgacaacctctgccgtcttcttaaggtcgaacaggataagctgctagcattcctgtataagaagaaatccagccactacgtgagcttcttcatccctaaaaagaacggcacccggcgcacaattaaggcccccaagagagtgatgaaaagactccagcgtgaattactggtgcacctcgagaagttctatagccctaaatcatcctctcacggattcgtcaaaggcagatcaatcaagacaaatgcccaggtccacgccggcaaaaggtacgtgttcaacatagacctcaaagacttttttgagaatgtgcactttgggcgagttcgcaaccttttcatggccgaaccattcaaggctccgcataatgtggccacggtaatggcgcagatctgttgcagcgaaggccgtttagcccagggagctcccacgtcaccattgatcagtaacatgatttgtagaaagctggatgcccagttgcaggccctcgcgaagtctggaaagtgccatttcacaagatacgcggacgatatttctttctcctttacttcaaccctgaggcacctccctaaagacatcgttgagatatctgaggaccggagggcaattcccggccgcatgctggaggaaattatcaaagccaatgggtttacgatcaactccgagaagacacggctgcaacatagatctcagcgccagatggtgactggcctggtggtcaacgaagttcccaatgtgactagggattttgtgagattgactagctccatgatcaatgcccttaaacgatacggggctgagctggctgaggctaagtacctggaaattctgaagggtgacagccagccactgcaggttagacaaaacgtaagggttcgggagaatgcaggagatttcttcattaaggtggtgaagggccgcttgaattatattcagatggtgagaggtcgatctgacagggtctaccggcgccttgcctatgattttaccgtggccattggccgagagaaccctgagttcaagaaaagcccagaggaaatcctggggaattcgatctttgttgtgaagaatataaccgatgactcccaaggaaccgctttcttgctggatggggtaggtatagtgactaatgagcatgtcgtgagtggagtctccaaaacaatggctccacacatgatctcctttcagagggtaggggagaacaaggagtacgctgctgaactgattctaagtgacaaaaaggctgacttagcaatttttcagccgaatggagaatttcgcaacatccctccactacgcaaagcaaatcgtactaccattaggcctatggagtcagttttgagtattggcttccccaaatatcgggatgggagcgcccattacatagcaagaggtcatacaacacaacggcggcgccaagtcgacctcgacctttggttggtggattttaccctgattgaagggaatagtgggggtcccttctttaacgattccatggaagtcatcggggtagcagccaggggcgcctctaacaacatcgagtctgccctgtatggttttatccccctggaatcactaaaccggtttatagcgaggaaagatttcgtcttcctcaagaaaatccacgagctgtccggcagtaaactcttaggccccctgaccatgcggagcggcaatggagtgttttcagaagtttatctcgcaggtaagtacggaggctgtcgactgaagcctgcaaaaatatga

SEQ ID NO: 7841 - RNA, 1791 nt, synthetic construct
  source 1..1791: mol_type = other RNA
atgaacatcgaggagatctttaagaatttattccgacctggcttttccgacttggacaatctttgcaggctactgaaagtcgatcagaaaaagctcttgtctttcctgtacaagaaaaacagttcacactacgtttcctttagcattccaaaaaggaacggaacccctagagccatagtcgctcccaaacgtgtgctcaaaagactgcagcgggagctgctggaacacctcgaaaaattttatacccctaaatcttcgactcatggttttgtcgagggacgtagcatcaaaacaaatgcacaaatacatagcggaaagaaatacgttttcaacatcgacctgaaagacttctttgggtcgattcacttcgggagggtgcgcaatcttttcatggctcaaccgtttaacgcacccagaaatgtggccaccgtaattgcacacatctgctgttccgatggtcggctggcacaagggtcccccacaagtcctctgatcagcaatatgatatgtagaaagctggacgcccagttgcaggctctcgctaagactggcaagtgccatttcaccagatacgctgacgacattacttttagttttaccacgcccctgaagtatctcccaaaggatattatcgaggtatccgaggataggagggctatccccggccgagagctggaagagattataaaggcaaacgggtttatgatcaatcctgaaaagaccaggcttcagcacagatcccagcggcagatggtgacaggactcattgtgaatgagcggccaaacgtgacccgggagtttgttagactaaccagctctatgatcaacgccctaaaaaggcacggttgcgaactggctgaggcaaagtatctggagctgctgaaaggagaaagccacccccttcagccaagacagataatcagaactaaagacaatgcgggcgacttcttcattaaagtggtgaaggggcggctgaattatatccagatgattcgcggccgtggagacaaggtttatcgacggctggcatatgattttactgtagccattggtaaggccaacccagagttcaagaagacacctgaggagattttagggaacagcatcttcgtcgttaataacatgacggatgactctcaggggacagctttcctgttagacggtgtcggcattgtcaccaacgaacacgtcgtccggggcgtgtctaagagtatggccccacacatgatctcatttcaaagggccaatgaagagaaggaatacactgccgagttaatactttccgataagaaggccgacttggcaatcttccatccgagtgccgaatttcgctccattcctagcctgcgcaaagctgaacgctcaattatccgcccgatggaatctgtactctcaattgggttcccacggcatcgagatggggccgcacattacatagcccggggccatactacacagcgaaggagacaggtggacttggatctgtggctggtggatttcaccttgtttgaaggaaactcaggcggccctttcttcaacgattcaatggaagtgatcggcgttgcggcgaggggagccaagaataatatcgagagcgccctttttggtttcattcccctagagtctcttaacaccttcatcgctcgaaaggatttcgtgttctacaaaaaactgcatgacttactcggcgggtgtctcttgaaggccctccccaagcgcagtggcgatggagtgtttacagagatccaccaccaacgcacggaacgtgtgacagcgcgcctccaggagtga

SEQ ID NO: 7842 - RNA, 1785 nt, synthetic construct
  source 1..1785: mol_type = other RNA
atgaacatagacaagatcttacaggatctcttcatgcccggctttgggtcacttgagggcttttgtcaactgctcgaggtcgaccagaagaagctgttgaatttcctgtataaacgaaggacaaaccattatgtgagctttagtatctccaagaagaacgggacccacaggtctattaaagccccgaagcggaccctcaaatttctacagagaaaactccttgcccatatagagaaattctatagccccaagccttcaagccacggctttgtgccagggaggtccattaagaccaacgcccaaacccactcagggaaaaggtacgtgttcaacatcgacttaaaagagtttttcgacagcatccacttcggcagagtgcggaatctgtttatggcccaaccctttaatgctccccacaacgtggctaccgttatggctcacatctgctgtagcgacggtaggcttgcccagggagctcccaccagtcctctcatcagcaatatgatttgtcggaagctggacactcagttgcagacccttgcaaaaagtggcaaatgccatatcacacgctatgcagatgacatcaccttcagttttacatcgactctgcgccacctgcctaaaaacattgtcgaagtgtctgaagatggccggccaatccctgggcgagaactggagaatatcatcgaagcaaacggtttcgtcataaattctgagaagacgagactgcagcattgctctcaaaggcagatggtcacaggactggtggtgaatgagacgccaaacgttccccgcgactttgtgcgcctgacttcctccatgattaatgcaatgcgacggtacggaccacagctggctgaggcccgttatctcgagatactcaagtctgaaagccaggtcatacccacccggcaaacgaacagagcacgtgataacgcgggggacttcttcataaaagtggtaaagggccgcctgaattacattcagatgatcagaggtagaagtgacaatgtctaccgcaagttagcctacgcattcactgtcgccttgggtaaagagaatctggaatttaagaaatccccagaagagattctgggcaattcgatcttcgtagtcaacaacatcctggatgattctcaagggaccgcctttctcctggacggagtggggattgttacaaacgagcacgtagtctccggaatcacaaagaccacagccccccacgtgatttccttcaagagagctgacgatcctaaagaatacacagcggagctaattctcagtgacaaaatcgccgacctagccgttttctatccaaacgcagagtttaagaatattcctgggctgaggaaggcggataaggaaactattcgagctatggaccctattctctccataggcttccctaagcatcgggagggcgcggctcattatatcactaggggcaacactactcagttgaggtaccaggtggatttgccactttggttggttgatgtacccttgatcgagggtaattccgggggaccgatcttcaacgatagcatggaagtgataggagtggccagccgaggaagctctaataatattcaggctgcactgtacggctttattccattagaatgccttaaccgctttgcaaagagaaaagatttcgccttctaccgtaagcttcacgaaattctggctggtggcaaattagtgcgggccgcctctgttagaggaggcggagtgctgtcaacacgcctccagatcctgctgatctcacatctaaactcaccgtga

SEQ ID NO: 7843 - RNA, 1755 nt, synthetic construct
  source 1..1755: mol_type = other RNA
atgactctggactttcttagcaaggatctcgcctttagcaagttccagtcattatctagcttttgtaagttgctgcaggtcgaccaggacaagctcttgaaattcttgtacaagaaaagcagctcccactacgtgtcatttacaatctcaaaaaaggacggctcactgcgaagcatcaaagcccccaagaaggtaacgaagatgcttcagcatcgcctactgtcgcacctggaggagttttacactccaaaaagtagcagtcatggattcatcaaaggtagatccatcaaaacaaacgggcaaatgcacgtcgggaagaactatgtgttcaacattgacctcaagaacttttttgagtccatacacttcgggagagtgaggaacctgtttatggcggccccgttcaatgcggcctataacgttgcaacagtgatggcccagatttgttgctgcgagaataagttagcacagggtgcccccacaagccccctgatctctaatatgatttgtcggcggctcgatgcacagcttcagaccctggctaaggcccaaaagtgccacatgacacgctacgcggacgatatatccttttcatttacctcccggctcaggcatttacccaaagaaattgtagagatatcagaggatggcagggtcatcccaggccaagccctggagactctaattaagacgaacggctttgctatcaattctgacaaaacccggctgcagcacagatcccaacggcagatggtgactgggcttgtcgtcaataagttgcctaatgttcctcgcgagttcgtgcggcttacctccagtatgatcaacgctatgaagaggtatggaccagcccaagccgaagcccgttacctggagattctggcccagacaaagcaaattgtgccggaaagacagctggctcgcgtgaagtctaacgcgggggatttttttatcaaagttgtgaaaggccgactgaactatatacagatgatcaggggacgcagtgataatgtctaccgtaagctcgcttacgactttacagtggcactgggcaaagaaaacattgaattcaagaagacacctgaggagattctgggaaactccatctttgttgttaccaatatccttgatgactctcaagggaccgccttcctcttggaaggcgtcggcttggtcaccaatcagcacgtggtgtcgggagctacccatgctctcgccagccacgtaataagtttcaagagggctggcgacgagaggtcttacactgctgaattgatcttcagcgatctcaagtctgatctggcagtgttctatccggggcctgaatttaagaatatcccacatctgcagaaagcagacaaacatattattcgtgcaatggatccagtgctgagtatcggcttccctaaataccgcgatggctcagcacattatatcaccaaaggcagcacgacccagctgcgacgacaggtggatatcgacctgtggctcgtggacatgcctctcatcgagggaaactctggtggacccatattcaacgacagcatggaagttattggaatagcctctagaggttccgtaaataatctgcaggctgccttatatgggttcattcccatcgactccctcaccagattcattagtagacctgccttcggacttgctaggagagtccacgatctgcttgcaggtgacaaattcaaaccactgtccaagactgggcacactcggctactattaaaatgcgcaccctga

SEQ ID NO: 7844 - RNA, 1767 nt, synthetic construct
  source 1..1767: mol_type = other RNA
atgaatctggacgatcttctcaaagcaatgttcgcaccttccttagggagcctgccctctttttgtaatctgttgggagtcgagcaggacaaacttctgagtttcctctacaagcggacgagctcacactatatatctttccacatccccaagaagaatggtgcaacccgcgtcattaaagcaccaaagaaggccctgaaagagctgcagaagcggctggcttcccacctcgataaatttcattcaccaaagccttcatctcatggcttcatcaaagggagatccattaaaagcaatgccctgccacacataaataagaccttcgttttcaacgtggacctcaaggacttttttgagactattcattttggtagagtgaagaacctctttatgtccgaacctttttcagcaccccataacgttgctactgtcatggcgcatatctgttgtcacgatggcaaattagtacagggagcgccaacgagtcccctgattagcaatatgatatgccgcaaactcgactctcagctgcagtctctggctaaggcccaaaaatgccacgtgacacggtacgcggacgacatcacattcagtttcacaagcagcatcaagcacctgcccacagacatagtggaggttacccaagatgggatggctattcccggacgggagttggagcaaattgtaagggtgaacggatttacgatcaatgcagaaaaaacacggctccagcataggtcccaacgacagatggtcaccggcctggtggtaaataaattccccaatgtgccacgggccttcataagaaagacttcgtccatgattaatgctttgcgtagatatggaccggtactagccgaagagaagtacctccagatcttgaagggcgataagcaagccctacccgctcgacagcaccgacggatcaaggacaacgccggagactttttcatcaaagttatcaagggcaggctcaattacatccagatggtgaggggacgcagcgacagtacctatagaagactagcctacgattttaccgtcgccattgggaaggagaaccctgaattccgaaagtcacccgaggagattctgggcaactcgatctttatcgtctccaacctgaccgacgattcacagggcactgcgttcttgcttggcggagtgggtctggtgactaaccagcacgtgatttctggcgtgtccaagacaatggctccacacatgatttcattcacacgcgttggcgacgataccgagttcagtgccgacctaattatcagtgacgccaaagaggatcttgcagtgttttacccaaacgaacaattcgataggatccctatgcttaaaaaggcaagcaaagaatctatacgccctatggagcctattcttagcatcgggttccctcgtcatagagatggtgctgcccactatattaccaagggaacaaccacccagctgcgcaggcaggtcgatttggacttgtggctggtggatgtgcccttaatcgaaggcaattccggcggccctatatttaacgatagcatggaagttattggtgtggcggctcgtggggccactcagaacaacatcaatgccgcactctacgggttcatcccaatcgccagtctgaacagatttgtcgctaaaccggaatttaagctggccaacagccttcatatgtctctgcgcggtaaaccgtgcaggccattatgtgaagctactgggaaatatatcaggaagatgactatttgctcctttgggtga

SEQ ID NO: 7845 - RNA, 1764 nt, synthetic construct
  source 1..1764: mol_type = other RNA
atgatcatcgacgatatcctcaaggctctgttcacccccggtctggggaacctgtccggcttttgcgatctgttgggcgtggagcaggaaaaactcctggattttctgtacaaacggaagagttcccactatgctgccttccatattcctaaaaaaaacggggccacccgcgtggtgaaagctccaaagaaagctatgaaggagctgcagaagagcctcgcattgcacctcaacaaattctactaccccaagccgtcatctcacggcttcgtgaagggccggagcatcaagtctaatgcactgccccacgtaaataaaaacctggtgttcaatatcgacctcaaggacttttttgaaaccattcatttcggccgtgtgaaaaacctgttcatgtcggccccgttcaatgcacctcataacgtggccaccgttattgctcacatttgttgtcatgacgggaagctggttcaaggagcacctacatctcccctcatctctaacatgatttgctggaagcttgactcacagctacaggccctggcgaagagtaaaaaatgccacgttacaaggtttgtggacgatatcacattctccttcacaagcagtttaaaacatctccctgccggagtggtggaggtcactcaagacggtatggctattcccggaagagagctcgaacagatcgtgaaggccaatggctttcttattaatgccgaaaaaactcggttacaacacagaagccagcggcagatggtgaccggattggtcgtgaataagtttcccaatgtaccacgcgaattcattagaaagactagcagcatgattaacgctctgcgtcgatacgggccagaactagccgaggaaaaatatctgcagattctcgccggcaacaagcaagtcgttcctgcacggcagcatcgcaggatcaaagataacgccggtgacttctttatcaaggtccttaaggggaggttaaactatatacagatgatcaggggaaggagcgacaatatgtacaggcgtctcgcatacgatttcacggtcgcgatagggaaggagaatctagagttcagaaagtctcccgaggagatattagggaatagcatattcgtggtgaaaaacctgacggatgactcccagggaacagcctttttgcttgacggcgtcggcctcataactaaccagcatgtcatttccggtgtttcaaaaacactggcgccacacatgatctcatttttgcgcgcgggagatgaggccgagttttcagcagaacttatcttaagcgatgttaaggaagatcttgcaattttttacccaggcgagaaatttgaccagatcccccggttgcgaaaggccaataaagaggctatccgccctatggagcctatactttccattgggttcccaaagcacagggatggagccgctcactatatcactaagggcaataccactcagctccggcgacaggttgacctggacctgtggctggtggatgtacctttgatcgaagggaacagtgggggacccatctttaatgatagtatggaggtgattggagtagccgcccgaggcgctgctcaatcgaatattaacaccgcactgtatggtttcataccgatcgcgtctctgaacagattcgtcgccagatccgaattcaaatttacctcctctctgtacgcagtcctagacggcaaggccttcaggccactgtgcgaggtagctggtaagtatgcacgcagaggctgttttttcatcttttga

SEQ ID NO: 7846 - RNA, 1767 nt, synthetic construct
  source 1..1767: mol_type = other RNA
atgatcctatacaattttctggctgccatctacgcccccggcttatccagcctgccagcgttttgcaaactcttgggggtggatcagaataaactgctgcattttctttacaagaggaaacaatcgaactacgtgtccttccacattcccaagaaaagtggcgccactagagtgatcaacgcacctaagaaaaccctgaaagtcctgcagcggtcactcgccgagcacctagagaagttctactatccaaagagctcctcacacggcttcgtgagggcccgttctattaaaaccaacgctcaaccacacgtggacaagaactatgtcttcaacatcgatttaaaggactttttcgacaccattcattttggacgggtccggaatttgttcatgtccgagccattcaacgctcctcacaatgtcgcaacagtgatggctcacatatgttgtcacgacggcagactcgcacagggtgccccaacctctcctctgatcagcaacatgatctgccggaagttggactctcagctccaagcactggccaagtccaagaagtgccacgtgacccgctacgcagatgacataactttctcttttactagtagcttgaggcacctgccccccgacgttgtggaggtgacaggagatggggtggtcattccggggcgcgaactggaacatatcataaaggccaacggctttctcataaactctgagaaaacaaggcttcagcatcgttcacagaggcagatggttactgggctagtcgtgaacgagttcccgaatctgccacgagcctttctgagaaagacctcctctatgatcaacgcacttagaagatatggaccggtgctggcggaaagcaaatacctcgaaatcctgaacggggacaagcagtccatccctgcacgacagcacattcgcgtgaaagataatgccggagattttttcatcaaggtcgttaaagggcgcctcaattacattcagatgatcaggggacgtggagataatgtatatcggaaactggcatatgacttcacagttgctattggcaaggaaaatagggagtttcgcaagagccccgaggagattcttggcaactccatatttgtagtgaagaatattagcgatgacagccaaggcacggctttcttgctggacggagtcggtctggtaacgaatcagcatgtggttagtggcattagtcgcctcacagctcctcatatgattagttttatcagggctgggttagatgaagctgaaatctctgcggaacttatcctgtcagatgagaaagccgatcttgcaatcttctatcctggacccgagttcgacaaagtgcccaggctcaaaaagagcaagaaggaactgatccggccaatggaccccgtactctcgatcgggtttcctaagtaccgagacggggccgcccattacattacaagaggtaataccactcagctgcgccggcaggtggatttggacctatggttgattgatgtgccccttatcgagggcaactcaggtggtcctgttttcaatgattctctggaagtgattggtgtcgccgctagaggagccgcgcagaataatatacaagccgctatgtatgggttcatccctatttccagcctgaacaaatttgttcagcagagtgagtttaaggttacccggtcaatactcgacatcctgggcggcaagttatttcaacccttagccaacgcaaagggcaaattcgtaagacgaaaaatactcattccattctga

SEQ ID NO: 7847 - RNA, 1818 nt, synthetic construct
  source 1..1818: mol_type = other RNA
atgagctctgtgccttttagttttgctgacatcttcaagcctggcttgtcggggctgccaaatctggcaaggctgctcgggactaatcaaaacgccctgctagagctgctctatccaaacaacgtgcgcaactacaagaacttccagatcaaaaaaaagaacgggaactctcggtccatccatgcgcctaagaaggtgctgaaggctttacagagaaatatggcagactacttgacgacactgcacactcccaaaccctcttcacacggcttcctcatcgagagaagcattaagtcaaattctatccctcatgcaggaaaggagtatgtctttaacatcgacttagaggatttcttcgaaagcatccacttcggtagagtgaaaaatctcttcatgagtcggccttttaatgctccacacaatgtggctgttgttttagcccagctgtgttgttatgatggcaagcttgcgatgggggcacccacttctccgataataagcaacatgatatgccgcaaactggatagccagctgcagctgctggccgctggtaaaaattgttactatacacgatacgctgatgacatcactttctcctttacaagctccaaaaagctgttgccctccgatattgtccagattaccgagggaggtgttggagtgcctggaggggcattacttagtattatagagaggaacggcttccgggtaaatccgaccaaaaccaggctgaggcatcgttcccaaaggcaaattgtgaccggccttacagttaataaatttcccaacgtctcaagatcattcatcaggaggaccgcctccatgattcacgcgctcaaaaaatttggagccgtcgatgctgaacaaagatacttggaaattctctcacgccaggaaatcgatctggccccccgtcaggcaaaacgcacaacggactccaaaggagacttctttcccaaagtgatcaacgggcggcttaacttcatacagatggtgcgagggaagaatgacagcatctatcggaagctagcctacgccttttctgtcgctgtcaatgaggaggacaaggacctgctgaaaagcgcgcaggagattttaggggaatccgtgttctcagtgcttaatctggccgacgccaactccgaaggatcggcctttctgctcagcggcgtaggcattgtgactaatcagcacgtgattgacggtattgatttcgatagtccattggaactactggagttcagcaccaccgagaatccaagtagaaagctaaacccccagctgatctataagtcaaaggtcccggatatagccattttctaccctggcgaggaatttgaccgtatccgacctctcgtgatttcgaagcagaagcatatcaggcctctggaccccatattggctgtaggcttccccgggggctttgatagttgccctagcccatatatcaatggaggtaaggtcgttcagggaagacatatttacgaacaacagcactggctcgtagatatcccactgcttcaaggaaactctggcgggcccatatttgatacttccatggaggtgattggcgtcgcctctcggggtagtaaaaagaacaacctggagtctatccttcacgcctttatcccaattgacacagtggtaaaagctatccggaaaccggaattcttgtaccgccagagatatattgagctccgccttaaccgaaagacgggcaaggttgtgtacacccgctgcgtttttgcagaagactgcatctttaagtcagcaatcgagctctattggccactcagtaagtccttctcttacagctga

SEQ ID NO: 7848 - RNA, 1854 nt, synthetic construct
  source 1..1854: mol_type = other RNA
atggacaatcggaacatcctggaaaagaccttcgaagggcttttcagcacagcaccattcaccccagggttccataacctcgatgggttggctctattgctggacacagacctgaccaggctgttatatattctgtacaaaagtgatagccctaagtacaaccactttaagatccaaaaacgcaatggcaattcccgaagcattcacgcacctatcccagaaattaagaagctgcagaagaagctggccacactgttgcaggcactgcatgttccgaaactgagctcccacggcttcttggccgacagaagtgtcaagacgaatgccctcccccatacaaagaagaagtttgtgttcaacatcgacctgaaagatttctttgaaaccgttcatttcggcagagttaagaatctgtttatgtcccgtgctgtgggagcaccgcacaacgtcgcaacggttatggctcatttatgttgttttaatggacgtctcgcccaaggcgccccaactagccctataattagcaacatgatctgcttaaagcttgatgcccagttacaggccttggctcacaaggaaaagtgccactacacccgatacgcggatgatattactttcagctttacctgttccaaaaacaaactgccaaaagacatcttggtgtatagtgaactcgacgcaatatcagctgggaaagggctggaaatcattattgaggcgaatgggttcaaaatcaatcccgataaaacccgggtgagacacaagtcccaaagacagttggtgaccggactgaccgtgaatgactttccaaacgtgtcacgcgagtatatcaggcgtaccagcgccatgataaatgcccttagaaagtatggcgaagtgctagcggagaggaagtacgttgagattaataagatcaacgccgtccctctagcagctcgccagctgaaacggctcgaacggaaagagggcgacttctttatcaaggtagtcaagggacgcctgaattacatccaaatgatacggggtcggggcgacccgatctatcggaaactcgcatactatttcagtgtcgctgtgaagaaggagaacaaagagtttcttaagaccgctgaggagctcctgggtgaagccctcttcatagtgaagaatagtctcgacgaggatagtcagggaactgcgtttctgcttgacggtgtgggaatcgtgactaaccatcacgtaatcgacggcgtcgatcttatcacagccccccattgcatcgagttcataactacagagaaaattcctcgcgtgctttcagctgagctgatttttacttcgaaatccatggatctggcagttttccacccatcttcagattttgaaaccctgaggccactccagatgtctcgacgcaaaaggcttaaagccctcgaccccattctggccatgggcttcccttctcacatcaggggtgccacgccctacatcaacacaggaaagattgtccagtctagagaggcctatcggtcaactttttggttagtcgacatccctctgctgagaggaaattccggaggccccgtgtttaacagctctatggaggtgataggtgtagcaactatgggttctaaaaaccacgacaggacaacaattatgcacggctttttgcctaacgatggcatttctacgatcctgaaaaaccccgatttcctctatcgacgcgagatactgaaaaccaagaagacaggcattagatcaatctcgaccaggctaaaaggggtacagactttggctttctacgaacataagcatgtggggccttacccccttattcacgcctcctggccctttctctccggagctggggggtga

SEQ ID NO: 7849 - RNA, 1758 nt, synthetic construct
  source 1..1758: mol_type = other RNA
atgacgacaatcccgaactttgctttttccttgattaaggttaagcccggctttggcagcattgaatcgctggcccttctgctgggcaccactcaggacgccctacttgggctcctgtatccgcagaccaaaatcaactacgtcaccttcactattcctaagaagaacggggatattcgaacgattcatgcacccaaaaatcacttaaagcactttcagagactccttgctaaatacctgctcaccacacacaacgcgaaatcgtgtacacacggttttgtggagaataagagcataaagacgaacgctcaaccccatattggcaaagagtacgtgttcaacattgacttaaaggatttcttccaaacgatccattacggacgggtgaaaagacttttcatggcgtacccttttaacgccccagagaacgtggccacagtaatcgctcagctatgttgtttcaatggtcatctggcccagggagctcctacttctcccattatttccaacatgatcgccctcaaattggacggccagatcttgagtgtcgcttccaagaaccagtgccactacacacgttatgtcgacgatctgactttctctttcacctgcaagaagcaccgactgccaaaggacatagtcaaaattagtaacgaagatgaagctacaccaggcgatacactcactaatatcattctgaagaatggctttacggtcaaccctgaaaagacccgcttgaagcacagatctcaacggcaagtggccgccggtgtcaccgtaaacgaatttaccaacctccctcggagctacatcagactgaccggatctctcatatatgcactggagaaatttggacccatcaatgccgagatcaagtatgtggaggggttaaatgagatccatcagctcactccgtaccagctagacaaaataaagcggtcaaacggggagtttttcaagacagtcgtaaaaggaaggctagacttcctcaaaatgataaggggcaaatcagatagtatataccggaagctggcgtatcgattttccaaagcaatcggaaaggaagataagaacttgatgaaatccgcacaggatatcctgggggagtccgtgtttgtggtggaggaaatgatgtcagaaagccaggggacagctttccttctggatggcgtcggcgttgttacaaacttccacgtggttggtggaattactcaagagctcgcacccgattgtgtgagcttcatcactaatgaggccacctccaggactctgtcagcacagctcatcttctcatgcaaagaaagagatctggccgttttctatcctgaccatagttttgacacaatcaggcctctcaaaacccgtaagaaaaatggtctgacccgcgtgttggaccccatcctgtctatgggatacccaaatcatagcgcaggaacccccccctattttaacaccgggaagatcgtgcagcagcgcaacgtgctgggtaggaattactggttggttgacatcccattactgaagggcaattctggcggaccaattttcaatagttccatggaagtaattgggatcgctacaattggcactaccagaaatgacttggcctctatactgcacgggtttcttccagtggagaagcttaaagagattatcaagctgcctgagttcatatatcgcaaacgctacctggccctgaaaaataatcagccaaatttaagctgcctgcttcctaagagcaggccctattattactga

SEQ ID NO: 7850 - RNA, 1833 nt, synthetic construct
  source 1..1833: mol_type = other RNA
atgacattaccattaggcgagaacttcttttcaacagcgcagactattgccaatgaactgggtatgtcttacaagcagctctcttcctttatttatcccactaccaataaatcgtaccgaacgttcacaattaagaagaaaggggggggcgaacggaccatcagtgtcccaaagaagaaccttaaaaagatccaacgcatgatcgttgacaagatcatgaagtactataaccccaagctcagctgccacggctttactgaatcccgttcaattgtgaccaatgcctatcgtcacgtcggaaagcagtttgtttttaacgtcgaccttaaggattttttcggcaccattcacttcgggcgggtgcgcaacttgtttatctccaaaccattcctgtattcccattcagctgccaccgtgctggctcagatttgttgtaaggatggagtgttaccccagggagcaccgacttcacctatcatctctaacctgatatgctggaaactcgacgcccaactccagaccctggctgcaaagaataattgtcactatacccgatacgccgatgatatcacgttctcttttagctgcaataagaagtatatcccaaaatctatcctggacttcgacaacgatggggtagtggttgttggcagttctctggaaaggatcatcaaagaaaacggcttcaatattaactacgagaaagtgaggttgaagggcagatctcaacgccaggaggtgacgggaatcactgtaaatgagtttactaacgtggagcggaagttcattaggaagacccgctccatgattcatgcttggcgtaagtttggatcaattaaagcccaggagcattacatctccaattatctggaaaaggatattcttcctagacaagctaaaagcattgccaaaaacgacggggaattctttatcgatgtggtgaaggggcgggtgaattacatacagatggtgaggggcagggcagatcccatctacagaaagctggcttaccagatgacactggctatggggaagcctaatcacctatttttgcggaaagcagaggaggtcataagtgacagcgttttcatcgtggagaataatctcctgtgcgagcaggggagtgcctttctgcttgatgacattggcatcgtaactaaccaacatgttgtggagggaattgatcacgagaaccacgagcttgtcgacttctaccgagaagacgacgtaaagaacaaaatgaatagcagctttgtctattcctctgcaagcaaagatatagcgatatttctcgcaacagccaactttaataatattcctccgctgccaatcggcaacgacaaaaatcttagagtgggagactcaatcattgtcgtgggctatccagattacagcgaaggggaaacggcgtacatcaacagagggaagatagtgcagtcgatactccggttcggaaaacgcttttggctcatcgacatccccgtcatacacggtaacagtggtggtcctgtcttgaatgagaaactagaggtggtgggcattgccaccctcggaagtgccatcaatgatggtaagaacaaattcaatggtttcgttcctatttccacattgactggcatcctgaacaccccccagtacaacaaaatttacaggtattccctactgcatagcaaaaagcccaaggtcgagattgaaaaagacttgttctatgttgatggactgacatattgtaagaagtgtttcctggacaagaagcaggccatcacagtgtacaaaaccaaaagcaacgtattcttcaactgcaaaatatgcggcaagacatacagaaaatga

SEQ ID NO: 7851 - RNA, 1674 nt, synthetic construct
  source 1..1674: mol_type = other RNA
atgattgatttctctgacactattctgcccagccaggaggctattgccaagaaattcggctacacatatgatcagctgtcatctctgatctaccccaaggtgaataaatcataccattccttcacgatctctaaaaagaatggagaactgcgcgaaattaatgcgccaaaaatcctacttttgaaagtgcagcagactctggccgaggagctgagctcctgttacacgcctaagaatgctacccacggatttattaaggagaggtctatcgtgaccaacgccaaaaagcatatcggtaagcgcaacgtgtttaacatcgatctgaaggacttctacgggtccattcactttgggcgcgttaggaacttgctaatgtctaaaccctttatgtatagccaaagtgaagctactattctcgcacagatttgttgttataacggagccctcccccagggagctccaacatcgccaataataagcaacctcatttgctggaaaatggatgcactgcttcagaacctggcaagcgagaatagatgcacttacaccaggtatgccgacgacataacctttagcttcaacgtgaagaagtctaaactgccgtcatctatagtccggtttgacttaaaaaaagaccgagcgattgtggggtatgaactctccaagataatcgaagagagtgggtttgtcattaatgaggagaaggtcagactcgcaggaaaaaaccagagacaagaggtaacaggcatcactgttaataagaagccaaatgtgtccagaaagtttatccgacagacagcctccatgctgtatgcgtggaaaaaattcggagcagaacaagccgagcacgattacctggacaagtaccgggttaaaaaacttactaattggcaaagcgagaaattcaaaggcgcgaagggggagtttttcattaaagtcgtgaagggtcgtgtgaattacatccagatggtcaggggccgcgacgataagatttaccggaagttagctttcaaattgaccgatgccctcggaaagcccaacatccacttcacgaaatcacgggaagagcttgcaacctacgtgatcgagtggatggaagcccagggcaccggtttcctgctggatggcgtaggcattgtaactaacgagcacgtgatcagcggtatcactagtgataattacgccatgtgtaacgtctatcgttgctatgaggaagataagaaacagaagtgcccgttgatcttcgcagacaaagctatagacctggccgtgctggaccccacctcctaccttagtgacgtgaagccttataagatcggggaggacaaatatttagaaattggcgacacagtcaaggttatcggttttcctaaattcggtcctggctcaacccccaacatatccgagggcatcatcacaagcaagaagaagatccacgggatcgatgcttttatcgtgaacacacctataaccgatggagccagtgggggaccggtactagacaacaataatgaagttattggcgtggctttctggggcccagaacataatgatgggtcaaaccctatcaatggcttcattcctatttccacattgaagaacgctctcgaacagcatagtctcaccaattcgtttggagccaaaaagccagttaagcagcaaaaggagaagtga

SEQ ID NO: 7852 - RNA, 1632 nt, synthetic construct
  source 1..1632: mol_type = other RNA
atggacaacattgattttaaagattgcagaaccgtcaaagacctgagtcatttccttggcatgaactacaagaaactgtcttcgctgatctacccaaatacaaatcgactctacgtgacctttattatccctaaaaaaagcggagaggaccggacgattgacgcccccaagcctattcttaaagctatccaacgtaaactgtccattgagttcaacaagatatataaccccagaaagaatacccacggcttcatttgtggaaaaagcatagtcaccaatgccaatcagcacatcaacaagcgctacatattcaatatcgactttaaggacttcttccattccattcattttgggaggataagaaacctctttatgagcgacctgtttgcgtttacttatgaggtggctacggtcttggcacacatctgttgtcacaacaaccggctgccacaaggtgcacccactagccccgttctcaccaatatcatctcttttaagctggataacgacctcttcaaacttagtttcgacaacaaatgttctgtgacaaggtatgcggacgatgtgagcttctcattcagctgcaataagaggaattttcccaaggatatcctttactttaacaaggctaaagagatcgttccgggcataaaactaagggaagtgatcgaaaaaaacgggtttgagattaacaacaacaaagttcgcttgcagaataagacacaacggcagcaggttacaggcattacagtgaaccagaaactgaacattcaccggagttacataattaaaactaggtctatgctgcacgcctgggacaagtatgggttggagcaggccgccaaggaatatctatccaagtacatcgaaaaagactacagcaataatgataagaaccgaatcaattccaacgagagtctctttttcaagcaagttatttcaggcagaattaattacatcggtatggtgcgcgggattaacgatgagatttaccggaagattcgctataagtattcatgcctgattggggtgcctgatgaaaacctgaagaagtccttagatgatattctttcggagtcagtcttcatattagagaacaacataggaatcgctcagggaactgcctttttagtggagcagctaggcctggtcacggcctatcatgtgatagaggacatcaatgaggaaaatagctgcctgatcgatttttttcgatgcaatgaagtggataagaagagaaaagctacactcttcaagacctctcagaagaatgacatcgccatcttcactcttaacaataacttccaagacatcacaccgctgaaactgggggacgcatcaaagctcaaacgtggagtagaaatcaagctcttcggatttcctggctacaataccggggatgaatgccattgtgacaacgggaaaatcacccagaagaaaaagttgtatggtttcgatgtctggctcgtcgatatcccaattacccacggtatcagtggaggcccagtgttgaacgcaaataatgaggtaattggcatcgcaatagtaggctccgaaaagaatgataaatctactatctcccagggtttcattcctatcactaaggccctggctatgctgcaggaccagtga

SEQ ID NO: 7853 - RNA, 1626 nt, synthetic construct
  source 1..1626: mol_type = other RNA
atggagcagacaatcaacaagaatttcaactctctagatacccttgtatctctctttggcatcaattattccaacttggctaaactgatttacccaacgacaaataacctgtatcattccttctcaatcccaaagaaatccggggaacttcgggagattaatgcccccaaccgaatattgaaggaaatccagtataagctcctcaatgaactgcaatcatactatagcaaaaggaactgtactcacggattcataaatgaacgtaatgtcgtcacaaatgctcggccccacgtgaagaagaacattatcttgaaccttgacttgaaagagttttttcagagcatacacttcggacgggtcagaaacctgtttatgagcaatcctttcaacttcaataagaacgtagccacagtgcttgcacagatttgctgtcataaaggccacttacctcagggcgcgccaacgtcacccctgatcacaaatctaatttgctataagttggacaaggagctgagcaagctcgcattcaacaataattgcaccgtgaccagatatgtggacgacattaccttttcctttaactgctctcacgataaaatcccgagagatatccttgatggcatttctggcgaatcaattagcattagtaaaaagctggtgaacatcatcaataagaacggattcgagatcaattacaaaaaagtgaggctgagttcgtccaatcagagacaacaagttactggtattgtaacgaacgtcaaggtcaacctcccacgaaagtacatcaaaaaaactcaaagcatgctgtacgcctggaaaaacttttccctgcccaacgcagagcaggcccatataaacaattacctggagaagccttacaagtaccagcgctttattcgctacaacaaagacaagagttacttcaacctcatgattaaaggccgcattaattatataggcatggtgaggggccaatccgactgtatctatcggaagttactgtaccagtacaccgaactcatcgggaaccctaataaggagctcctgaagtcggtggatgattgtctggctgacagcgtttttatcactgagtatcctattgagagtaaacaggggaccgctttcttcctgaaggatattgggctcgtgacagccgcccatgttgttgagggaattcacgaaactaattcttgcttcctggactttttcaggcactatgaagttaaaatcaagcgtaaagctaccctgttcaaaaaatctgaagagaaggatattgccatattttacgtgggcgatgactttaagaaccttccctcattgaaagtgggggacgactctaaattagccatcggggaccagatcaagctgatcggattcccggattataactaccacgactcctacttatccaatctgggaaagatcatccagaaaaagactatgtacaacctggatgtatggatcgtggacctacctattaactttggggtgagcggaggtcccgtcttcaataacaagaatgaggtgataggtgtcgcgctccagggtagtaagaaacatgatcagtcaacctatagtcattattttgttccaatcagcaaggtgatagaaatggcacagaattga

SEQ ID NO: 7854 - RNA, 1617 nt, synthetic construct
  source 1..1617: mol_type = other RNA
atgaatttcctgcaactgcagaccacacaggatttggccaatttctttgaaatagacctaaagcatctgatgtacctcgtgcatgttatgcctgggcacattaaatacaagtccttcaagatcatcactaagaagaaagagcgtttgatttcatccccatttttcaggctcaaaaaaattcagtaccgcctgaaagaagagttcgaaaagatctataagccccggaagagcgtctatggatttatcaaggataagagcatcaaggaaaacgcaataaaccatctgaacaagcgttacattttcaacatcgatctgcaagacttctttgggtctatcacagccataagaatcaaatatctcctgcaatcttacccttttaattttcccagcatagtggcagagataatcagtaagcttatctgctaccagggggtactgccacaaggctcaccctgctccccaattatttccaatatgattgctcaccgaatggacggtgaactgagcttccttgctaagaagaataacgccacttataccaggtacgtagatgatattacgttctctttcactaagcggtttaaagccctgccgaaagatatcctgacatttgagaacggagatttaaatgtgggcgccaaactggaccagatcatcaacagcaacggcttcatcgtgaaccagaaaaaagtcagactcggtaaaagaagtactcgaatggaagtgaccggcattaccgtgaatgagaagctgaatgttccaaggaagtatatacgcaagatacggactctgttacacctggtggaaaaatacggcgaacaggaggccgataggattttttcgacatataagcggactcgcgtgagtaaatatccgcctagaatcgagaaagcaatttttggtatgcttacctacttagctcaaattgtgggatacaacaacatggtgtactataatcttgcgaagaagtataacagtctcgagtttaaatctaagctgctcatcattaagcctgtcgacttgcagattatcgacgcactatgggtcatcctgcttcctacgtgtgaagagggaaccgctttttctatatccaacaacctcgtagttacagccgctcacgttgttatcaacgaagatacaaaccagccattcgaggaaatccagatctacaagtctttcgcccaggaccagatctaccacctagaggtattgaagtataatattgacgcggatgtggcaatttgcaagatcatggagaattacaaagacgactccttctttgagttggggggaaacatcgagaataaactcaaactcctgggcttcccacagtttcagcccaaccagcataagcctcatagcgctgactgtgacttaatgttcaaaaccacaatcaaggagtacaagtatttctccataaatacgcccattattggggggaatagcggtgggcccgtcatcgactcatgcaaacgcgtggtcggcgtggcctcaaaaggctattttggacaaggcattattgaccagggcagtctggttaataaatcaatccacgtcaccatcatgggacacaacttgtgtagcgatatacagaatgtgaaggatcttattgactga

SEQ ID NO: 7855 - RNA, 1695 nt, synthetic construct
  source 1..1695: mol_type = other RNA
atgaacggagggttctttctcaaattttctcccaccctgtccccttctacgacaccaattgagcttgccgaattgctgggcaccgactacgcaaaaatcaagaggctgtactatcacggcgacatgcagcggcattacctggctttcgacattcccaaaaagtccggcggtaaacgtagaattctggcaccaagcgataagttgaagacccttcaggggcggctcgctagcctactgaagaagatatataagccccgagatcctgttatggctttccgcgacgggtcatccattgtgacaaatgctcatgcccactgcagaaagaaatatgtcttcaacatcgacttggagaattttttcgggaccataacttttgcacgggtgcgagggatgttaattagtaaaccgtattcgctgacagctgaaacagcaactgttattgcccatttggcgactattaatggtgctctgcctcagggcgctccctcttcacctatcctgagtaatatgatctgtgccagtctggatagagatctgtatagtctggccaagtcatacagggccgtatatacgagatatgcggacgacatcactctgtcgttttactgtctggccgaatttttacccaccgagattgtagagtactctctctccaacggtaagcctaatcactatttcagcaaggtcgggaacgagttggggagtctcgtgcgtagacacggcttcatcatcaacgagcaaaaagtgcgcttgcaggggccaggtgagagaaggaccgtgactggcctcgtcacaaaccagaagccaaatgtgccgcgcccttatatcaggaagactgccgcattaatccacagcttcgagaagctcggagagcaagctgcgaacatactttacaaacagaaaaacccgaatagctccggaatccttgagtcccacctgcagggcaggctgcttttcatcaagcaggtggccggactggaatctgtcgtttacagacgtcttgcccaacgctataatatgctgcctcttaaatcaaaggtccccaatacaccaattgctaccacggaagatagcgacaacttcaaagtcggtgagtttattaaaaacaagtgctgggtgacagaaatttccgagaacgtcgaggatgaactagttcatatccaaggaaccgccttcatgattcagggctccctactcgtgacatgtgaacataacctgagctaccagacgaagcagaaacggcacgagtatggtgagtgcctcgtgtatcgcgtgggggagggccaagcagtgtacgaagcgaaagtgatcatacgggacaaagatctcgacatagccgtgttacggatatcagatgcaccagcaggcttagagcactttaccctcgaagagacaagggaaccaaacatcggagacagggtcgcaattctgggcttccctaatcacaagaccgggccatacgtcggcatcctgaagtgccgcgtgactaataagtaccccctacataacgtgcagcattctgaagttgataaaactttgtacgccggaaattctggtggccccgtaatcaacagcagctaccacgtagttggaatcgctgccaaaggagccgagggcaatcccaacgggaagaattcatttatccgagtgaccgaactcgttaaatacctggagaagagtggatttgaaatgtga

SEQ ID NO: 7856 - RNA, 1692 nt, synthetic construct
  source 1..1692: mol_type = other RNA
atgaacggcggcttctttctcaactttctgtcccttagccccagtacatcacctgcggagctggcgcaacttctgggcaccgactacggcaaaataaagcgtctctactatcgcggagacaggcagcgacactacctggccttcgacattcctaaaaaaaatggagggaaacggcgaatcctggccccgtctgacaaattgaaaactctacagagtcgattggccagtctcctcaaaaaaatctacaaacccagagagcctgtcaaagcattcttagatggcggatccattgtctccaatgcctaccctcattgtaggaagccctatgtgtttaacattgatctcgaaaacttcttcggaaccattaccttcgccaggataagggggatgcttataagcaagccctactcactgacacccgagacggctactgtgatcgctcatttagctaccattaatgggatcctcccacagggggctccctcttccccaattctgagcaatatgctgtgcgcaagtttggacagggacctctacagccttgccaagcggaaccgcgcagtgtacaccagatatgctgacgacattacactcagtttctactgtccagcggaatttctgcctccgggagtggtggagtattcaatctctaatggcaagcctaaccattattactcgcggacaggtcaggaactccagagcttggtgagacagcacgggttcacaatcaactttgataaggtacgactccagggacccggtgagcgtagaaccgtgaccggcttggtgaccaaccagaagcctaacgtaccaagaccctacattcgcaagacagccgcactgatccattccctggaaaaaaacggcgtggaagctgccaatgcgatctataaacaaaagaacccaaatagctccggagtactcgagagccacctgcagggtcgcctactttttataaagcaggtggtgggtgagtcttccgtcgtttatagacgcctagcccaaagatacaacatgctgcccattcggagcaaggtccccaacgcacctatcgcaactaccgaagactcagataattttaaggtcggggagttcattaagactaaatgctgggtcacagaaatctcggaaaggattgaggataacctggttcagattcaggggaccgcctttatgatccagggcgggctgatcgttacgtgcgaacataatctgagctaccagactaaggagcgtcggcacgagtatgatgaatgcctggtgtaccgggtaggagaggatgagggagtctacgaggcccaggttatcatccggaataagtatttagatctggctgtgctgaagatcaaaaatgcacctgacgatttagagcacttcacactggaggtcactaaggaaccaaatattggagatagggttgccgtgctgggtttcccaaaccacaagacgggctttcacgtggggatcttgaagtgtcgcatcaccaataaatatccgcttcacgacgtgcaacactctgaagttgacaagactttgtatgctggtaattcaggcggcgccgttatcaattcttcttaccatgtggtaggagtcgccgctaaaggggcagagggcaatccaaacgggaagaacactttcataagggtgtccgaactaataggctatcttcaaaagtcaggttttgatatgtga

SEQ ID NO: 7857 - RNA, 1695 nt, synthetic construct
  source 1..1695: mol_type = other RNA
atgaacggcggcttcttcctgtccctcttccagctgagttcttccacaacgccaggcgaactcgctcaactgctcggcacagactacggcaagatcaaaagactttactataccggtgatatgcaccggcattacctggcctttgatatacccaaaaagagcggcggtaagcgccgcattcttgctccgagcgaaaaattgaagacactccaggcccgactggccaccctgctaaacaagatttatactccccgtgagcccgtgaaagcttttagagaggggtcgagcatcgtagcaaacgcctacccgcattgcagaaagaagtatgtgttcaatattgacctggaaaatttctttggaaccataacgttcaggaggattagagggatgctgataagcgagccttactcactgtctgcggagactgctagcgttatcgcccacttggcaactgtgaacggcattctgcctcagggggcaccatcctccccgatattaagcaatatgctttgtgccagcctggatagagacttgtattccttggccaaacgcaatagggctgtttatacccgttacgccgacgatattactttcagtttttacagtccagcagagtttcttccccaaaacgttgtggagtattctctcagtaatggaaagcctaatcactactactccaaggtgggacaggagttagaaaccatcgtgcgccagcatgggtttacaattaatctgaccaaggtacgactacagggaccttcagagcggcgtatcgtcacaggccttgtcactaaccaaaaacctaatgtgcccagaacctacgttcgcaaaacggctgccctaatccactcaatagagaagaatggtgaggaagccgcgaacgctatttacaaaaaaaaaaaccccaactcctctggaatcttagagtctcacctgcaggggcgactcctgtacattaagcaggtggttggcgaggatagcgaagtctatcgcaggctggcccaaaggtacaatatgcttcccatcaagtccaaagtgcctaatacacctatcactaccactgaggacagtgacaacttcaaagtgggtgaattcataaagtcaaagtgttgggtcaccgaggttagtgaaaacattaatggaaagttggaacagattcagggaaccgcgtttatgatccaagggggcttgctcgtgacatgtgagcacaacctcacctatagggacaaggataacaagcggcatgagtttaatcagtgttgcgtctatagggtgggggagggagaaggtctttatgaagccaacgtgatcatccggtgcgagaagctggatctcgctgtcctatctattaaagaagctccaacaggcctggagcatttcaccttagaagtcacacgagagcctaacatcggtgaaagagtagccgttctgggatttccaaatcacaaaactggtagccacgtgggcatcctgaaatgccgggtcacaaacaaatatcccttgtatgaaatccagcactcggaggtggacaagactctctacgcagggaactccggggggccagtgatcaattcatcataccatgtcgtgggggtagcagcaaagggagcggagggcaacccaaatggaaaaaacacgttcatccggatttctgaactgatcaaatacctgcagaagaagggctttgagatgtga

SEQ ID NO: 7858 - RNA, 1695 nt, synthetic construct
  source 1..1695: mol_type = other RNA
atgaatggtgggttctttctgaacttcgtggccctgaacccaagcaccactccgatcgagttggcggaacaccttggaaccgattacgggaaaatcaaacacctatactaccggggagggatgctcagacactacctggaatttgaaatccccaaaaagaacggcgagaaacggaagatcctggctccctctgacaaattaaaaactctccagtctcggcttgcgggccttttgaagaaaatctataacccacgcgagccagtgaaggcttttagagaagggagctccattgtagccaatgcatggccccattgtcgtaagaagttcgtattcaacattgatctggagaactttttcgggactattaccttctcacggattcgcggcatgctgatcgcaaaaccctacagcctaacccctgagacagctacggtgattgcccatctgacgacagtgaacgggattctgcctcagggagcccccagctcccctatcctgtcaaatatgctgtgcgcttcaatggatagggtgctgtactccttagcgaagcataatagagccgtctacactcggtatgccgacgacattacattttctttctattgtcccatcgagtttatccctagcagtatggttgagtctagcgtcagtaatgaccgaccaaatcattattactctaaggtgggctacgaacttcagtcagttatagaccagcacggatttacaatcaacacccgcaaggtgaggttacaggggcccggtgaaagaagaactgttactggattggtcacgaatcaaaagcctaatgtgccccggccttatatccgcaagaccgctgcactgattcattccatcgagaagcacggtgagcaggcagccaacgcaatttacaaagagaagaatcccaacacaagcggagttctcgagtctcacctccagggcaggctgctctttattaagcaggtcgtcggtgaaagttctgtcgtttacagaaggcttgcccaacgctacaacatgttgccaaccaagtccaaggtcccaaacaccccgcaagccaccgacgaagatagtgacaattttaaagtgggcgagttcataaaagacaagtgctggattacagaagtcgagcagaaattggacaatgacctggtacaaatccagggatccgcttttatgatccagggcggcttgctcattacttgcgaacacaatctttcgcacaagatcggagataaatggttcgaatttaacgagtgtttagtgtatcgtgtaggggagggcgagtccatgtatgaagctaaggtgatcatacgagataagaaactggatctcgccgtcctcaagatccaggagcctcctctggggctaaaacatttcaccctcgaagtgtcaaaagagccgaatataggcgagagggttgcagtgctgggcttcccaaatcataaaagcggtagccatcacgtaggtatacttaagtgccgactgacaaacaagtatccactgcacgatgttcaacacagtgaagtggataagaatttgtattctggcaattccggcgggcccgtgattaactcgtcatatcacgtggtgggagtggctgcaaagggtgccgaaggcaaccctcatggaaaaaacacattcatcagggtcagtgagctgattaaatacctggagaagtccggggtgatactctga

SEQ ID NO: 7859 - RNA, 1692 nt, synthetic construct
  source 1..1692: mol_type = other RNA
atgaacggcggttttttccttaatttcgtggccctaaatcccaatacatcgcctgatgaactggcggccttactgggtaccgactacggcaagattaagcacttttactataggggcgagatgcagagacattacttggcttttgatatccctaagaaaaacggagcaaaacggcgaatcttggctcccactgacaagctgaaaacgatacaggctcgtatcgcaaatctgctgtccaaactctatactccacgagaacccgttaaagccttcctggaaggcactagcatagtggctaacgcccgcccacattgtcgcaagaagtacgtgttcaatgtcgacctggagaacttttttggcaccatcacctttgcccgcgtacgagggatgctgattgccaagccatacagcctctcccctgagacagctaccgtgatcgcacatcttactactgtgaactcaatcctccctcaaggggccccctcctctccaatcttgagcaatatgctatgcgcatcccttgatagggatctgtactctctggccaagagacaccgctcagtgtataccaggtacgccgacgacatcacgttctctttctattgtccgatcgatttcgtaccagcagagctggttgattggagtgagagtaatggccgcgctaatcactatttttcccaagtcggatacgaactgggcagtgccatcgaaaggcatggcttcaaggttaaccagtcgaaggttcgcctgcagggacctcacgaacgacgcattgtaacaggcctcgtgacgaaccagaagccaaatgtgccgcggacctacattaggaagacagccgccttgatacattctattgagaaatacggcgttgaggccgccaacattgttttcagagaaaagaaccctaacagcaccgctaccgtggagtcccacctccagggacggttactctatatcaaacaggtggtgtcagaggacagcgaagtatatcggagattggcgcaaagatataacatgcttcccattaaaagcaaggtccccaatgctccacaggcgaccagagaggattctgataactttagagtggggaaatttgtcagggacaagtgctggatcactaatatagaagagtacaggaacggtaaattggtgatgatccaaggatctgcatttctgatgaaaggaggccttttagtcacatgtgaacacgtgctcagcgctatcgtcgatgactcaagggaagagtttaacgagtgcctcgtgtcccgtattggagatgatgaatccatttatgaggctaaggtgataattagaaacaaagagcttgacattgctgtactaaagattaaggacgcccccgcagacctcgagacattcacactggaggaagtgaaagagcccaatattggagatcgggtcgcggttctgggcttcccgaattttaaagaaggttctaaagacgttggcattctgaagtgccgtataaccaataagtaccctctcttcggggtgtcccacagcgaagtggacaaaactctgtatagtgggaacagtggaggtcccgtcatcaattcaagctatcacgtcgtcgggatcgcagcaaagggtgcagccgggaaccctcaggggaaaaatagtttcatccgggtgtctgagttacggaagtacctggagaagtcaggggccatctga

SEQ ID NO: 7860 - RNA, 1692 nt, synthetic construct
  source 1..1692: mol_type = other RNA
atgaatggaggtttctttcttaactttacgaccctcaacccctataccgcgccagaggacttagcaaccttgctgggcaccgactatgggaagattaaacatttctactatcggggcgagatgaaacgccactatctggccttcgagatctccaagaagagcggcggaaagcgtaagattctggctcctacagacaaactgaagactattcagggcagaatcgctggtctgctatcaaagttgtataaacccagagccccagttaaagctttcctggtgggccagagcatcgtagcaaacgcacgcccacattgtcgtaaaaaatacgtgttcaacatcgatttggagaatttctttggcaccattacctttcggcgtgtgaggggcatgctgatggccaagccttactcactgtcccctgaaaccgcttcggtgatcgcgcacttgactacggtggatgggctcttaccgcagggagctccatcttctccagtgatttcaaacatgatttgcgctagcctggaccgggagctttacagtctggccaagaggcatcgcgccgtgtacacacgctatgctgacgatatgacattcagtttctatacacctatccaatatgttcccagagagctcgtcgagtggtgtgagttggatggccgacccaaccattactcctctaaagtcggccacgagctagcagccgtaatagctactcagggtttcaagatcaatgaagataaggtgcgcctccaggggggtagggaaaggcagctggtgactggcctggtcacgaatcagaaacccaacgtaccgcgcccctacattagaaaaacagctgcccttgtgcacagcgtggaaaagtttggactggaagtgtcaacctctatatttaaggagaagaatccaaactctaccgcaaacatcgagacacacttgcagggacggctgctctatattaaacaggtcgtgggggaggaaagcaaggtctaccgacggctcgcacaacggtacaacatgctccctattaaatccaaggtgcccaacactccgatcgccacacccgaggattccgataatttcaagatcgggaagtttatcaaagacaaatgctgggttatcgagataaacgaggagataaatggaaagttagttagcagtcaagggtccgcgttcttgatcggaggtaggcttctggtaacctgcgagcatgtcctggccgaaaattttatcgatggtgagaggattgaggtcaacgaatgcctgatcagacgaatgggggacgaaaatatttacgaagccaaggtcataatccgatctaaggacctagatatcgcagtgctcaaaattgtggatccacctgcgggactggaggtgtttagtctcgaagacattaaggagcctaatatcggcgacagagtggcagtgcttggatttcctaattttaaagaagggagcaacgacgttggggttcttaaatgtaggcttacaaacaaatacccactgtcaggagtaatgcacagcgaagttgataagactctgtacagtggcaatagcggcggccccgtcataaatacttcctaccacgtggttgggattgctgcccaaggtgccgccgggaatcctgaaggaaaaaactcgttcatcagagtctccgaattaaagcggtatctcgacaagtctggcgccatatga

SEQ ID NO: 7861 - RNA, 1680 nt, synthetic construct
  source 1..1680: mol_type = other RNA
atggaagctttcttaaacctcattggccttactcctcacaccaccccccaggagctagcccagctgttgggaacagactactctaagattaagcggttatactataggtcacccatcacccgacactatcacgaatttaacatcccaaagaagaacggtgacaaaagaaagatactggcaccaagcgagaagctgaaaacccttcaactgcggattagtgcgctgctgaacaagctgtatgatccacgcgcaccggctaaagcctttatccaggggaggagcatcgtcgataacgccgcaccgcactgtcgtaaatcctttgtgttcaatattgacctcaacaactttttccccagtatcaccttcgggagggttagaggcctacttatggcaaaaccttacagtctgtcctccgagacagctactgtgattgctcacctgtctactgtgaatggaagcttaccccaggggtcaccatgctcaccggttatcagcaatatgatttgtgccgggctggatagggaattgtattcattggcgagggaacatcgcgccttttacacacggtatgctgatgatatcacgttttccttttactgtcctcttggctttatctctcgaaagattgttattccctccctcagtaaccagcacacgaaccattatgattcaaaggtcggcgagctacttaatgagatcatcatctcccacggattcacaattaatcaggggaaagtccgattgcagggatccaacgagagacaggtggtaaccggactcaccacaaatcaaaaaccaaatgtgcctcggacatttatccgcaagaccgccgccttaatccactctattgaaaagacgggccttgagcaagcaaatctcatattccgtgagaagaatccaaacagcaagggaacattggactcacatatccgcgggagactgctgtacattaagcaggtggtgagtgaggaaagcgtggtctacagaagactggcccatagatacaacatgctgcccatttcggcaaaagttcccaatcccgccatttctgccatcgaaaataacgagaacttcaagatcggagagttcataaaaaacaaatgctggatcgtgaatctgtgtgaagacattgatggcgatgtggttgtcctccagggtactgcatttacaataaagaatcgcctgctggtaacctgcgcgcacgtactgcagtattccggtaaggacttcgacgattgcgaaatcttcagggtgcatgaagctcaaaagactctaaaggccaaagtcataatccgtgacaaccaatctgacatcgctatcctgaagatcctcgagcctcctagcaatttggagccattcacccttgaggaggagaaagagcccaatattggcgaaagggtcgctatcctcggctttcctaacttcaaagaaggggccacaagcgtgggcatactccgctcccggattactaataagtatcctctgtttgcaccacccgtgatgcatagcgaggtggacaaaactctctacgccggtaattccggcggtccagttataaacagttcttaccatgtagtgggaatcgcttcaaaaggtgccgcgggctctcctactgggcagaacagcttcatacggatttcggagctgattaaaatattggaacgatacgaaaccaactga

SEQ ID NO: 7862 - RNA, 1680 nt, synthetic construct
  source 1..1680: mol_type = other RNA
atggacggagggacattcttgcttggcactctgggtcctacaactacccctgatgaactggcgcggatgctaggaacctcctactcaaagatcaagcatttctactacagtagggacatgggatctaattataggcagtttacgattccgaagaagaacggggaaaaacgcgtgattctggcacctgaaaattggctaaaaacactccagctacgactcgcgaaacggctccaattgctctacaagcccagaaaaggggtaaccggattcgtgaaaaattcaggaatcgctgataacgccaatctgcataaaagatcgcgatacctgttcaacattgatctgaaggactttttcccctcgataaaattccacagaatacgtggcctcctcattgcaaagccatactcacttatgccagagacggccagcgtgatcgctcatctgtgtacatttcggggttccctgccacaaggggccccaactagtccaattttatccaatatgttctgcgcatcactagacagggaactgtataccttggcggtccgacacaacgccacgtatagcaggtatgcagacgatattagcttttctttctattgcccactgcggagtctgccccctgaaatcgtcgtcacaagcgagagacagggcgagttaaatcactataaagccaccataggcgataagctgcgtgaggctatactgaggtttggctttgaagaaaacgaacgaaaggtgcggcttttgagccgaactgagaagcagctcgtcaccgggctggtgtcaaactgtaaggcaaacattgaccggaggtacgtacgctctaccgcggctatgattcactccctggagaaagacggtgagacagtggcaaatgagaggcgcaaggccaaacacccggacagcactactcccgtggctgcacacgtgcagggtaggttgcttttcatgcaccagattttgggtaaaaattctccagtttacgcccggctggccaatagatttaatgtgctgccactcaagtttaaagtgccccctcctagtctgagtaccagcgaacgcgaggcatctatagccgtaaacagattcgttagagctaagtgttgggttgtcgaagtagctattgacgtgcccggcgattgcatcatttcccaggggtccggcttcatgatcgagggtggactgctggtaacctgcgcacacgtgctggaggagaagggagtcttggtggacgagtgcgagatctatcacgtggatgatgatgcccagcgctataacgctacagtcctccatcgtgaccggaacgccgacatcgccctgctcaagatcgaagactgttccgagaatgagtactttcatcttgaaagcgatgaggagcctaatatcggggacagggtggttatccttggctttcctaacgttaagaacggcgccaaggttggcgtgctccaagcccaggtcagtaataaataccccctctacgatccggaaatcatgcattcagaagtggataagttactgtatcccggcaatagcggcgggcccgttatcaacgctagacaacgcgtggtggggatcgcagccaaaggagctgccggatctgctgagggccagaactcttttatccgcgtctccgagttattcaaggtccttaaagcggccgacgggttaaactga

SEQ ID NO: 7863 - RNA, 1680 nt, synthetic construct
  source 1..1680: mol_type = other RNA
atggacggtggtattttgatcaacgactgcctgaatcctagcacaaccccggaggacctagctttcatgctcggaacttcttacaacaagatcaagcgcttttactacgatagggacatgtccgcaaactaccggcatttcactattccaaaaaagaatggcgaacccagacacattctcgcccccgaaaattggttaaagacgctgcagataaggctggctaggcggctcaccctcctttatacacctcgcaaaggggttaccggcttcataaaagagagtgggatagtcgtgaacgccgataagcacaaacggtcttcgtacgtgtttaacgtggatctgcaagatttcttcccctcaattaattttcatcgcctgcgcggtatgttaatcgctaagccatattcactgctgccccagaccgctagtgtgatcgcgcacctgtgcacatacagagggtccctgccacagggggctccaacttctcccgtgctttcaaacatgttctgtgccagcatggatcgcaaactatatgagttggcgatccggcacaaagctacttattctagatacgcggacgacatcacctttagcttttactgtcccctgaggtatgtgtcaagtgcaatcgtgaaggcctctggcagacagggcgagctgagccactacaaggcaacgcttggcgacgagctcaagtccattatcaataacttcggatttgtagagaacgagaggaaggttcgactgctgagccggacagagcagcagttggttaccgggttgctcgctaacgccaaggccaatattgatagaagatacatccgtaagaccgccgctatgattcactccctcgagcgagacggcgagacagtcgcgaatgagaggaggaaggagcagaacgctgatagcagtacacctcttgcagcgcacgtgcagggcagactgctctttttacatcaagtccttggcaagacctcacctgtctatgctcgtcttgccaaccgattcaacgtgctgcctctgaaattcaaagtaccgccaccacagttaacgacttccgaacgcgaggcaattatcgcagtctccaagtttgtccgggccaaatgttgggttgtgcaggtcgccatcgacgtcaacgacgactgcataattgcccaggggtcgggattcatgattgaaagtggaatcctggtgacctgcgcccacgttctggaagaaaagggggttactgttgacgagtgcgaaatctatcaggtggatgatgacggccagaaactgacagcagaagtcatataccgaaatagagccattgacattgctattctgaaagtgcatgattgtggtactcaggagtttttccatctggaaaccgatgaggaacccaatataggcgatcaagtggtgatcttgggatttcccaatgtcaaggatggcgcccgggtgggagttatccaagcccgtatcagcaataaatacccattgtataaacctgaggtgatgcattccgaagtagacaagatgctatatccgggaaactccgggggacctgtgataaattctcgccaacgagtggtaggaattgcagccaaaggggccgcaggctctagcgaaggtcagaatagcttcatcagggtatcagaacttatcaaaatcctccctgcactcaaggagcggttgtga

SEQ ID NO: 7864 - RNA, 1677 nt, synthetic construct
  source 1..1677: mol_type = other RNA
atggggggggtattcttgctttctgatcgtctgggacctacaaccactgccaacgaactcgctgtgatgctaggtactagctacgctaagatcaagtacttttactattctcgtcccataggcgactgttataagcagtttagcatcccaaaaaaaagcggaggcaagaggctgatcctggccccagatgataaactcaagacactccaaacaaggctcgcaatacggcttgcagagatctataccccccggaagggagtcaccggttttatcccaggttccaacatcaccaaaaacgccaagctgcactccaggtctaagtacgtgttcaatattgacttggagaacttcttcccttcaataaagttctacaggattcgtggtctactgactgcacagccttatagtttgatgcctgagacagccacagtaatcgcccacctgtgcaccctcaatggcgctctcccacaaggggccccaacctctcccatcctctcaaacatgttctgcgcatccatggaccgcatgctttattcactggcagtgaagtttaaggcaacatatagcaggtatgccgacgatatctcctttagctttaagtgcccgctgcgcttcattcctgaggacatagtcaaggtgttttccagacagggcgagttgagtaactataaggcagagttggggagtgtgctgtcagtgattattgctgactttgggttcagcgagaacaaaaagaagactcggctgctgtcgcgatctgagaaacaaattgtcaccggcttggttgtgaacactaaggctaatgtggacagacggtacgtgcggaagaccgccgcgatgattcatagtcttgaacaggtcggggaggaagtgtccaatgagcgcagagccgaaaaaaccccgggaagcacgactcctcttgccgctcatgtccagggccggttactgttcatacatcaagtgttaggcaaaacctccccagtttacgctagactcagtaaccgcttcaacgtcctgccattaaaatacaaggttcctagctccatggtgcttactagcgaaagagaagcctctattgctgtaaataagttcgtgcgatcaaaatgttgggttgtcgaggttgcaatcgatatcccaggggattgcattatctcccaaggcagcggcttcatgattagcaaaaacatgttggtgacatgtgcgcatgtgctggaagagaagggagtgagggtgaatgagtgtgaaatataccaggttgataacgatgcggtccgccaccaggccgaggtactgtttcaggacttcaatacggacatcgcagtcctgaagctgctggactttcaggttgacgagttcttccacctggaggaaggtgaagaacccagtatcggtgatccggtcgtggtactaggatttcccaatgtgaaaaatggggctaaagtcggcgttatgagagcgcaggtgacgaacaaataccccctctcaaaaccccccgtaatgcactccgaggtggataaaatgctttaccctggcaattcggggggacctgtcatcaacgcacgacagcacgttgtgggcattgccgccaaaggagccgctggatcagccgaaggacagaattcttttattcgcgtgagtgaactgtctaagctcttagccgctaataaacccgcgtga

SEQ ID NO: 7865 - RNA, 1686 nt, synthetic construct
  source 1..1686: mol_type = other RNA
atgaacgggggtttcttcttaagctccgatcatctgggacctacaactacccccgatcagctagctactatgctggggaccgactacgcaaagctgaagtacttctattacagaagcggcatgcagcagcactacagagagttcaagattcccaaaaaaagcgggggtgtacgcactattttagccccaggggataagcttaaaacactgcagctgcggttggccaagaggctgacccggatgtaccgaccgcggaagagtgtaaaggcttttgtcgagggcacctctataactcataatgcagccgctcattgtggcaagaaattcgtgttcaatatagacctcaaggacttctttaccagcatcacgttcgcccgggtacgaggtctgcttatcgctaaaccctattccctgatgcccgaaacggccaccgttatcgctcaccttacaactgtgggaggcgtgctaccgcaaggagcccctagcagtcctgttctctccaatatgctgtgtgcgtccctggatagggacctttattcactcgcggtcaagaatcatgccgcttatacaaggtacgccgacgatatatccttttccttttactgccagatctcatacctgccatcagaactggttgtgacaactggttctagtgacaacagtaaccactataatagcttggcaggagaagaactcagccggttgatttctcgccatggatttcgcgtcaacgagaaaaaagttcggctgcaagcttatacagagaggcaggtggtgacaggcttgatcgtgaataggaagccaaacgtggaccgccgctacataagaaagaccagcgccctcatccacgctctcgagaagctgggggcagaagaggccaacgccgtacgaaaagtcaagcagccggactctacaacccccctggaggcccatatccaaggacgtctactgttcattaagcaggtggtgggactcgaaagtgaggtgtataagaggcttgctgatagatttaatatgttgcccatccagtacaaagtgcctaaaccagtctcggagaagttggaaaaggacctgaactttcgaatagggaaatatgtcctggacagatgctgggttgtggatgtgtgtatcgatgtccctggcggatgcgtcgtatcccagggttccgccttcatgatgaaaggccaactccttattacctgtgcgcacgtcctagcagagaagaaaattactgtcaatgagtgcgaagtgttcagggtagattcgccagatgagaggtacgaagcgaaagtgatctacagaaatgaccacgtcgatattgcaatcttaaagattcaggacggcctcgaaaattatgaaagcttcaacttggaggaggcagaagagcccaatatcggcgaccgtgtggtggttctgggctttccaaactttaaagaggggagtacgtctgttggggttattcgcaccaagatctcaaacaaatatccactggacaaacctggcgtgatgcactcagaggtggataagctcctgtaccctgggaactctggaggccccgtgcttgactcagccaatcacgtggtcgggatcgcagctagaggagccgcaggtaacgctgagggccagaactcttttattcgggtgtccgaattactcaagattctgaaagcccgtcaagttgtgtga

SEQ ID NO: 7866 - RNA, 1698 nt, synthetic construct
  source 1..1698: mol_type = other RNA
atggacggtgatatcagttctcctaagccaaccctggatagttccacgactcctgaacttcttgcaaccatcctgggaacttcatacggcaagattaagtacttttactatgggcgctcaggatcaagaaccgcgtccttctacacccgattcgaaattaacaaaaaaaacgggggggtccgggagatttatgcccccaacaaacaactcaaagtgttgcagggcagaattgcctcattgctctctaatctgtacaagcccaaaaagtatgtcaccgcatttgttaagggaacaagcctctacgataacgcaatcaatcacacaagaaagtcgttcgtattcaacattgacttgaaggacttcttccctactataacttttgcccgcgtccgcggccttcttatttctaagccttacagtctggacccatctactgcctctgttatcgcacatttgactactgtcaatggtcatttaccccagggagcaccaagttcaccagtgatctcaaatatgatttgtgcctccttagatcgccagctaaatagcctggcaaagcagcatcgggcgcagtatacaaggtacgccgatgacattacattttccttttattgtcccctcaaatatctccccctggaaattgtcaatacccaagccaaccccgagaagataaaccactacaacgctaggactggctcgaaactgcgtgaaataatctccaccaacgggtttattgtgaatccgggcaaggtgcggctgcaattcaaacacgagcggcaggtggtcaccggtctgacagtgaacaaaaaggttaacgtagatcgaagatatatccgtaaaacatctgcgatgattcatagcatagagagtttgggtatcgagggcgccaaatttttgaacatcgctctgaatccctccaaggagaatcctgatgaagccgccttcgagctggaaccacatatacaggggcggctcctgtttattaagcaaatcaagggcgagtcatgtcccgtgtacaggaatatggctatcaagtttaactccctgtctgaagagtacaaggtgccactcagcagccacgaaagcaaagacaatatctccattaatgcaaacgtcgtcgacaagtgctggatacttgagattgaagaaaccattagccaggggtctggatttatcgtcgaagggggactactggtgacatgcgcccacgttgtagctagtaaggacgatgctgataagcctgtggagtcctgcaccgtgttccgagtgagcaataaatctgaccagtataaggctatcgttgtgcattacgacaaacacagagacattgcactcctgaaaatcgaccatgatacacacaagttcccgttcttcaggatcgaggagaaaataccagtaaagcagaatgataaggtgtccgtgtatggattccccgattataaaccggcttccacgtacgtcgggtgtgtctgggccagggtagtgaacggttttatcgctagcgccgtgacatactatgaagtggacaaagtgctttactcgggcaacagcggcggacctgtgctcaacagcaatctgcacatcgttggcatcgctgccaaaggcgcggttgacggtcacgagctaaacgcctttttatgcaagagcgagctggagaaagttatcacgacctatagtgctctgcacaatgacgcatga

SEQ ID NO: 7867 - RNA, 1743 nt, synthetic construct
  source 1..1743: mol_type = other RNA
atggacgaaggttctctgccggaggaatctttaaaactgacatcagagagttcggtagacgacctggccgcaattctcggcacaacctatccaaagattaagtacttctactactcatcatcggtggcaggccactatagcaagttctccattgccaaaaagggaggggggaagcgtgagatccttgcccccgataaccatctgaaagtgctccaaaaacggctggcccaccagctgagcttcctgtacaagccaaacccacgagctaccgcctttctcagtaactcctccatagttcgaaacgcgtcatttcatacgcgcaagcggttcgtgttcaatatagatttgaaggacttctttccttccatcaccttcgctagagttagggccatgctgatgtccaaaccctactctctgacgcctcaaacagccactgttatcgcgcatctagccactgttaaggggaagttaccgcagggtagcccatgttcccccgtcataagtaacatgatctgtagtagcttagacatgcaacttagaactctcgcaaagaggcacaaggcaagctacaccaggtatgccgatgacattaccttcagtttctacgtgcccatgcagtatttgcccgaggatatcgtggtattggggggcgatgacggcgagaaaacccatcacgccgtgtcggtgggaactgcactgtctgaaatcatcaccaaaaaaggctttgtgatccaccctgggaaggtgaggctgcaacgccgcgatgagaagcaggtggtcacaggactcgttgtgaatcagatggccaacgtcgataggcggtacattagaaagaccagcgccatgatccacagcctctcaactttggggctggagactgccaacttaatccacaagtctaagagccctgacctgacctctaaactgagcgcgcatgtgtttggccgtctcctatttatccaccaggtgaaaggagtggattcaccagtgtatcggagactgggcatgcgatttaaccagcttgagtcccagtacaaagtacctctggccaagctgctggaatcttattctgatgctggaatgaaacacaatcagcttaacattcgccgctgctgggtgttggaaaatgaaaagtggggcacacaggctacaggatttatgcttgagaataatctcatgatcacctgcgctcatgcattcaattatgtgctcaaccccgaaattgactcagacgtggagtgttgtatagaacacgattgcaaagaggtttggttcgatgactgcacagcttatagagtaaatgaccgaagcatcaaatacacggtcaaggtgctttttctggataaacatcgggacttggctgtggtcagtttcagtgaaactaatgaaaagttcgagtactttaggctggagtacgacctgcaggcagaaattggggataaagtatccattctcgggtttccgaacttcaaagttggcagtacagacgtctttcgtttttgggctgctgtcagcggaaggtacgttagatccacaatagaatgcggctctattgacaaggtcgtctattccggcaattcaggcggacccttgatcaatagcaaccagcatgtcgtcggggttattcggcgcggtgctgcaggtgatccagagggtactaacgagttcgtatgtgcctccgaggtggcgaatgtgctaacgcaatatctttctaccctagttgtcgcacctgagagagtgtga

SEQ ID NO: 7868 - RNA, 1731 nt, synthetic construct
  source 1..1731: mol_type = other RNA
atggacgaaggatcctccgtggatgagtctctcagattaacatctgagtctgacgtggatgacctcgctaacattttgggcactacttatcccaagattaagtacttctactattcccgcagagtagcctcccattactcaactttcagcatccctaaaaagagcggcggcaaacgacagatccttgctccagataaccatctcaaagtcctacagaaacgtctggctcggcaactgtcatttctttacaagccaaatccacgggcgactgcgttcctgagcaactccagtattgtgagaaatgccagctttcataccaggaagaagttcgtttttaatattgacctcaaggacttctttccctcaattaccttcgcgagagtcagggctatgctgatttcaaaaccctacagtttgacccccgagactgccacagtgattgcgcatctcgcaaccgtcgacggaaagcttccccaggggtcaccatgttcgccagtgatttcaaatatgatctgcgccagcctggatacacagctgcgcacgcttgctaaaaagcataaggcaagttatacaaggtacgcagatgatataacgttttcattttacgtgcccatgttatacctgccggaggatatcgtcgtgctggatgataatgagggcggcaaaacgcaccacgtggtgtccgtgggacctgttctgtccgaaatcatctccaagaaagggttcaagatcaattccaagaaagtacgcctgcaacggcgggacgaaaagcaggtagtgaccggattggttgttaatcagaaggtgaacgtggacaggaggtacataaggaagacatcagcaatgatccacagtctgttcaccatcggggttgataaggcaaacattattcacaaggctaagagccctgaatctagcagtgagctgtccgcccacgtctttgggcggctgttgttcatccaccaagtcaagggggtggactctcccgtctatcggcgcttagcaatgcggttcaaccagcttgagactccttataaagcaccgctagccaagttcgttgaagtacacgaagacgccggcatgaagcataaccagctcaacattcgcagatgttgggttatcgaaaacgaacagtggggtacccaggccaccggctttatgcttgaaaataacctcatgatcacctgcgcccacgccttcaattacaaactaagcgacaaaattgacagcgacatcgagtatgctatcgaaaacaattgtgacgaggtgctgtttaaagattgcgtggtgtatagagtcaacgaacgagccaaaaagtattcggccaaagccatctttttggataaacaccgcgacctggctatagtcagtatagatcagacagatgagcgtttcgagttttttaggttggaagagaacctggaggtggagataggtgataaggtgtctgtcctcggtttccctaacttcaaaattggcagcaccgacgtgtgccgattttgggcagccgtctccgggaagtacatccgaagtacaatcgagtgcgggtctattgacaaggtcgtttattctgggaactctggcggaccactgataaatagcaatcaacatgtagttggagtgatccgtagaggagctgctggtgaccctgaaggcactaatgagttcgtatgtacatcggaggtgtttaaagtgctcaaagagtaccagagcaccctggtggtcggttga

SEQ ID NO: 7869 - RNA, 1731 nt, synthetic construct
  source 1..1731: mol_type = other RNA
atggatgaagggtcctccgtagatgaaagtctaaggctcacatctgagtccgacgttgacgatcttgcgaacatcctgggaacgacataccccaagataaaatatttctactactcgcgtagagtggcatctcattatagcacatttagcatcccaaaaaagaatggcggcaagcgccaaatttcggccccagacaatcacctgaaagttcttcaaaagcgcctggcacggcagctttccttcttatataagccaaaccctcgcgccaccgctttcctcagcaacagttccatcgtgaggaatgcaacattccacacccggaaaaagtttgttttcaacatcgacctcaaagatttctttcccagcatcaccttcgcccgtgttcgcgcgatgctgatttccaagccatattcgttgacaccagagactgccactgtgatcgcccatctggctaccgtcgacggcaaattgccccagggaagtccttgctcacccgtgattagcaacatgatctgtgcctctttggatactcaattgagaacgctcgcaaagaagcacaaggcttcatacaccaggtacgccgatgacataacctttagtttctacgtgccaatgttgtatctcccggaagatatagtcgtgctcgacgataaagagggcgggaagactcatcatgtggtgtccgtcggcaccgtgttaagtgagatcatcagcaagaaggggtttaaaatcaatagcaaaaaggtccggctacagaggcgagacgagaagcaggtggtcacaggactggtggtgaatcagaaggttaatgtcgacagacgatacatcagaaagacatccgctatgattcattctctgtttatcattggcgtggataaggctaatatcattcacaaagctaagtcacctgagtcttccagcgagctgtctgcccatgtatttggacggctgctgtttattcaccaggtgaagggggtcgactctcccgtgtatagacggctggccatgcggtttaaccagctagagacgccttataaagccccgctggctaaattcgtggaagttcacgaagatgctggcatgaagcacaatcagctcaacatccgaaggtgctgggtcatagagaatgagcagtggggtacacaggcaaccggtttcatgctggagaacaaccttatgatcacctgtgcacacgcgtttaactataagctgtctgaaaagattgacagtgatatcgagtacgctatagaaaacaattgcgatgaggtcctgttcaaggactgcgttgtgcaccgagtgaacgagagagctaagaaatactcagccaaagccatcttcttggacaagcaccgggatctcgccattgtcagcattgatcaaactgacgaaaggtttgaattctttcgccttgaggaaaatctcgaggttgagattggcgacaaagtaagtgtgctgggtttccccaattttaaaattgggagcaccgacgtttgtcgtttttgggcagcggtgtcaggcaaatacattaggtctactatcgagtgcgggagcatagataaagtcgtatattccggaaactcaggaggacctcttgttaatagcaaccagcatgtcgtgggcgtaattcgcagaggggccgcaggtgaccctgaaggaaccaacgagttcgtgtgtacttcagaagtgttcaaagtgctgaaagaataccagtccactttagtcgtaggttga

SEQ ID NO: 7870 - RNA, 1596 nt, synthetic construct
  source 1..1596: mol_type = other RNA
atgagcgcctattataggtctttctccatccctaaaaaatccggaggggtaagaaccatctttgccccatccaatagattgaaagtgcttcaagcccgcctgaaagtgcagctatccaacctttatttgccatcaccttgcgctaaagcctttctcaaggatacctctatagtgtcaaatgcgaatgcacacattcggaagaaattcgtttttaacctggatctcaaggactttttcccaaccatctcgttcgcacgagtcagagggctgcttatctctaagccttactgcctgaaaccagaaaccgcctccgtgattgcgcatttggccactattaacggcaatctgcctcaaggggccccatgttcccccgtcatcagcaacatgatgtgtagttctttagacagggaactgcgcgcgttagctatcaagcaccgagccaattacacacggtatgctgatgacatcacattctcattctatacgcccatggaatacttgcctgctgacattgtgatcgttaacgccggtaccctgaccagccatcacctggcaacagtcggacccgagctcctgaaaattatatccggtaaaggattccaggtgaattttagtaaggtcaggctccagcgccaggacgaaaagcaagtggttacaggactgctagtgaataagaaagtcaacgtggaacgaaggtacatacgcaaggtcgccgctcagatccacagcatgatgtgcattggtttggatgcagcgaacgctattcataaggccaacgatccggacgctaatactacactggaggggcacgtgttcggaaaactgctttttattaaacaggttaagggcgttgactcatccgtgtaccgtaggctagcaatgaagttcaatcagctcgacgccccctacaaggtcccccttgcgaagctcgaggaattttcgggcgacgccggcctgaagcacaatcagctgaatataagaaagtgctgggtactggagaacgaagactggggcactcaggcaacaggtttcatgctcgagaataacatcatggtaacttgcgcccacgccttcaactacaagttaaacgaggataatgactctgatgcagactacatgttcgagcacaacgtgactgaggtgtggttcgaggaatgtgtggcctatcgggctaacgaacgcagtaaaaagtacgctgccaaagtcctgtacatggaccggcatagagatgtggctatcataagcatcgttgatgctgatcggagatttgaattctttcgtcttgaggagaacattcaggtggaggtaggcgatcgtgtcagcgtctttgggtttcccaatcaaaagccaggctcaaccgacgtgtgtcggttttgggcagatgttaacgataggtatgtgcgctctatgatccagtgcgcaagtattgacaaggtgatgtatgctggcaacagcggaggcccggtactgaacttgaatcagcatgtggttggcattgtgaggagaggggcagccggagatcctctcgggacgaatgagttcgtatgtagtagcgagatctttaaagtgctcgaagacatgaacaaggttgtctga

SEQ ID NO: 7871 - RNA, 1668 nt, synthetic construct
  source 1..1668: mol_type = other RNA
atgagtaaactggactctgctattgatgttgacggcctggcttctctgctgggtacaagttacaccaagttacgccacttctactacaagccagatacaagcgcatattactccacgttcgagatcgacaaaaagtcgggcggcaaacgaacaatcatgtccccggaaaaaagactgaagaccctccagtcaagactgaaagtgctgttggagggaatctatgtcgcaaagaagcaggtgaatgcatttgtgaaggaccggagcattgtcaccaacgcccgagcgcacactaggaagaagttcgtttttaatatcgatctcgagaacttcttcccttccataacctttgcaagaattcgggggatgctaatggctaaaccttactctctgcagtcaggggtggcgacggtcatagcacacctggctaccgttcgtggatttttgccccagggcagtccctgctctcccattttgtcaaacatgatctgctcgtccctcgatagacagctactgacactggccaagaagcacaggggggaatactcacgctacgctgatgatatgaccttctccttttacgacgatctccagtttgtgagtgaagagattgtgaggtgtttaaagggcgacggacttagcaatcattaccactgcagagtgggcttttatctcgagtcagtaatcctcaagtccggcttcaaaatcaacgagagtaaggtccgattacagggccgttatgagcggcaaatcgtgactggtcttgtggtgaacaagaaggtaaacattgagcgccagtatatccgtaagacatccgccatgatacatagcatgtcttccgacgggctggacttcgccagagagaagtttaaatctaaggcgaaggagtcaagtgtaatgctggatgcccacctccagggccgcttgctgtttattaagcaggtcgtttcggttgactcacctgtgtataaacgattggccaaaaaattcaacctgctcgggcttaaatataaagtgccactcgggaaatccaagaatatcaggggagccgaaagcagaaggtattctaaatggtacgacgatcggtgctgggtgattgaaagcgagctgactactgccgacgtttacgactgcgcccaagggaccggcttcgttatcaaggacggatacgtcatcacatgtgctcatgtggttaagttcaacggagtcattgctaatgaaatccagctctttcgcgtaagctcccgcggagacgtgtgcaaggctagcgtcgtgatgtgtgatgaagatcgggaccttgccatcctgaggatactagatcctgccttacaagatcttccctactttgacctgagcgatactagtgcagatattggcgatggagtcgacgttctaggtttcccaaatgataaactgggtgccacgcatgtcgggcggcagaaagtaagcgtgcggaacaaattttctatatccgcagtaaccttctgtcaaattgataaagaactctatgccggcaatagcggaggtccagcacttaacgaagacggcgacttggtgggtgtcgtgactgcggggaatgatggagacggctataatgaccatagcaggttcgtgtgtatttctgagctgaagaaagtgctgcacttgcttatcggggtgaaggacgcttga

SEQ ID NO: 7872 - RNA, 1677 nt, synthetic construct
  source 1..1677: mol_type = other RNA
atgaagctggactctaccctctctgtggacggcctagcaagcctcctcggaacctcctacatcaagatcaagcacttttattacaagcccaatacctccgcctattattctactttcgaaatcgacaagaagtcagggggtaaacgcaaaattatgagtcctgaagaaagactgaaaactttgcagagacgattaaaactgctgctagagggagtgtatgtttccaaaaagcaggtcaacgctttcgtaaaagaccgatcaatagttactaatgcaaagtcacatacccggaagaaatttgtgcttaacatcgacctggaggatttcttcaccacgatcacctttgctagggtccgcggcctcctcattgccaagccctacgctttgcagccttccgtggctacggtgatcgcccacctggctactgtccacgggttcctgccccaggggtcaccatgcagtcccatcctctccaatatggtgtgttcctccatggacagacaactcttgagtttggcaaaagcacacagggcagagtattctcgttatgcggacgacatatcttttagtttttacgacaacctgcagttcatcagcgaggacatagtggagacagtaaagtctgatggactgcataatcactaccagtgtcagactggtcaggcccttgagagtatcatcctgaggagcggcttcaagatcaacgagagtaaggtcagattacaggggcgctatgaacgccaggtggtcacgggtcttgtcgtgaacaagaaggtgaacgtggatcgccaatacatccgcaaaacaagcgccatgatccattctatttctaccgatggtctagcattagcgcgggagaagtttaagtcaaaggtcaaagacagcagcgtgatgctggatgcccacctgcaaggcagactgctttttatcaaacaggtcgtaaccgtggatagcgtggtttataagcgtcttgccaagaaattcaatttgctcgaaattgactacaaggttccgctgggcaaatccaagagcgttcgtggactggaatcgcgacggtactctaagtggtacgatgaacggtgctgggtgatagaaagcgagctgtcaacagccgaggagttcgattgtagccaaggaacaggctttgccataaagggaggctacattatcacatgcgcacatgtggtgaaattgaagggtggcatcgccaacgatatcagtctctgcagggtgtcaaaaaggggagaagtttacaaggctagcgttattgtgtgcgatgacaatcgggaccttgctgtcctgaaaattgtagagccagcacttgccattctgccttactttgacatgtctgagacaattgcggatattggtgacggggttgacatactgggctttcctaacgataaactgggggccacacacgtgggccggcagaaagtgtcagtcagaaacaaatttgccatttccgccgtgactttctgtcaaatcgacaaggaactctatagtgggaattccggagggccagccctgaatgatgatggagacttaattggggtcgtaacctcgggaaacgatggcggcggcttcaacgatcatagcaggttcgtctgtatttccgaactaaaaaaagtactccaggatctggtggttgctgctaatgagcaggctttggcgtga

SEQ ID NO: 7873 - RNA, 1725 nt, synthetic construct
  source 1..1725: mol_type = other RNA
atgagcaaactcaaactgtgcaaatccgtcgacgagcttgctgccctgctgggtactacatacggaaagattcgctacttttactacctgcatcctacatctgagtcttactcgacattcgagattaagaaaaagagtggtggcgtgagggagatttcagcaccctccgacaagttaaaaactttacaggggagactcaaggtctttctgtccgaaatctatgagcccaagaaatacgtaactggattcgtaaacggcaagtctatcgtggcgaatgccaagcctcacacccgtaagaaattcgtctttaacctggacttgcaaaatttcttcccgagcattacctttgcacgcgtccggggcctgctcatctctaaaccttacagtttgaacagctccgtcgccaccgtaatcgctcacctggttacagtgaatgggaagctgccacaaggagggccctgtagcccggtgatatccaatatgatatgtagttcactcgaccggaaactgaaaacgttggctgtcaaaaatagggccgagtatacccgttacgcagacgacattacattcagtttttacgatgacttggagtatgtggcaagcgacatcgtacagattctgaagggcgacgagttgccaaatcactattttgccaggtgtgggcgcagcctggaacggttgattatcgatgcaggtttcaaggtgaactacttgaaagttcgccttcagggccgatatgaacggcaggtagtgactggccttgttgttaacaagaagcccaatgtgaaccggcagtatgtcagaaaaaccggggcaatgatccactcaatagaaaccaagggtctagaagaagccagaaggatccacagtgagaaaataattaagcaggagaagaaatccggaagcggcaaggaagaggagatcaaggttccacctgttgaggctcatatccaggggcgactcctgtttctgaaacaggtggtgggactcgagagccaagtctaccgccgactggctctcagattcaacttactgagactgaagtacagggtcccactgggagtgtcaaaaaacaagttttccgaagatttccggaaattcactaagtggtatgactcaaaatgctgggtggtagaagttgaaggcgagattagaggcgagtttgagtgcgggcagggctcagggttcatgattagtgatcaagtgctcgttacgtgtagccatgttctggacctcaagggagtgaagctagatgaagccaccgtgtatcaggcgtcgtccaggtctaggtcttacaaggccaacctcctatatcgggatgatcatcgcgatatagccttactgaaaatctcagtggacaaatccgaatttgattacttcgaccttgaaacatccgttcttgctgatgtgggggatgaagtaagcatcctcggttttccccaggataagctaggcgcccaatctgcgggaaaccagaccgctttcgtgagaaataaattccctatcagcggtgtgggctttgtcgaggtggataaggagctgtatgctggcaactctggcggacccgtgcttaatcaggacagccgtgtggtcggaatcgtgggggtcgggaatgacggtgaatattgcgatcactctcgatttatttgcgtgtcggaacttctgaaggtcctggagaggttcaaggcagcctccgtggacaagagtaaattagagccagcctga

SEQ ID NO: 7874 - RNA, 1701 nt, synthetic construct
  source 1..1701: mol_type = other RNA
atgactaagcttaattcaacgactgatgtggacggatttgctgccctgctggggacatcttaccagaacatacggtactactattatagcaaacccatgagcctctattataattcctttgagatcccgaaaaagaatggtggcgtacgggtgatcatggcgcctagtgagcagctgaaaactcttcaggacaggcttaaagtgctgctcgacgagctgtacacaccgaaatcgtcagccacagcgttcataaagggcagatctatcgtggataatgccaagcagcacaccaggaagaagtatgtgtttaacatcgacctgagtgatttctttacaagcatcaccttccctcgggtgaggggccttttgatggcaaaaccctactcactacaatctggggtggctacagtggtggcccatttgtgcactgtctctggcgtactccctcagggatccccttgctctccagtaattagcaacatgatctgttccactatggaccgacagcttaaggggctggcgatacgcaatcgggcacggtacagcagatatgccgacgatattaccttttctttctacgacgacatcaaatacatctccggtgaactggttgcctgtttaaagggtgacgatctgccaaatcactacttctcacgctgcggaaaagtcctcaatagcattattgaatcctgcggatttaaggttaattccagtaaggtgcgattacagagccggtatgaaaggcaggtggtcaccggcttggttgttaacaagaaagctaacgtcgagcgtgcttatattcgtcaaacctctgcaatgatccattctatcgagaaaaatggcctcgctttcgcaagacagagattttcagagaaaaatccccccgaccctaagtccggcaccaagctagtgctggatgcccatctccacggccgcctgttattcatcaaacaggtcgtgtctattgagagcgaagtgtataggaggctggccatgcgtttcaacttcctggatctgaactataagctgccactgggcgtgtcgaaaaatcatcgcgggatagaatttagaaagtccacgccctggtatgacaagaggtgttggatcgtggatacggagttcgacctagtatttggtcagggcagcgctttttttgttaacgacgagttcctgattacatgttcccatgtcagtgaatttgatggatgcttcgtagacgtcgccgaagtttacagagctgggtcacggggggataaatatagcgcaaaagtggtttaccgagatgtcgccagagatatcgccatactgatcattgacaccgatcgaccattagcgttcgagactttcgacgttgccaccaagatggccgacgtgggcgacgtcttgtccgttgtaggattccctaaagataagctcggggcacaacacgctgggaggcagagtgtcgaggtgcgcaacaagtttgcaagtagcggcgtgaaatactttgaggtggataaggaattgtacgcaggaaacagtggtggtcccgtcctcgatgccgacaacaacgttgtgggaattgtggcaaaaggaaacgatggcgactactgtgaccacagccgcttcatttgcatttccgaactggcctcagtcctccaagggtacgaaaagcaaaagcacgtggctccagtcgtggagttggaacttgagaaggcttga

SEQ ID NO: 7875 - RNA, 1677 nt, synthetic construct
  source 1..1677: mol_type = other RNA
atgagcaaactcaacagctccattgatgttgacgaactcgcaggactgcttggcacttcatacggtaagatccgttactattactactccaagcccatccctgactactacaagacgttcgaaatttccaaaaaaagcggaggagttcgggttatttccgcacctcatgaccagcttaaggtcctgcaggagaggttgaagatcctgcttgatgagctgtacacccccaagtcaagtgccatggcattcataaaggggcggtccatagtagagaatgctaaacaacacacaagaaagaagtttgtcttcaacctggatttgtccgacttctttagcagcataacatttccccgggtgcgcggcctattgatggccaaaccatattccctgcaatcaggcgttgccactgtcatcgcccacctttgtaccctcaatgggatcttaccacagggcagtccatgctcccccgtgttaagtaatatgatctgttctggtttggaccgccaactgaagagcttcgccatcaaacacagggcgaggtattctcgttacgctgacgacattactttctctttctacgacgatttgaactatatcagtcctgatatggttagtgtgctgatgggagatggcgtgtccaaccattactatgtgaaatgcggcaggccactggtgaccattatcgagtcgtgtggcttcggcattaatctgagcaaagtgcggctgcaggggagatacgagcgccagatcgtgacagggctagttgttaacaagaaggtaaatgtcgaacgcagctatattcgaaagacatcagccatgatccacgccattgagacgaagggactaggttttgcccgcgagagattcgccgcatcaaatcccccggttgatccggatactggggtgcaggtagttctggacgcccatctgcatgggcggctcctctttattaagcaggtggtcggtgtcgaaagcgaagtgtatcgcagattggccatgcgattcaacttcctcgatctgaattttaaactgccccttggagtgagtaaaaaccggcgaggtgtcgaatttaggagaagcactccatggtatgataaaaggtgctggatagtagagacagagctggacttagagtttgggcaaggctctgcattttttgtcgcagacaatgtgcttgtgacctgctcgcacgtctccgagtttaccggaagattcacatccgagtctgaggtctatagagctaatgctagagggaaaaaatataacgctggcgtggtctaccgcgataaagctcgggatatttctatcctcaaactcaacgacgaatctctggtgttcgaaaagtttgaaatctctacccgactggctgacgtaggcgatgtactatcagtgctgggtttccctaacgacaagcttggggcacagcatgctggccgtcagaccgttgtggtgaggaacaagttctcgatgagcggcgtacagtactttgaagtggataaggagttatatgcggggaactctggaggccctgtgctcgacgaggacaacaatctggtcggagtcgtcgccaagggtaatgatggacactactgtgaccacagtaggttcatatgcgtgtcagagctcttggtggtgctcgaagactacaaaaaggcgatcctgcaggtgagcgtgtga

SEQ ID NO: 7876 - RNA, 1665 nt, synthetic construct
  source 1..1665: mol_type = other RNA
atgacaatcccccgtctcaaggcctgtaccaatgttgacgatctggcttccatccttaatacgtcctacaagaagatcgcatatttctattacgaggtggactactctaagaagaggtactatgagaactttgagattcctaaaaagaacgggaacaagcgcacaattagcgctccactcgcacagttaaaaaaccttcagaagaagatcgcagtgctgctgggtgaactgtatatcccaaatccaaatgcccacggcttcatagcggaaaagtcaatcataacgaatgccaaaattcatacccgcaagaaatacgtctttaacgtcgatctgaacgacttttttaacaccattactttcccgagagtgttcgggctgctcactagccagccttatctaattaacgagaaagtggccagtgtgatagctcatttatgcacactcgacggatgtctcccacaaggagctcccacctctcccgtgatttccaatatgatctgccagaaactggatcgacaactcagtcgactggcattcacacacagagctgtctatagccggtatgccgatgatctgtctttctccttttatgctccagaattgcacgtgtctggggagattgttgtgtttgagcagggggcaggcaactattacgccaaggcaggggagcagcttaataggattgttaacatcaaccgcttcagcatcaatcccggcaaaactcgattgcaggataggttcgaacggcagaccgtcacaggcttggtcgtgaataaaaagatcaacgtacccagacaatttgtgcgcaagacgtgtgccatgatccacagcatagaatcgtttggattaaagactgcacaggaaagattcctgatcgagaacccaaattcgaagtcatcaatcgacaacgtgatttttggcaggattctgtacatgaagagcgtcgtggggtattcctccgtggtgtacaagcgcgtagcgctgcggttcaaccagttggacctggagcgtaaagtgcctctctccagttcaaaggacggtaagttttccgccaaatacctgaattgggttaatcggcggtgttgggtaattgataaccatgaaaccatagagcagggtagcggctttatgatggccgggaatcttctgataacatgtgcgcatgtggttggtaatgccaaagaaattgaggtgtacagaacctgcgataccgagaagtacaaggccactgtatgctacgtgagcccggacaaggccgttgacgtggctatcgctttgatccaaaatccccccacaaggtttgaagaattccatcacaaagaagagactcctaatatagaggttggcgacctgctgaccgtcctgggattccctaaatataaagacgacgcaaaaaacgtctggatcaataaggccagcattgtcaaccagattaagagttcttcttcactcattggctaccttgataaggagctatacggcggaaacagtgggggccctgtgttaaacgaggatggatctctcgtgggaattgtcatcaaaggtaataaagatgccgaaggaatcgatgatatctatgttgaccactccgccttcttgcacctaagttacgtcctggcgtgcgtaaaatcacttaaagagaaatacgctgctgacgacatctga

SEQ ID NO: 7877 - RNA, 1650 nt, synthetic construct
  source 1..1650: mol_type = other RNA
atgtcaaagctgcaggagtgcctgaacacccaggatcttgccgatgccttaggaacaaactataagaagatcgcgtacttctactacgacgttgattatagcaagaagagttattacgagaacttcgagattcctaaaaagaatggcggctcacgggtcataaaagcccctgtggcaagactgaaaaacctgcagaagaagctgtcatttctcctggacgagatgtttgttcctcattcttgtgctcacggcttcgtgaaagaaaaatctatcgtaacaaacgcgaaaaaccatagcagaaaaaagtacgtcttcaacatcgacttgaataacttcttcaccacaatcacatttcctcgcttgtatggactcctgatctctaaaccctattcccttaacaacgatgtcgcttccgttatagcccacctctgtactgtcgatggatgtttaccacagggcgcccccacttcacccatcctgtctaatatgatttgtcgctctctggataggcagttgagacgcctcgcccgcttgcacagagccgattacagccggtatgcagatgacattactttcagcttttacgcgccagagtccttcgtgaatgaatctatcgttgtgttcaaagacggatctggaaattactttagcagtgcaggtaacacgctgaagaagataatcgacaagaacaagttcagcattaacgagtccaagacccgactgcaggaccgttttgagaggcagcttgtaaccggacttgtggtcaataagaagcttaacgtgccgcgagcatttattaggaaaacctgcgctattatacacagcatcgaaaatttcggtatcgcttcggctcaagcccggtacatcaaagagaacccgtgcagcatggcacgagtggagaatgttatctttggtcgcattctccacatcaagaacgttgtggggtttgattccgtggtctataagaggatcgcactgcgttttaaccagctaaacatcaacagaaaagctcccttatcgaatggcaagaatggggtggtgtccgctaagttttgcaattgggcaaacaggcggtgctgggttattgaaaacaatgatgaaatctcccaagggagcggcttcatgataagtgagaatctgttgattacatgcgcccacgtgatcggctccgccaaagtggtcgaggtcttccgggcaggtgaaaacattaaatatgaggcagtcgtctgttacactagtagtgacccccatattgacgttgctattttgaaaatcaaggacgcccctgcaccatttgaggaattccattacaaagacgaggccgaagctctcaatagtggggagacactcacgattctggggtttcccaagtacaagcacgacgccaaaaatgtatggatcaacaaagctctcctaataaatcaagtgaaaaccgcctcttcatcctacgggtacattgacaaagaactttatgcgggtaattccggcgggccagtactgtcagaaaatggcgctctcgtgggactggtaattaagggcaataatgacgccgccgaagtggatgacatatatgtggatcatagcgccttcctgagtttctcagatgtgctaacttgtgtgaaggcgctgaaggctaagtataccatgtga

SEQ ID NO: 7878 - RNA, 1653 nt, synthetic construct
  source 1..1653: mol_type = other RNA
atgaacactcccatccttcagcagtgccggagtgtagaccacctgagcgctgccttaggaactaactacaagaagatctcatacttctactacgatctggactctaccaagatctcatattatgaacccttcctcatccctaaaaaaagcggcggaacgcgtcaaatcctggcccccaagcctcaacttaaaaatctgcagaagaaactgcaggacctgctggaggacctgtttaaaccccatgcgtgcgctcacgggttcatttcggagcgcagtatctgtaccaatgctaccccgcatacgagaaaaaagtacgtgtttaacattgaccttcaggatttcttcagctcgataactttcgcacgcatcttcggtttgttgattagcaagccttattccatagaaaaatctgtggcctcagtggttgcgcacctctgcaccgtcaatggacacttgccacagggagctcctacaagcccgattatttccaacatgatttgtcggacattagatcggcaattgacacttctggccgtggccaatcgagcagcttactcacgctacgctgatgacatcactttctccttttacagcccacaggaacatacttcaagcgaactcgtcaaattcgagaaaaactcaggcaactatttcgcactacccggggaaattctgtcccagataatttccaggaacaagttcaagattaaccccaagaagacccggttacaggatagatttgaaaggcagattgtgaccggtctggtggtaaataagaaaatcaacgtgaggcgggagtttgtgcgcactacttgcgcaatgatgcactccatcgagtcctttggcttggccagttctcaggcacgatatgaaattgagaatccggggagccagagtaaggttgagaacgtgattctgggaaagatcctccacataaagaacgttgcttcttttgcctcccccgtctataaaaggctggccaggagatttaaccgactggaactaagtctcaaggcaccattgtcttccacgaatgaggacaactttgatgccaaatattgtaactgggtcaatagacgctgctgggtcatcgacaataacgacaccattagtcagggcaccggcttcatgatccaagaaaatttcctcatcacctgtgcccacgtcgctgatggcgcgaaggaactcgaggtgtaccgtgcctgtgacgagacaaaatacacagcctgggtgctcggtacctatcctcaggtagatgtcgccatcctgaaaattcagaattctccagggatatttgaggaatttcattccagagagacaccaaggaaacttaatatcggcgacaatctgcatgttctcggattccctaagttcaaatctaatacaaagaccgtgtggatcaataaggctaagttgattggccatacaatcgtccacaacagtaatgttaattacatcgataaggagctgtatggcgggaacagcggaggtccagtgttagatgaggacggcgcgctaatcgggattgtaataaaagggaacaacgatactgacaaggtgtcagatatatatgtggaccatagcgcatttctggactttcaacacgttctggattgcctcaaacttctgaaggagaagtactctaccacatga

SEQ ID NO: 7879 - RNA, 1764 nt, synthetic construct
  source 1..1764: mol_type = other RNA
atgccgatcacatctgcacagatcgctgccagtggaacccccctacggctcaaatgtaagctggtgatgaggaaagtcaagccaaaacggaggccaatgttggataccaaaaccacaccccacgaactggcagtgctgctcggtaccacctactccaagttgtgctacactctctataagaaacatactgacaacctgtacaaggactttactatcccaaagaagaacggcggggtacgaaaaattagttcccctaagcctattctgaagaatctgcagagcaagcttaagctgttactggatgacatctaccgccctcaccccagcgcatctgctttcatagctaacaggggacttatctacaatacaaccccgcacattaaaaaagcactcatcttcaacatcgacctaaagagcttctacggttctatccatttcggccgggtgaagggcatgctcatcagtaagccatattgcctccgtgaggacaccgctcaactcatcgcccacatttgctgctattacaagactattccccagggagcgcccacatccactaccatctctaatatgatctgtagacgccttgatcgcgagttaagcttccttgcgaaaaagaaccatgcatactacaccaggtatgccgacgatctgactttcagtttccacaaaatcaaaccaaatgagatctgtgccttcgaggataacatttggaagccttcggataggctgataaacgtgatttcaaacaacacctttaagatcaacaacacaaaaacaagaggggaaacaagccgatgcagacaagtggtgacgggtctgaaagtgaataccaaggtgaatgttgacagaaggtatatccggacgacaaaggctatgatccatagtctgtcccttgatatcgagtccgcgaacgagtacttttcaagcatacggaaaggagagaatgaagccactttggagacggtcgttgccggccgcatcaactttataggcatggttaaagggactgagtgctccatttatcagacgttggcacataaattcaacaacctgaatatcgacttgaaggtacctactcgcagtaatattgataccacgagccaaaatgacaatcagctcaagaccctagaataccgaaagcaggaaaagctcaagaagtgtatttgggtggtgtcctttgacggtatagaaggcatagaactcgatgagcaactgacccagggcacagcttttatgattaagggacagaagttgcttacatgtaatcacacctttgagaaagccgggaatccatcttattgtttaattcacaggatcgatgactccagcattaagtattatgcccgcctggtcaaagttgacaaacatagagatgttgctctcctggaaattgactcgaaagataaagtgttctttgaccacctggagatttacttcaatgacgatatgcactcaggctataaagtcaacctagccggctttcccgagtacagatcagggcatagagacgtaacagtgcttcctagcacaataatacggcatgaagtggtcagtctggtaaagcactactcagtgaacagcgaactgctgggggggttctcaggcggtcccgttttgaacttatataatcaggtcgtgggcatggtcactaagggacgttacatttcccacgacaaagatgccggacagtccactctggaagggagcaattcttttatctctgccgtcgagtttgagaaattcctgggatcatctaactga

SEQ ID NO: 7880 - RNA, 1641 nt, synthetic construct
  source 1..1641: mol_type = other RNA
atgctggacagcaataccacacccagacgcctagctgcactgctcggaacaacttaccctaacctttgtctcacagtatacaaagtacggccaaataacctttacacgacctttaaaattgccaagaagtctggcggagttcgcactatcgctgcccccgataaaagactcatctatttgcaggacaagctgaaaagtctcctcgaggaattgtattcaccacatcccgccgcgactgcattcatcaaagacagggggatcatttataacgcgtccccgcacgttgggaaagcccttgtttttaacatcgatctggccgatttttacggccacatcaatttcggacgtgttaggggactgctgtcagcacctccctacaatctgcgccctgacactagccagctgatcgccactatttgttgcctcaatggtagcattccgcaaggtgccccaacctcaccagtcctatctaatatgatttcacgtcagctggatagacggttatcccttctagcaaaaaagaaccatgcattctacacaagatacgccgatgacatcacttttagctttagaaacaacaacttcgaaggtgtttgcttttcggtcaatggcgttttccagccatcctccgagctcataaagctggtcgaaaagtcaggcttctaccttaacaagcaaaagacccgtggggaggtgtctcgatctagacaggtggtaacgggactcaaggtgaataagaagataaacgtcgatcggcgatatgtccgcacgaccaaggcaatgatacatgctttgagcggcgacattgatacagcgaacgtggtgttttggcagaaattccccgaaaaagagcccaaacgccttgaaaatgtggtggccggaaggattaatttcatcggcatgatcaagggagtgaattcgagggtgtatcaaatgctggctaaaaagttcaaccgattgcctttaaagcaaaaactgtctacccggacgagcaagctggtggacaccgaccaaaagtatagagatatggcaaagcagagggagctgcagaagtgtgtgtggattttagacttcgaaggggcccctaacgtgaccgacgaagctgaattcatccagggtaccgcttttatggtaaaggggcagcaggtcctgacctgttcccacactttcaacaaagctgatgatgcagagtactgctatatcagtaggatccatgagcgaggggtgaagtatctgatgaaagttgctaaacgctgcaaacaccgggatatagccgagttggagtttgtcaatgagcctaacgagatattccagtccttggacatttaccataaggaagaaatgttcccaggttaccaggttagcctggtgggctttccggactatatgtccggccacacaaccgtgagcgtcatcaatacttctatcactagccacgtgaatatcagtacagtggacaattatgaggtcgacgccgaaattggggctggctactccggtggccccgtaattaacgatttccaccaggtgattggcatgatagtcagtggacggacaacatcagtggactttgagacacaggagagtgcactgaccgggaggaacgccttcatttctgcccaccattttctccaattttga

SEQ ID NO: 7881 - RNA, 1635 nt, synthetic construct
  source 1..1635: mol_type = other RNA
atgataagcagcaaaaccactccaagagcccttgcgcattccctgggcaccacactgcccaaactgaattacaccgtctacaagctgggcgtcagcaggttctacaatgagtttgaaattgagaaaagcgacggcggaaagagaaccataaatgcacctgaggggcgcttaaagatcatccaggataggctcaaggttctgttggacgagctgtattcgccacaccctagcgcttctgcttacatcaaagagcgaggtatcgtctacaatgcaaagaaacacgtcaaaaggaaggtggtggctaacatagatctgaagaactttttcggaactattcattttgggagggtgcggggtgtacttattgccaagccctattgtttgagggctgacaccgcgactctaatcgctcacatttgctgcctggacggggtcctcccccaaggaagtccagcctctccggtgatatccaacatgatatcaagacgtatggatcgggaactctctcttatggccaagaaaaacagggcccactattcacgttacgccgatgatattacgttctcctttaagagcaagaaagacacagagttgttcgatttcaaaaatcggagtgttgggtcaaaaatcgtacggtgcatagaggagaatggcttctcgcttaacgaacggaagactcgaatccaattctcctctgagcgccagacagtgacagggcttaaggtgaataagaagattaacattgaccgccgctatattcgcgagacaaaggccatggtccactctctctcctttggctctctggaggcaaataagaagttcatcgacaaatacggcagggatgatgcacagttggaagatgtggtatttggacgcgtggcctacatcggcatgattaaaggccgtgattcttccgtgtaccaggggctggctagaaaatttaacaacttagattgggacaggaagttgagcattaatcctggcaagatcctcaaggatttggaatggtccggcttcgccttcaaggccgaaggctatagagctcgattcgagcaatgtgtctgggttgtttcctttgacggggtgaaaggactgggtctggatgaaatgctggtatccggctcagcatttagcctgaaaggtggccgcgttcttacggcatttcacgtgtttgtgaaggcaggcatgccggactattgttatctctaccgaatcaataagcccggaaaaaagtacaaagctaagatcaaaagcgtgtatgaagacagagacgtcctcgagctaaaattcgatgaagaggtggagaatattcggtatctggacgttgccccaaacaaattcccaggtaccggttacgaactggcagttctggggttccctcagctacatcccgggcaccagtcactcactatcctgccttgcaaggtcgtcaacacatatatcggaagtacctttagatattgtgaagtggacgcccagattagtggagggaacagcggaggtccagtggtgaacgcctacatgcaggtagtgggaatggcgttaagaggggtggacgttgcttcacatgaggaccgggtggaactcgaaggaagtaacgcctttatcagtgcggagcatttcccttctccctga

SEQ ID NO: 7882 - RNA, 1635 nt, synthetic construct
  source 1..1635: mol_type = other RNA
atgatacagcctactacctctccgtccgatttggcatcgctgctggggacaacacatagcaaacttaactacacactttattccttccccttggaatacagttatacaaagttcaccatcgagaagaaaaacggctccagccgacaaattcgggccccaaatcccaaacttaagatcattcagaagagactgaaaaaccatctggagaagttatatcgccctcattctgctgcgaccgccttcgttgctggtaggggcatcgtggataacgcaaagcggcatataaagagggagtgcgttttcaatctggacctcgattcattttttgactacatccacttcggcagggtaaagggcctgctggttgcccccccctataacctgcgcgatgacactgccaaactgatcgcccacatatgttgtctgaatggacggctaccacaaggggcccctacgtccccacttattagcaatatggtggccagatctctggaccataagctcagtcgattggccaaaaaatataaggcgagatattcacggtacgctgacgacatcactttctcgtttcaaaagaaaaccgacggaataattttccacgtggatgagggagttgtcaagccctcagtggaattggtcgacattatcgagaatgccggattcctgatcaatatccgcaagacgcgagtacagtactacgaccagaggcaggtcgtgactggactcaaagtgaatagcgtcgtgaatgtggatagaagatacattaggactacccgtgcaatgcttttctcccttagtcagggggtggagagcgcaaacatgaaattttttgaaaaggtaggcggcgaccccgaaaggcgcttggaaaatgtggtgcacggtcgcattgcattcatcggtatggtgaaggggagaggcggcagcgtctatcagacactgagtcagaaattcaatgacctcggactggacattcagtctccaattggacccgcagaaatcaaagacgaactggagcagaagctccacttttattcatacaaaaaccgggctcgtctacagcgctgcgtgtgggtggtcgatttcggtggggttcctgggttagatatggatcaagagctcgtgcagggaaccgcttttatgattggcggccagcggatcctgacttccgcgcatacatttgcaaaggccggcaacccggttcaatgtaaattatacctcgttaacgagccaggaaagaagtacagcgctgaggtcgtcaacataaacaacaattccgatattgctgagttgaagctcattaacgtggatggttcatttccggtcctcaaggtggctcctaacctgaaaacgaacaccggttataaggtatctatagcaggctttcctcagctacagccaggacaccagagcgtagccattactccttgcacagtgatcaataccttaaatatcagcagtcaccgttacatcgaagtagacacacctatccaaggggggtcttctgggagtcccgtgctgaacgtctacatgcaggtggtgggtatggccgccatgggcgtttccgtcaccaaagatggcgaagacgtgcagctggaggggaccaatgcgtttgtctcagctgttcacttcccatga

SEQ ID NO: 7883 - RNA, 1758 nt, synthetic construct
  source 1..1758: mol_type = other RNA
atgaataacaagccctcgctgagcctgttcgacgacccccaggtagcttccttcttggctgccaacactaaaatggagctggcggccgccataaatgagccatatcggaggttcacttatttattgttcgccatcgatcctgaccgccaatacaagtcctttgatattgccaaaggaaacgggaaaagcaggattattgacgcccctgtgaccgccctaaagaatatccagaagaagatctgtgctattctgagtaaaatctacgtgccaccttatccagctaatgcctttattttcggccggagtatagtgaccaacgccatcccccacgtgaaggctaagtcagtactcaagctcgacctccaggactattttcccagtattcactttggacgggtgagagggttattcatggcacctccgttcagcttcaatcaggatgtggcaacaaccttagcaagggcttgctgcaagggtggctgtttgcctcagggggcacccacatctccaattctctctaacatgatctcacttaagatggatgcccaacttaacaggatcgcgaaaagcaaccgatgtaattactcccgctacgctgacgacatcacattcagttctacaaaggacatttttccactcgtcgtcaccaacgcaaagggtttgtatgaaccagcccaggaaatcacagactgtatactgcggaatggctttgctgtcaacacctacaaaactaaattcatggtaggcagagactcaaaattcgttgcgggtataaaggtcaattcaaagattaacaccagcaggaagcatgtgcgagctgtccgggccatgctgcatgctctagagaaatttggacccgaagcctctgtcgccgaacatctgcggcggtggagacgtagacacactatctctagccccactaacttcctgcagatactgaagggcaaaatcagttttattcgtatggtcaaagggggcggagatctgtccgtcgtgcgtcttgaaaaccgcctcgacgagtggatgtccttatactccggagcccaggtggatgtccgcagggtagaaacgctgatcgcacaggatgatacgtatcacgctgtggtttacacagaaggcaagacggatgcactccatttgagatatgcactcaagcgccttcagaaacttagcttgtacaacaacatgaagctgatcttctatgatttccctccggataccacatcaggcgaaaccgagcttaaaaaaatcctgggcaccgctaaagttgccaataataccggcaagctgaagattgttatctttgacagagacgtgaccggagacgtgggcgattctaggcgcccaaaatattggggttctaatgtatggtccttcaaactgccgtgccccggtcctaggactctgtacgagaatgttatcagtattgagcattactaccctgacaagatcctgtttaaacaggacaacgaagggcggagactattttttgtggatgagtttgatgccaatactctcgcacacaagagcattgcgggggttatatgccgaaaggatgtgattggtaaaaagcgacccggagtggtgatctgtgagggagtgagagatcaacaggggaaatcactgacactgagcaaatccgacttctcgaagaatatagcacgagggcaatttttcgtttctgacactgagatgctcgagttcaagccagtgttttccgcgattgagcgcctgatcaagaaaaaccactactgctga

SEQ ID NO: 7884 - RNA, 1062 nt, synthetic construct
  source 1..1062: mol_type = other RNA
atgaaggacagctctaaactggtgttgaccgatactcctgagtcactgcgtgaaaagttctattctcttaagcaagccagtgatatcgccgacctgttgggcgtctcatacccgaggcttgtatatcacatctacgtagtggatcccaaccaaagatacaccactttcgaaattgcaaaaaaaagtgggggagtccgacagatctccacgccaatcactgccttaaagatcattcagagaaagctcaaccaggtgttacaggcagtctacgagattaagcctagcgttcatggcttcgtgatggggaagaacatagtgacaaatgctcaggcacacgccaagaagcgctacgtgtttaatatcgatctgaaggacttcttcccatcgatcaacttcggcagggtgaggggcatgttcatggcaactccgtatggcttgcaccctgaggtcgccaccgttctagcacaaatctgttgccacaataaccagctaccccagggggctccaacatctcccataatcacaaacatgatttgcgctaaaatggacagccaacttcagagactggccaaagagtgtaaggccacttacaccagatatgctgacgatattaccttttcaacaaccctcccaaagtttcctagggacctggcttacattgttaacgacgagaacgaggaaaaactgaatgtcggtgacaccctcatccagattatctctgaaaacgggtttgaggtgaatgagtccaaagtgcggctccagataaaaggtaatcaccaagaagtaaccggactgacgacaaatatattccccaacattgatcgcaattatattcggcaagttcgggccatgttgcatgcctgggcgaaatttggtctggaagacgctgaaaaagagtatcagcgcaagcatgaattccgatcccgctttaatcagaaagagcagcattcctttaagcagattatcctcggaaaaattgagtttatcggaatggtgaagggcaagaacgatacaatctacaagaagtacatgcagcagtataaaatactggcgagcctgtga

SEQ ID NO: 7885 - RNA, 1017 nt, synthetic construct
  source 1..1017: mol_type = other RNA
atgcgcgaaaagttttattcactcaaacaggcaagtgacattgctgacctgctcggcgtgagctaccctagactcgtgtatcacatctatgtggtggatcccaatcagcggtacactacatttgagatagctaaaaagtctgggggtgtacgtcagatcagcacccctattaccgccctgaaaatcattcagcgaaagctgaatcaagtcctccaagctgtttatgagatcaaaccgtccgtgcacggctttgtgatgggtaagaatattgtgactaacgcgcaggcccacgcaaagaaacggtatgtcttcaacattgatcttaaagacttcttcccttccatcaatttcggaagggtgcggggaatgttcatggccacaccttacggcctgcaccccgaagttgcgacagtcttggcccagatctgctgccacaacaatcagttaccacagggagcccccacctccccaatcataaccaacatgatctgtgcaaagatggattcacaactgcaaagattggctaaggaatgtaaagcaacgtacaccaggtatgccgacgacattactttctcgacaaccctgcccaaatttccacgcgatcttgcctacattgttaatgacgagaacgaggaaaaacttaatgtcggagatacgctaattcagatcattagcgagaacggttttgaggtaaacgaaagtaaggttcgactgcaaatcaaggggaaccatcaggaggtcacagggctgactaccaatatttttcccaatatcgacaggaactatatacggcaggtgagagccatgctccatgcttgggcaaagtttggcctggaagacgccgagaaagagtaccagcgcaagcatgaattcaggtctagattcaaccagaaggagcagcatagctttaagcaaatcatcctagggaaaatagaattcattggcatggtgaagggcaagaacgatactatctacaaaaagtacatgcagcagtacaagatattagcttctttgtga

SEQ ID NO: 7886 - RNA, 1206 nt, synthetic construct
  source 1..1206: mol_type = other RNA
atgatttccgttgtagaccctgcgactgtgtacttcaccgtgtcctttaacccagacgtgcatcccgacaattgcttcatactgagtagaatctccgagaacattccagcatcggacatctttttgctgagcacgacggataaagtcccaaaaaagtcacatttattccttcagcgctctcccgaactgctccgagaaaaattctactctctgaaacagcccgtagagatagctgatctgctagagattagctacagccggttaatctatcacatctacttggtgaccccggaagagagatacaagtcctttggaattcctaaaaaaagcggaggcatacgtcaaattacaacaccgataactgctttgaaaatcatccaatcaaagctgaaccaggtgctccaggccgtctacgatattaagcctagcgtgcacggtttcgtcatggggaagaatattgtgactaatgcccaggctcacgtcaagaaaagatatgtcctcaatatcgatcttaaggacttttttccatctatcaacttcggacgagttcgcgggatgtttatggccacaccctatgggcttcatcctgaagttgccacagtgctggcccagatatgctgtcacaataaccaccttccccaaggtgcccctacctcacccattatcagtaacatgatttgtggtaagatggatagccagctgcagcgtctggctaaagactgcaaagcaacttataccaggtacgcagacgacattactttcagtacaactctgagtcaatttcctagagacttagcttatatcacgaatgatgaagatggcgagaagctcgtgatcggcaattcactgctgaacattatcaacaccaacggcttcgaaataaatcagtctaaagtgcggctccagacccgcggaaatcaccaggaggtgacagggctgaccaccaacgttttcccaaatgtagataggacatacgttcggcaggtcagggctatgctccatgcctgggccaagtttggcctggaggcagcggagaaagagtacctttccaagtacgaattcaagaataggctcccacagaaggcaaagcccacttttaaacaagtgttgcggggaaaaattgagttcatcggggtcgtgaagggcaaggacgataccatctataacaagtttatcacccagtataacatcctaaagaagtggtga

SEQ ID NO: 7887 - RNA, 1134 nt, synthetic construct
  source 1..1134: mol_type = other RNA
atgcagaaaaatagcaagcttttccttacagaaacgcctgaggccttaaaggagaagttttattctctgaagaagcctaccgacattgccgacttgctggaggtgtgctactccaacctaatctatcacatatacgtagtcaaacccgaaaaacggtacaagatctttgatattcccaaaaagagcggtggcattagacagatcagtacccctattaccgccctgaaaataattcagcggaaactgaaccaggtcctacaggctgtttatgaaacaaaacccagtgtgcatgggtttgtttcctcccgcaatgtggttaccaacgcacagaatcatgttaaaaagaggtacgtgttgaacatcgacttaaaggacttcttcccatcagtgaattttggtcgggtcaggggcatgtttatggcaacaccatacggcctgcacccggatgtcgccactgtgctggctcaaatttgttgttataaccatgaattgccacagggagctcctactagcccaatcatcactaacatgatttgcgccaaaatggacggccaactgcaacgactggccaaagagtgcaaggctacatacactaggtatgctgatgatattaccttctctacctcccttagcaagctgtcgaaggatctcgcatatattgtcaacgaggaggaccaggagaagctgataatcggagacaccctcttcaagattataaaacagaacgggttcgagctcaatgacaataaagtgagactgcagactagaggaaatcaccaagaagtgacaggcctcacaacgaacgtattccccaatgtagacaggaattatgtgcgtcagatccgcgccatgctgcacgcctggtcaaagtttgggttagaggcggcagcgaaagagtacagtatcaagtatgagagcaaatcacgactcatcaataacgaaaagttggaattcaagcccgtcatccgcgagaagattgaatttctcggcatcgtggagggaaagaaagatcagctcaaattcaagaaggtgatcagagggaagatcgaatttctgggtatggttaaaggaaaaaacgatccggtgtaccagaagtacttcaacatataccagcaacttatcaagtctgtctga

SEQ ID NO: 7888 - RNA, 993 nt, synthetic construct
  source 1..993: mol_type = other RNA
atggatatcgcagatctgcttgaagtgtcctattcgcggctggtttaccacatctacctggtcgaaccagacaagcgctacaagaccttcgaaatctctaagaagtccggcggcattaggcagatttccacgcctattactgcgttgaagataattcagaagaaattgaaccaggtgctccagacggtctacgaaataaagcccagtgtgcacggtttcgtgacagggaagaacattgtcaccaatgcccaagcccacactaagaagaggtatgtgctgaatttagacctgaccgacttcttccctagtatcaattttggtagagtacgcggaatgttcatggccacaccatatggtctgcacccggatgtggccactgtgctggcccaaatctgctgccataacaatcaactgccacagggagctcccacgtctcctattgtaaccaacatgatctgtgcgaaaatggatagccaactacagaggcttgctaaagagtacaaggcaacctatactcgctacgctgacgatatcacattctcaaccaccctgcctaaatttcccgaggagctagcctacattgttgctgaagaagacgtggacactgtgtttataggcaacagattactgtctatcatcaacgacaacgggttcgaggttaataatcataaaaaccgactccaggtgaaaggaaatcaccaggaggtaacaggactcactacaaacttgttcccaaacgttgaccggaaatatgttcgtcaagtcagggctatgctccatgcctgggcaaaatttggccttgaagcagtcgagaaagattaccaggataagtatgagagtaagtcccggctctcaacaaagggcgagcccaattttcgacaggtcttgagaggcaaaatagagtttatcgggatggtgaaagggatcgatgacagcatttaccagaaatacctgaagcagtatcagctgctcagcacccttgtgattagctga

SEQ ID NO: 7889 - RNA, 993 nt, synthetic construct
  source 1..993: mol_type = other RNA
atggatatcgccgaccttttggaagtgagttatcctaggctagtgtaccacatttatctggtagaaccagacaaaagatacaaaaccttcgagatccctaagaagagcggaggcattagacagatcagcacccccataaccgccctgaaaattatccaaaagaagttgaaccaggttctgcagactgtctatgaaattaaaccgtctgtccacggctttgtcatggggaaaaatatcgtgaccaatgcacaagcccatacaaagaagcggtacgtgctgaatctggatctgaccgattttttcccatccatcaacttcggacgagtaagaggtatgtttatggctaccccctatggtttgcaccccgatgtcgccactgtgctggcacaaatctgttgccataacaaccagcttccccaaggcgcccccacatcaccgattgttaccaatatgatatgcgcgaaaatggacagccagcttcagcgattagctaaggagtataaggccacatacacacggtatgcggacgatattactttttctacaactctgccaaagtttcctgaggagctcgcttacattatagctgaagaggatgtggaaaaaatcttcattgggaacaggctcctgtccatcattaacgagaatggatttgaagtcaatcaggaaaaagttaggctgcagtcacgtgacgaccatcaggccgtgacagggctgaccactaatcaatttcctaacattgaccgcaagtatgtgagacatatacgggcaatgctccacgcctggtctaagttcggcctcgaggctgcagaggaacagtacctcacgaaatacgagaataagtccaaactaccaatcaaagacaaccctacgttccaccaggtgttacgcggcaagatagagttcatctcgatggtgaaggggaaggacgatccaatctaccgcaagtacatcaaacagtacaagaaccttgttagtttcagcaggatctga

SEQ ID NO: 7890 - RNA, 1089 nt, synthetic construct
  source 1..1089: mol_type = other RNA
atgcagaaggattcgcacctgatactcactgattcccccgagacactgcgtgagaggttctactcactgaccaagcccatcgatatcgcccacctattgggaattagctacagacgactcgtctatcacatctacctggtagaacctgaaaaacgctataagactttcgacatccctaaaaagtctggcgggatacgacagatatcaacaccaattaccgctctgaagctcattcagcgcaagctgaaccaagtgctgcaggcagtatatcagaccaaaccaagtgtgcatggctttgtgtccgggaagaacatcgtatccaacgcccaggctcacgcaaaaaagcgctatgtcctgaatctggacataaaggacttctttccttctgtgaattttggacgggttcgtgggatgtttatggccaaaccctacaatttacatcccgacgtcgcgacagtcctggcccaaatttgttgccataacaatcaactgccccaaggagccccaactagtcctatcattaccaatatgatctgtgcgaagatggatagtcagttgcagcgcttagctaaagactgcaaggcaacatacacccggtacgccgatgatatgactttctccacaaccctcccgaaattcccagaggaactggcttacatagtggcagaagaggaatgcaaaaaaattgtgatcggtaacagactaacggctgtgattaacgaaaatgggttcgaggttaatcagcagaaaaaccggctgcaagtgaagggtaaccaccaggaagttacgggattaactacaaacctctttcctaatgtggacaggaagtatgtcagacaagttagggcaatgctttatgcctgggctaagtttggccttgaggccgccgagaacgagtatttcgagaaatacttgtttaagagcaggttgccgattaagaaagatcttaagttccagcagatcctcagaggcaaaatcgaattcatcggcattgtgaagggcaagaatgactttatctaccagaaatatagcaaccagtacaagatccttaccaagctctctatcagcaataaaattcgggaggactga

SEQ ID NO: 7891 - RNA, 1089 nt, synthetic construct
  source 1..1089: mol_type = other RNA
atgcagaaggggtccaattttatccttaagtacaagcccgaatttctggccgaaaagttctatgccttgaagaatcctatggatatagctgacttgctcggcatcagttacggccgactggtctaccatatatacgtgattgagtccgagaacaggtacaagattttcgacattccgaaaaaaagcgggggaattaggcaaatcagcacgcctatcacagcactgaagattattcagcagaagctcaaccaggttctgaaaaccgtatataaaccgaaagcttccgtgcacgggttcgtcagtgacaagaacatcgtgacaaatgcacaagcccacactaaaaagaggtatgtactaaacatcgacttgaaggacttttttccctcaatgaattttggtcgcgttcgtggaatgttcatggctacaccatacaacctacctcccgatgttgcaaccgtgttggcccagatatgttgtcataataaccagcttccccagggggcaccaacttcgcctataatcaccaatatgatttgcgctaagatggattctcggttacagcgcctcgccaaggactgcaaagcaacttatacccgatacgcagatgatattaccttctctacaacactgccacaattccctaacgatctggcctataccggcacggaagaggataccgagaagatcttaatcggaaatagactgcttgccatcatccacgaaaacggttttgaagtcaacgaacaaaaaattcggctgcaagtcaaaggcaaccatcaggaggtcacaggcctgactactaatatctttcccaatgttgaccggaaatatgtgcgccagattagagcgatgctttacgcttgggccaaatttgggctggaggcggccgaaaatgagtatttcgagaagtatgtgtctaagtccagactgagcattaagccaaaactcgagttccagcaggtgctcagaggaaaaatcgagttcatcggtatggtgaaaggcaaagaggactcaatataccagaagtacatgaatcagtacaagattctggctaggctcagcatcgtgaacaagaacagtgaagactga

SEQ ID NO: 7892 - RNA, 993 nt, synthetic construct
  source 1..993: mol_type = other RNA
atggatatcgccgaccttctggaaatctcatatagccgtttaatctatcacacctacattgtctatcctgagcgcaggtacaaaacttttgagattcccaaaaagagtgggggcatcagacagataagtacccccatcaccgccctgaaaattttacagcgaaaactgaatcaggtgctgaaggctgtgtacgaacctaaagcatccgtacacggtttcgtcaccgggaaaaatatagtcactaatgctcaagcccatgtgaagaagaggtacgtgctcaatatcgacctaaaggactttttccacagcatcaactttggtagggttagaggcatgtttatggctaccccctatggattgcatccgaacgtcgcaacagtactagctcagatctgctgctacaagaaccagctcccacaaggagctcctacgtcgccaattatcacaaacatgatttgtgccaagatggatggccagctgcagcggcttgcaaagacatacaagctcacgtatactcggtatgccgatgacatcacattctcaaccaccctgccccacttccctcgcgaactcgcctacatcctgactgaagaggataatgagaagatcgttataggcgacaacttgctgcgtattattcacgaaaacggcttcgaagtgaacgagcagaagattcggcttcaggtgaaaggcaaccatcaggaggtgacgggattgacaactaatgtgtttcccaacgtcgatagaaaattcgtgcgccaggttagggcaatgctgtacgcatgggccaagtttggtatagaatccgcggagtccgagtatctgactaaaaatcggtacgagtctattttcccagggaaagaaaagcctacatttcaacaagccctgagagggaagattgagttcatcgcgaccgtgaagggaaaaaatgacccgatttaccgaaagtatctcagcatctacaaacagttgataaagccagagtctgtttga

SEQ ID NO: 7893 - RNA, 1080 nt, synthetic construct
  source 1..1080: mol_type = other RNA
atgcagcaggattcccaactgcttttgaaattaacctcagagacattacgagaaaaattttacgatctgagaagggtgctcgatatcgccgagctcctcgaagtgtcatatgatcacttggtccatcacatctatctgatagaatccgaacatcgttataccaccttcgagattcccaagaaatctgggggcattcggcagataagcactccaattacggccatcaaaattatccagaagaagctaaaccaagtactgcaggccgtttatcaaaccaagccgtcggtgcacggatttgtgaatggtaagaatatcgtgacaaacgcacagtcccactgtaaaaagtgctatgtgttcaacattgaccttaaggactttttccctagtatcaactttggcagagttcgcggaatgctcatggccaccccctacaacctgcctccggacgtcgctacggtgttggctcagatctgttgctataataatcaactgcctcagggggctcccaccagtcccataattacgaatatgatctgcgcaaaaatggactctcagctgcaacgcctggccaaagattgtaaagctacctacactcggtatgcagacgacattaccttcagcacaactctcccaaagttccctaacaaactggcctatgtcctgactggtgaggatacagaaaaggtgttcatcgggaataggctacttgcaatcatccacgaaaatggtttcgaggtgaacgagcaaaagataaggcttcaggtaaaaggaaatcatcaggaggtgactggcctgacaactaacctctttccaaatgttgatcgaaaatacgtgcggcaggtcagagccatgctctacgcgtgggcgaagtttggcttggaagccgctgagaatgagtactttgacaagtacgttagcaactcaagactgccaattaaacagaagttaaagttcaagcaggtactgcgcggcaaaattgagttcatcgggatggtcaagggaaaagaagacagcatctaccagaagtacataaaccagtacaaaattctgaggaacaagaagtccacaaactcttactga

SEQ ID NO: 7894 - RNA, 1122 nt, synthetic construct
  source 1..1122: mol_type = other RNA
atgacaatcaactttccccagggacagttaattagcccaccgtgggacaagaagtcactcttgctgctcaatcgaagtccagaagagctaaaaaatgatttctaccagctgaagactcctctagacgtggcaaaacttctgaacattccccataagcgtctagtgtaccatctttacttggtggactcccagaggagatacaaaacgttcacaatacccaagaagtccggaggccagcggcaaatctcgactcccatcactgctctgaaaattattcagcagaagcttaatcaagtgcttcaggcagtctaccaagtgaagccttctgtccatgggtttgtgcaggataaaaacattgtcacaaatgcgaaagcccacgctaagaagaggtatgttctgaatctggatctggagaatttctttcctagcgtaaatttcggaagggtgcggggaatgtttatggcgataccctatcatttaccaccagacgtcgctacgatcctggcccaaatttgctgtcagaacaatgagctgcctcaaggggcaccaacatctcccatagttacaaacatgatatgcggaaaaatggatagccaactccagcgcctggccaaggactgtaaagctacctatacccgctacgctgatgacatcaccttttcaaccaccttaaagaatttttccactgacctggcatacgtggttaacgaaggtgaagcagagaaagtagtcctcggcgatctgctgagtggcatcatcagagagaacggtttcaacgtaaatgagaaaaaaaccagactgcagaccaagggtaaccaccaggaagtgactggcctcaccacaaaccagtttccgaatgtggaccgacgctatgtgcggcaggtcagggccatgctccacgcttgggccaaatttggcctcgaagccgcccaaaaggaattcgaggaaaaatataaccacaaggccagattctctgggaaacagattcctcacttccaggatgttttgaagggcaaggtggagttcattgggatggttaaggggaaggatgacttgatctatcagaagtacatcaacgagtataagcagttgcttaatctgaacttccctaaaaacatctga

SEQ ID NO: 7895 - RNA, 1110 nt, synthetic construct
  source 1..1110: mol_type = other RNA
atgacaatcaacctgccacagtggcaattaattttcccacatcttcacaaccagaatcctctgttattgcaagacagtcccgaagaactgtccaaaaagttctacgagctcaagacacccctggacgtcgcgaagttactgaatattcctcacaagaggctcgtttatcacttgtatctggtcgacagccagaaaagatataagacctttaccatcccaaaaaagtctggaggcgaacgccagatcagtactccaattaccgctctgaagatcattcagcaaaagcttaatcaggtgctgcaggccgtgtaccaggtaaaaccctcggtccacggcttcgtgcaagacaagaatatagttacaaacgcaaaagctcatgtgaagaaacgctatgtgttgaacctcgatctagagaattttttcccctccgtcaacttcggacgggtgagggggatgtttatggccataccctaccaccttccacctgatgtagccaccgtgcttgcgcagatctgttgccataacaatcagctccctcagggcgcaccgacatctcccatggtgactaatatgatttgtgccaaaatggatagtcagctgcagaggctggccaaagactgcaaggccacctacacgagatacgctgatgacataactttctccacgactctgaaagactttccgcctcatttggcttacattgtagactacggtaacaatgaaaaagtgatgctaggcgagagcttgctcaacatcatccgagagaatggattcagcgtgaatgagaagaaaacaagactgcaaactaaggggaaccaccaggaggtgaccggcctgacaaccaaccaatttcctaacgttgaccggcgctatgttaggcagatacgagccatgctccatgcctgggcaaaattcgggcttgagtcagctcagaaggaattcgaggaaaaatatcaccactccgcacgttttagcggaaaagagatcccacggtttcaagatgtcctgaaggggaagattgaatttatcggtatggtcaaaggtaaggatgattcaatctatcagaagtacatctctcagtactatcagctcctgaagatttacttctga

SEQ ID NO: 7896 - RNA, 1125 nt, synthetic construct
  source 1..1125: mol_type = other RNA
atggtgatcaatctgcctcaggggcagctgatcgagaaaaagcgctctaagcgggagcaaaaatcttcacttctgctcctgaagaagtcgccagaagaactgcggactaagttttttgaactaaattccccccgggatgtcgccaagcttctcggcatcagctacggtcgattagtgtatcacatttacatcgtgtccgaagccaataggtacaagacttttgaaattcccaaacgttcaggcggagtacggcagatctctacccccagaaccgctctgaagatcattcaatggaagctgaaccaggtgctgcaagctgtttataagccaaagccgtccgcacacggtttcgtgcctaacaaaaatatagtgacgaacgcccaagcgcactctaaaaagaggtacgttctcaatttggatcttaaggacttcttcccaagcgtgaactttgggcgagtcaggggcatgtttatgggcacaccatacagtttgaatgccaacgtggctactgtcctcgctcaaatatgttgccataataatcagcttccgcagggcgcgcctacatcccctattattaccaatatgatctgcgccaaaatggattcccagttacagcaccttgcgaaaagttgtaaagccacctataccaggtatgcagacgacataacttttagcactaccctaaagcagttcccagagagcttggccagagtgatcacagaggaaggagaggagcgcgttattctgggcgaacctctcctgggtataattgcagagaacgggtttgaggtaaacgagcagaagatccgcttacaaaccaaaggaaaccatcaggaggtcacagggctgacgacaaaccagttccccaatgtagaccgccgcttcgttaggcagatcagagctatgctgcatgcatggcagaaattcggattggaagctgcagaggccgaacaccgagagagatacagaaacaaagccaacttccccggcaagagtgaatcaaacttcaaggaggtgctccgggggaagattgagttcattggtatggtcaaaggacgtaataacgaaatctatcagaaatacctccagtggtatgtgaagctgctgaaatttgggagcaattga

SEQ ID NO: 7897 - RNA, 1104 nt, synthetic construct
  source 1..1104: mol_type = other RNA
atggtgatcaatttccccaaagggcaactgattcctgaaaactccaacataaagtctaagtcatatgcccacctactgttgaaagataaccctgagacgttgagggaaaagttcttctcgctctcaactgctcgcgatttggccaagctccttaacgttgagtatcggcgcctcgtctaccacatttacatagtgccgccttccaagcggtacaaaacctttgagttgcccaaaaattccggcggaaccagacagatatccactccccagacagctttaaagattatccagtggaaactgaatcaggtcctgcagacaatatatgaacctaagccttctgtacatgggtttgtaagtggtaagtccattgtgacaaatgcccaagcacacgccaagaaacggtatatcttaaacctggacctgaaagacttctttccctcaatcaacttcgggcgagtgaggggcatgtttatcgctgcgccttacggcctgactccggaggtggctaccgtgctggcccagatctgctgtcataacaatcagctgccacaaggagcccccacaagtccaataattaccaacatgatttgcgccaaaatggactctcagctgcagcaactggccaaggcatgtaaggcaacttacacaagatacggggacgatattacatttagcactaccctcaaagaatttccagagagcctcgctaaggtcgtcacggaagaggggaaggaaaaagtggctctcggagagccccttttaggcatcatcgcagagaatggtttccaggttaatgaaaacaagatccatctgcaggcaaagggcaatcaccaggaggtgaccggccttaccgccaataagttcccaaatgttaacaggaagtttgtcagacaggtgcgcgctatgcttcacgcatgggcgaaattcggtctggaagccgcggagaaggagttccaagaaaaatacgcttcaaaaagccgactcccaagcaaatctaccgccagtttcaaagaagttctacgtggaaagatcgagtttattggaatggtgaaaggcaaggaggataaaatctatagcaagttcatcgacaagtttaacatttga

SEQ ID NO: 7898 - RNA, 1131 nt, synthetic construct
  source 1..1131: mol_type = other RNA
atgctgaatagcgctgttcaggaaaaaatcaacattcaccctctggaccaccaggcacagataaaggaaagattcacactcccaggaagcccggaggaactgaggcaaaaatttctcgctctccagacccctgacgatttagccagtctgttaaatctgacttacccccgcctcgcgcatcatatctacagagtaccttctgataagaaatataagaccttcactctgccaaagaaaatggggggggagagaaccatctcgactcccataagcgcactaaagatcattcaatggaagcttaaccagatcttgacagcagtttacgaggtgaaaccatccgctcatggctttgtgccaggcaaaaatatagtgaccaacgccaaagcgcacgcaggtaaacggtttgttctaaatctcgacctcgccgattttttcgggagtgttaatttcgggcgggtgcggggtttattcatggccaccccctataacctgcctgcgaaggtcgccacagtgttggctcaaatttgctgtcacgaagacaaactcccccaaggggcacctacctcccccatcattacaaatatgctgtgcgccaagatggattcccagctgcaaaggctggctaaagaatgtcgagcaacttacacccgttatgccgacgacattactttttctacgacgctgaaagagttcccagaagccctagcgtacgccatcgaaaccgaggatggagacaagcttcttctgggagatcgattactgggcatcataactgagaacggcttcaaaatcaacgagaagaaagtgaggttgcaggtgcgcggcaatcatcaggaggtaacgggacttacaaccaacgaattcccgaatgtcaaacgcacatatgtcagacagatcagggccatgttgcacgcttgggctaaattcggcctggaggctgcagagaaagaatactatcagaagtatgaggagaaggtcaagttttcactcaaaaaaaaggcctcattttctcaggtggtgaagggcaagattgagtttctgggaatgattaagggtaaggacgatgacctgtaccagaagatgctgaagagctacttgaagcttaagaagtccgcccccgtcacaaactga

SEQ ID NO: 7899 - RNA, 1125 nt, synthetic construct
  source 1..1125: mol_type = other RNA
atgctatccagtgtcatagagaataaggtgatagtccatcctctcgatcgccaagctcaggccaaagaacgctttgttttacccggttcccagactgaacttaggcagaagtttctcaaattgcaaacacctgacgacgtcgcacgtctcctgaatctggactaccggaggctggctcatcacatctatcatgtgccaaccgagcagaaatataaaactttcacactgccgaaaaagacgggaggcgagagaaccatctctacacccgtgagcgccctcaaaatcattcagtggaagttaaaccagctgttaacggcagtatacgaagtgaagccaagtgcgcacggcttcgtgcaggggaagaatatcgttacaaatgctaaggtgcacgcaggaaagagattcgtcctgaaccttgacctggcagattttttcggatcagtcaattttggccgagtccgaggactgttcatggctacaccatacaacctccctgctaaggtggctaccgtactagctcagatttgctgtcatgaggacaaacttccccagggtgcccctacctccccaatcattactaatatgctctgtgccaagatggactctcagttgcagcggctcgctaaggaatgcagggccacatatacgcgttacgcagatgacataactttcagcaccacattgaaggaattcccggaagccttggcctatgccgtggaaactgaggacggtgataagttgctgctcggggatcgcctgctaaacattatcgccgataatgggttcaatattaacgagaagaaagtgagactgcaagttcggggcaaccaccaagaggtgaccggcctgaccaccaacgagtttcccaatgtgaagagaacctacgtacgccaaattagggccatgctgcacgcctgggcgaagtttggcctggaggcagcagagaaggaataccacgagcggtataactttaaagcgaggttcgccctgaaagaggaggctagctttaaacaggtgctgaagggaaaaatcgaatttcttgggatggttaaagggaagaaaaatcttgcctacaacaaattcctgaagtcatattacaaccttactaacttcggcaagaaatga

SEQ ID NO: 7900 - RNA, 1020 nt, synthetic construct
  source 1..1020: mol_type = other RNA
atgcagacccctcagaacgtcgcggtactgctggatgtggaatatgacaagctcatttaccacatttactccagtaatgtggatgagcgctacaagaaattcgaggtctataaaaagtccgggggaattcggacaatcacaacacccgttactagcctgaaattcatccagtggaaactcaatcaggtgctcaacgcagtgtatcaacctaaaccagctgttcacgggttcacgttgaataagaatatcctaaccaacgcccaggcacatgtggggaagcggttcgtactgaacctggacctggaagattttttcccaagcatcaactttggcagagtgagaggactatttatggctcccccctatcagctaccggccggtgttgcaacggtgctggcccaaatttgttgttatgacaatcagcttcctcagggtgccccaacatcaccaatcgtcagtaatatgatttgcgccaagatggatacccagttgcagagactcgctaaggaatgcagagcgacctacacacggtacgctgacgacatcaccttttctactactctgcgtgagtttcctgaggacttagcatatcccgtgaaaaccgaggagggcactcagttcgtattgggagatcacctccttcagatcatagccgaaaacgggttcaaaataaacaatcagaagactcgacttcagaccaaaggttcgcatcaagaggtcaccggcctgactgtgaatcagtttcccaacgtgaaaaggacatatgttaggcagattcgcgctatgttatatgcctgggaaaaatttgggctgcaacaggcctcccaagagtactacttcttctacaaggattataaccgcctcccgctgaaattcaataataagagctcagaagacgactttgtgcaggtcattaagggaaaaatcgagtatcttggcatgatacgaggcaagcaagatagcatatacaggaagtacatctctaagtttaactacctgaagaactacaacggcaggtga

SEQ ID NO: 7901 - RNA, 1116 nt, synthetic construct
  source 1..1116: mol_type = other RNA
atggaatctaatttgcctgagcatcaagccgtgaatccagagtcaagcaaaagatcattccaacgaaaaaagggttgtctgaacttgactcaaaccccagaagagttacgagctgctttcctggccctaaaaacgccccgcgatatagctagactgctgaacgtgcgttatgacaggctcgtttatcacatttataaggttccccttgagaaccggtacacgacctttgagatccccaaaaagtccggcggtaccaggacaatctctgctcctgtcacagccttgaagcttatacagaggaagttaaatcaggtgctgcaagcggtctacgagcccaagccttcagtgcacgggttcactccaggccgcaatattgtgtccaatgcgaaaccacacgttaagcggcggtacgtgcttaatttggacctgaaggatttttttccgtcgattaatttcggcagggtgagaggaatgttcatggggatcccataccacctccctgaacctgtagccacagtgctggctcagatttgctgtcataataaccagctcccacaaggggcacccacaagccccgtaatcactaatatgctctgcgcccagatggactccagactgcagcggctggcacagaaacttaaatgcacctatactcgctatgcagatgacatcactttctctaccaatatgcctgaatttccggccgatttagcaattgaggtgaccacagacgaaggaacgaggatcaagatcggggagcccctgcgccagatcatcgaaagctccggattcctaattaacgacaaaaaagtccggctgcagaaaagaggacatcaccaggaagttactggccttaccaccaacgagtttccaaacgtcgatcgtcgatacgtccggcagataagagccatgctgcatgcctggcgcaagtacgggaaccagaacatcctcagcgtcacaagtaaaagtaaccaccccattagttacgagtcttttgataacttcaagcaggtgctcaggggccgcattgagtatgtgggcctcgtgcgtggtaaggaagaccctatatacatcaagttcctgaaccagctgaagatgtttgaagaggtattttga

SEQ ID NO: 7902 - RNA, 1116 nt, synthetic construct
  source 1..1116: mol_type = other RNA
atgcgagatcgacttaagggaacacccgaccagcttcgggaggccttcctgaagctgaggagccccagggacgttgccgagctgttagatgtgagatacgatcgcctcgtgtaccacatttatgtggtgccagaggccaagaggtacacggttttccacatacctaagaagagtgggggacaacgcgaaatactggcaccagctacccctttgaagctgatccagaagaagcttaatcaggttctgcaggccgtgtaccagccaaaaccatctgcacatggtttcctgcctgccaggaacattagaaccaacgctgaaccgcacgcaggtaaacgttatgtcctgaacattgatctcaaggacttcttccccagcattaattttggccgggtgcgcgggctgtttctttccaaaccttataacttaccggatgaggtggcgactgttctcgctcaaattgcttgctatacccatcctgaggatacatggcagcataatggcaaggtggtacggagatcataccttccccagggcgccccgacatccccaatcatcacgaatatgatctgcgctggaatggacgccgaactccagagattggcgaagcgttgtagggcgacttacacaagatatgccgacgatctcactttttcaactaccctacgaaccttccccgaggacctggcccaggtagtggatgacaccgaaggccgcaagcgcgtcttcttgtcggaaactctgaggagcataatcgagaaacacggctttgaggtcaacgacaaaaaagtccggttacaagaccgcagatttcggcaggaggtcaccggattgacagtgaatgaatttccaaacgtccgccgttcttttgttcggcaagtgagggcaatgctccacgcatgggataagtacggtctagaacaggccgaaagagagtacagagtgaaatatgaatccaaacaccggggcccctatcatgccgctcccagtttcgctcatattgtgagggggaaattggagttcatcggaatggtaaaagggaaaggggaccctgtctacctcaaatatctgggccactactactctctgatcgagcgagacaagctggcaagcaagtga

SEQ ID NO: 7903 - RNA, 2262 nt, synthetic construct
  source 1..2262: mol_type = other RNA
atgagcttgtacgacttttcaccagagcttgtcgctaaaacaatcggagtggattatcacagtctcattgagctgctcgaacaggtagatgagatttatagagacttcaagattccaaagaagagtggcggcgtgaggacaattcgaacccctcgctctactgaatacgaggatggagacatcacattactggacatccagaagaagatcagtaaggagatccttcagcccgtgtatcagccgaagccttgcgtgcatgggtttactgctaaaaaatctatagtcaccaacgctaaagctcacaccaagaagaagtacgtgctgaaccttgacattcaagactttttcacttccatcaaattcgaaagggtgagaaagatgttcatggcacagccttataatgctaacgatgaagtagccaacttgctggcacaaatttgctgctatgaagaccagcttcctcaaggggcccctacttctccgatagtgtcaaatatggtttgcgcaaaaatggatggtcaactgctggatatcgctaggcagtacaaggccacatatacaagatacgccgacgatatcacattttccaccaatctggaggagttccccgaggcgctggggtacgtcgtgaacgagggatctatccgacggttcttcgtcggccatgaactacaggaaattttcaatagcaacaactttgaggtcaacgagagaaaagtgagactgcagacgcagaattgtcgccaagaagtcaccggcttgaccgttaaccacttccccaatgtaaacaggcagtttgtacgacagattcgggccatgttatatgcatggcagaagttcgggatcaacaacgctgcctccgagtatatctctaagtacggccgctacggcgagttctacaaaatcattctgaactacaagtccggtgttgaggccaagcggttccatcatgttctgcggggaaagatagaatttctggggctcgtccgggggaagaatgatcccatttacaaaaagtatctcgcccagtacaaacgtctcttgtatgaggagatcgcacaggagcctcgattgccaagcgtgctgaagactaaaggctggcaagaaggccggctgtctcttaacaatcacgattggaatgccaatatccgtaagagaggcctacttctgcccaactacattaaaactagctacctcctcagcgttcttacctccctgtacactgggcagatagtgctgttaaatggctccgttggaataggtaaaacatcgctagttgagaagagcgctaagatcttcaatggcaatagcaagattatcccagtgcggcctgcatggaccgactccaccgatctgctcgggttttacaatcccgtgaacgactcatttcacccttcaatctttctaaccgcacttcagcaggcctcagaaaatttcgaacaaattttcctcgtgtgtctggatgaactgaatctcgccaagattgaaaattatgcggcggacctgttatcctgtctggagtatagcaaaacaggtcagggagcccagaaacttatcttgtattcgccgagcatcgaagtccaaatccgccaggaaatcaagttacttcagagccaaaagagcaaaacatttgagcagtccaacaggctggctaagctgcagaacctgcttaacacttaccccgctgagttcctcctgcccaagaatctagtgttaatcggcactctgaatagtgacgagacgacctatgatatttcaccaaaagtcattgatcgttccttcgtgataacgtatccattgccagattttgccgaggatacaaaagccaccccttctagtaatccaataactggaacgtacatacccagtctcttccaggagctcgacaacaaaattctgcaggcgcactcatcaagcgacgaatttaacgacagttggtacaccctgctcaactggaattctaggtatctctctcagtgtggtatcccactcggttaccgcgtcaagcgagactacaaagtgttttatgccgcaagccaaattatcggactgacggtggaagagtgcttgggatatttcttgtttaccaaattgatgccgcgcctgagttttttcaaagatgagtctcgcgaaaacatttgtctggagtggctggaagagatagaaaacaactactcccagtttggcacacccgacgtgatcgagaatctacggaaccaaattcaggacatcaggagaagaaatgtaaggtactgggggtga

SEQ ID NO: 7904 - RNA, 2262 nt, synthetic construct
  source 1..2262: mol_type = other RNA
atgtctttatacaatttgtctcctgaactggttgccgagcaactgggcgttaactaccatagcttgattgagctactgcagcaactagatgaaatctacagagactttgtcatcccaaagaaaagcggcggagttaggactattaaaaccccaatgagcattcgggaaattataagaggatacgaggatggatattttcctcttctcgatatccagaagaagctgagtaaggagattcttcaacccgtgtatcagcctaagccctgcgtccacggcttcacggctaagaaatccatcgtgactaacgccaaggcccatacaaagaaaaagtatgtgctgaacctcgacattcaggatttcttcagctcaattaacttcgaaagggtgaggaaaatgtttatggctcagccctataatgcaaacgatgaggtagcaaacctgctggcccagatctgttgctacgaagatttattgccccagggtgccccaacctccccaattgtcagtaacatggtttgtgctaaaatggactcacagttactgacactggctaagaagtataaagccacctatactcgctatgccgatgatattactttctctactaacctggatgaattcccagaagccctcggctccgtagcggatgaaggcggtatccgcagattcgtggtcggggaggagttgagagagatcctaaacagtaacaacttcgaggtgaatgagagaaaggtccggctgcagacccagaattcacgccaggaggtgacaggccttacagtcaataggtttccaaacgttgaccgaaaattcgtgcggcagatccggtccatgctgtacgcttggcagcgttttggaatagagcaggccgcgggcgaatacagctccaggtacgataagaagtacaagtacctcatcaatcgctctggcgaagaagcgaagagatttcaccatgtcttgcgcgggaaaatcgagttcctggggatggtgaggggaaaaaatgaccctatatacaagaagcacctggcccagtataagcggctgctctacgaggagttagcccagaagccacggctctcttcctctctcaaaaccaaagggtggcaagatcgagtatccctaaataatcaagactggaatacccacatccgggtggctggactcctgctgcccgattatataaaaaccagttacctcttggcaatcctcacctccttgtataccggccagatcatattgctgaatggatcagtgggcatcggtaagacgagcttggttgaaaagagtgcagagatcttgaacggtaattccaagattatcccagtccgacctgcttggactgactcaacggatctgttagggttctacaatccggtgaatgactcatttattcccagtagcttcctgaccgccctccaaaaggcatctgagaacttcgaacagttctttctggtgtgcctggatgaattgaacctggcacggattgagaactatgccgctgacctgctgagctgcctggaatactccaaatcagggcagcaagcccagaaacttatactgtattcaccgagcatcgaggtccaaattagacaggaaatttcactccttcagagccaaaagactaaaacgtctgaacaatcgaatcgacttgcaaaacttcagaacctcctgagcacctatccggccgagtttagcattcccaaaaacctggtgctgatggggacacttaactctgacgagacaacatacgacatcagccccaaggtaatagaccgcagttttatcataacctatccttttcccgacctagctggagacaccaatgcaacaccttccaataatcctatcacaggcacttacattccgtcgctcttcaaagagctagacaataaaatcctgcaggaacgaagtacaaatgacgagttcaacgaatcttggtacattatctcgaactggaacagcaggtacctttctcagtgtggcattcctcttggttaccgggtcaaaagagattataaggtgttttatgctgcgagtcagattgtgggtctgactgttgaagagtgcattggatacttcctctttaccaaactgatccccaggatctccttttttaaggacgattctcgtgagaatatatgtctcgagtggttagaagagatcgagaataattattcccacttcgtgacaccagacgtaatggggaaccttagaaaccagatacaggacatccgccgtaggaacgtgcgctactgggggtga

SEQ ID NO: 7905 - RNA, 2274 nt, synthetic construct
  source 1..2274: mol_type = other RNA
atgaacctaaaggatctctattgcttatcccccgagctcgtcgctgagaagttaggggttaactatcattccctgattgagctgttagaacaggtcgatgagatttacagagagttcaaaatccccaaaaagagcggtgatgttagaacgatcaggacaccaatctcgtcttctgaacgctacaagatttacgaaggagaaggctacttcccattgcttgatatccagaaaaaactcagtaaggagattctacaacccgtgtatcaacccaagccttgcgtccatggttttacagcaaagaaaagtatcgtgaccaatgccaaggcgcatacaaagaaaaagtacgtactgaatctggacatccaagatttttttgcgagcatcaatttcgaacgcgtgcgggctatgttcatggcgcaaccttataatgccaacgacaaggtggctaatctgctcgccaaaatatgttgctataaagaccagttgccacaaggcgccccgacttcccctatcgtgtccaacatggtgtgtgcaaaaatggatcggcagcttctggagctggcaaaaaagcacaaggccacctataccagatatgctgatgatgttacgtttagcacaaatcttgaagagtttccggaggctcttgggtacgtgattaatgacggatccgtccggaaatttgtcgtgggagaagagcttcgggagatcataaattctaacaacttcgaagtgaacgagaggaaggttcgtttacagacgcagaactatagacaggaggtcactggactgacagtcaatcaccgcccgaatgttaaccgaaagttcgtccgacagatccgtgcccttctccacgcatggcagaaatttggaatcgagaaggcagcggacgaatatagtagcaggtacgacaagaagtacaagtacctgaagatcaggtcttccgagaacacaaagcggttccaccacgtcgtacgaggaaagattgagttcctggggatggtgcgtgggaaaaacgatcccatctacaaaaaatacttgtctcagtacaagaggctcatctatgaagagctggcccaagaacctaagctctcttttgtactaaaaactaaagggggcaaggaacgggtgagtctgaactatcaagactggaacgccaatatccgagcccgaggactgctgctgccaaactatattaagaccagttacctcctgtcagtgttgacttccttgtatgccggccagatcatactgcttaatggctctgtgggcgtgggtaagacgagcctggtggaaaagagcgcgaccatcctgaacggcaactccaaaattattcctgttcggccggcttggattgacagcagcgatctgctggggttctacaaccctgtgaatgactcatttaatccctcatcatttctgacagcactccagcaggctcaggaaaagtttgagcagtttttcctcgtatgtctggacgaattgaacttagcccggatcgagaattacgccgctgatctgctaagttcattggagtatagtaagtccggtcaaggagctcagaaattgatcctttactcaccctctattgaggttcagataaggcaagagattaaactcctgcagtcccagaaaagcaagacttctgaacagtcaaacagactcgccaaactgcagaactttctcaatacctacccagcagagttcagcattcctaagaacctgatactagttgggaccctgaattctgatgagactacctacaacatcagtccaaaagtaatcgaccgctcatttgtgattacttatcctttacccgacttcgctgaggatactaacgctaccccaagtagcaatcccatcgcaaaaacctacatacccagcctcttcaaagaattggacaacaagatcctgcaggccgacaattcaaatgacgaattcaatgactcctggtataccatttcgaactggaattccctgtacctgtcgcagtgcggcatacctctcggttatagagtgaagagggactacaaagtgttctacgcagcctctaggataatagagctaacagcccaggagtgtatcggctatttccttttcaccaaacttttgccaaggatcagcttctttaaggacgaagagcgcgaaaatatttgcctcgagtggcttgaagaaattgagaacaactactcccactttggcacaccagatgtgattgagaatctgcgcaaccagattcatgatacaagacgcagaaatgtcagctactgggggtga

SEQ ID NO: 7906 - RNA, 1746 nt, synthetic construct
  source 1..1746: mol_type = other RNA
atgagtatcctgctggagagcgctgacactacactccgggagcggttccataatcttcgtgacttcgcagatctggccgatctcctcgagattaaaaaaagcctgctctattactacgctttcaaggctcgaggagtggatcactataaggtatttcaggttccgaaaaaaagtggcggaacacggcagatctgttcaccgtccagccctcttaagttgattcagcgaaagctaaatcaaatctttcaatccgtctacgtaccaaaagcctctgtccacggcttcgtgaaagataggtcaatagtcacaaatgccaggcggcacatcgacggtactccacggaaacgttatgtgctcaacatcgatatagccgacttttttccatcgataaccgagggcagaatcaaaggactgctcatggccacgccatacaacctcccccgggacctggcacatgttatagccgggttagtctgcttagacggtcgcctacctcagggggctcctacctcacctgtgctgtcaaacatgatctgtgctcggatggacactcagctgaggagattggcacagaaatataggtgtgtttacactagatatgcagatgatatcaccttcagtacttccctgccccgcttcccagctggattggctacaggaaacgatacaaaccgacaaatcgttgtcggggacgaattagcgtctgtgatttccggtaacgggttcgcggtaaatcaaaaaaaagttagactgcgctctaaggataataggcaggaggtgacgggcctgaccatcaaccgctttcccaatgtgaccagaagctatgtccgccagattagggccatgcttcactcttgggaaaggtatggatatgaaaacgctaaccacgagtacgcccagaaatatttcgcgggcgatgaggacaaagccccatcattgaggcaggttctctatgggaaaatggagttcctcagaatggtgcgaggcagtgacaattccatctttctatcctttcgggaaaagctgaggcgcatagaccccgagtacaagcccctggagctgacacctataaatgcctccatccctatttacgtggtcacggagggtaagaccgactggaagcatcttaaggcggctctgcacaggcttaaggagcagggcctctttattgggctcgaaattgaattctgggaatacgaagatgacgtgagtatgaacgatgcagaattgcttaagagatgcaagtacaaggacgacatcgacctgcccaaactctatatctacgtgttcgaccgtgataagcctgatatcgtgagacaagtcaccggcaccgacggcgatttcaaacagtggcgccgtagactgtactctatggcaattccggtacccgcacacagagtcgggaaccccgatctgtgtattgaactgctgtacgacgatgacagcgtgaagcagaaggatagccacggccggcgcctgttccttagctctgaatttgataagcattcctgccgccatttaaccgaggacctaaactgcactgataacaataaggtgaagcagcctctggcaattattgacaatgccgttttcgacagcaatcggaagaatgtggccttgtctaaatcggagtacgctaccaacgtgttgacaaaagtaccaggatttacaacctttgacgtggccgcctttaagctggtgttcgagactttagagcgaattatcaagtacgataatcagcattga

SEQ ID NO: 7907 - RNA, 1149 nt, synthetic construct
  source 1..1149: mol_type = other RNA
atgttccgtagccgtattaaacggagcagcacactgctgctctgcaagaattgcgacgaacttaagcaggagtttctcagcttgaaaactgcaaaagacattgcaacccttttggaagtcccctactatcagttggcctaccatctgtacaaggtggccgagaatgagaagtacagggagttctcaattccaaaaaagagcggcgattcaagaaccatcaccgcccccgccaaagcccttaagatattgcagagaaagctgagccaagttctctattcagtttatgagcctaagaaaccagtccatggatttgtgcccgctcgcagcatcttaacaaacgcaaagcagcattctcacaagagatttgtgctgaatatcgacctgaaagacttcttcgattctattcattttggccgcgttaaagggatctttataaaacctccttgtaatctccccgaggaggttgctacgatcctcgctcggatctgttgccactctggtaaacttccacagggggcgcccacatccccagtagtctcaaatatggtgtgtgcccgcctggatcgccaactgaggctgttagcggaagaatttcggtgcacttatacaaggtacgctgatgatatcacctttagtactactatgagtgatttccctaaggagattgccttcgctaatccagaaggggacaacctggagagtctactgggtgagcgcctcatcctgaccatatgggataacgacttcgagattaacgaaaacaaaattcgactgcagcacaaaggccaacaccaaagtgtgactggattgacagtgaatcagttccccaatgtgaaaagggcatacgtcaggaagatctcctctatgttacacgcatgggataagtttgggcttgcctccgtgcagcagcgatacgtcgaaaagcattataaggaatcgggaaaattcaacaaagagattccttctttccaggaggtgctgcgaggcaagatcaactttctcggcatgattaggggtaaggacgacgaaatctacagaaagtatctaacctggtatcggaacctgtccgtacgggaaataccgatcgacctctctcagctagattccaagacccaaccttcccagtcgcacccgacggacagaggatga

SEQ ID NO: 7908 - RNA, 1014 nt, synthetic construct
  source 1..1014: mol_type = other RNA
atgaaaacccctaaggatgtggcaagattgctcgaagttacttatgaccggcttgtgtaccatctgtacatctcttcagaaaatacgaaatacatcgagttcagcatccctaagaagagcggtgactctaggactataacagcaccctccacagctttgaaaatcctccagaggaagctgagtcaggtgctttatagcgtgtacaagccatccgactcagtgcacggcttcgtggccggaagatccattctgacaaacgctaaacagcatctgcgaaaacgttttgtgctcaacattgatttgaaggccttcttcgatagcatccattttgggagagtacgaggcatattcattgccccgccttataatttgcccaaagaggtggccactgtacttgctcagatttgttgtcacagcaacaagctcccacagggggccccaaccagtcctattgtttccaatatgatttgcgtccggctggatcggcaactgcgcctgttagcgaagaaatataagtgcacctacacacgctacgctgatgatattaccttctctaccactctgcccaactttccaaaggagattgcgttcgaaagtcccggtggggacgacctggagtcattgctgggtgaggagctcattctaacagtctgggacaatggctttgagatcaatgaaaacaaaatcaggctgcaacacaagaataatcaccaaggcgttaccggcttaacggtcaatcgcttcccgaacgtgaacagagattacgtccggaagatcaactcgatgctgtatatctggcaggaatttggactcgcctcagcacagaaagggtacatcgagaagtacaacgaaaagtccggaaagtttaatgaggaaatcccccttttccaggaggttctgcgtggcaaaatcaattttttagggatggtcaggggaaaggacaacgagatatatctcaaatacctagactggtattgcagtctgtctaaccaggaggaaataagcaaagaatga

SEQ ID NO: 7909 - RNA, 1086 nt, synthetic construct
  source 1..1086: mol_type = other RNA
atgttaaaggaaaactccactcttatcctctacaagaattgcaacgagttaagacaggaatttctggctctgaagagtccccgagacattgccgagctgctggaagtaaagtacgagcaactggtgtaccatctttataaggcccctggatcctccaaatacaaggagttcagtatctctaagaaaagtggtcactctagaactatttcagcccctagctccgccctcaaaattcttcagcgcaaactttcacaggttctctacagtgtctatgatccaaaatatccggtccatgggttcctgcctgagcactcaatcgtaactaatgcaaagcaacacctgcggaagaagtttgtcttaaacattgacctcaagaatttcttcgatgccatccacttcggccgagtgagaggtattttcctagctccgccttataaactccctgaggaggtagcaacagtgctggcgcaaatctgttgccattccaacaagctaccacaaggggcccccacctccccagtggtttcaaatatagtctgcacacggattgattcgcagctgcgcttgctggctaaagagctcaggtgtaattacacacgctacgccgacgacataaccctgtcaaccacccgtcccaattttccaattgagatcgcatatgaaagcagcgaagacaacaaggtcaagatagttttgggagagaggctaatcagcatcgtgcagaataatggcttcgagataaacgataggaaaatccggttgcagcatcgtagccagcaccaggaagtgacaggactgaccgtgaaccagtttcccaacgtgaaaagagattacgtccgagagattagtagcatgctgcacgtttgggacaaatttgggctggctagcgcaagccagcggtatgcggaaaagagatctcgcgaactggaaatctcccaggaggaagtgccatcgtttcaggaggtgttgaggggcaaaatcaatttccttggcatggtgcgcggaaaagagaacgagatctataggaagtatctcaactggtactacattttgtctaaccggtctgaaacgccctctggcgggtga

SEQ ID NO: 7910 - RNA, 1092 nt, synthetic construct
  source 1..1092: mol_type = other RNA
atgctaacagaaaccgaaataaattcgagccttatcttactggaggactgcgagaagctgaagaagaagtttctctcactcaaggatcccagggatgtggccgctttactggacgtcacctatgatcggctcatttatcatatttatcgcgtgcctgactccgagaaataccttgaatttaaggtgcccaaaaagagcggccagatgagaaagatcagtgccccgtcaacggcgttgaaaatcatccagagaaaactatcccaggtgctctattctgtctacgaccctaaggcccctgtgcatggctttgttccttctcggtcaatcctgaccaatgcacgcccccacctgaggaaacgctttgttctcaacattgacttgaaagactttttcgacagcatccacttcggccgagtcaggggcatttttatggccccaccatacaacttgcccgctgatgtgagtagggtgcttgcccagatctgctgtttctctcgtaagctcccccaaggtgcaccgacttcgccagtggtttccaatatgatatgtgctcggctggattctcaactgcggctgcttgcgaaggagaatcattgcacttttactcgctacgctgatgatataaccttcagtacaacgctgcctgtattcccaaaacggttggcctatatcgacagcgacgttaaagaggacgaggaaaagaccgtgctggggtcatccctggtatccattgtccgggaaaacggattcgagatcaattggaaaaaagtacgactccagcacaaaagccaccaccaggaggtgacaggaataactgtcaaccagttcccaaatgtgaagagggacttcgtccgaaagattagcatgatgttacacatctgggataagtatgggttggatagcgcaagaaagcgccatgccgaactgctgtctaaatccctggagattcccgaagaagaggtgacagattttagagagatgcttcgtgggaagattaacttcctgggaatggtccgtggtaagaacgactctatctacgttaaatacctaaattggtactgtaacctcagtgcaagagagaggagaatgtga

SEQ ID NO: 7911 - RNA, 1080 nt, synthetic construct
  source 1..1080: mol_type = other RNA
atgtctgattctaagtttaaagagaattccacccttctcctctataaaaactgcgacgaactgaaggaggaattcctgtcgctgcaaacaccccgcgatgtcgctcggctactcgaggtcagttacgatcgattagtgtaccacctctatatcgtgcctgagaatcggaaatacgccgaattcagtgtaccaaagaagtcaggcgacacgagaattatcagcgcaccggccaccgccttgaagatccttcagaggaagctgagccaggtcctatatagcgtctacgagccaaaagctgccgtgcatggcttcgttccctcccgatccatacttacaaacgccaaacaacacctgcacaagcgcttcatactgaacattgacttgaaggacttttttaacagtatccatttcggtcgtgtacgaggtatatttatggcgcctccatataaactgccagaagaagtggccactgtactcgctaagatttgttgctatagcgggaagttgccccagggcgctcctacttcccccattgtttctaacatggtgtgtccccggatggacagtcagcttaggctgctcgccaaggagtttaaatgcacttatacccgttacgcagatgatatcaccttctctactacattgccgaattttccaaaggaaatcgcgtacattaacatcgaggaggataagcctaaaatactggtcggagaaagattgatcagcgtgattcaggacaatggattcgagatcaatgagaataaagtgagactgcagtataaaaccaagcatcaggaagtcacagggttaacggttaaccaattccctaacgtgaaacgcgactacgttagaaaaatctcaagcatgctgcacgcatgggacaaatttggactcgactcagtgcagaaaaggtacatcgagaagtgttccaaggaactgggcattcctgcagaggaggtgcccccattccaggaagtgctgcggggcaagattaattttctgggaatggtgagagggaaggataacgaaatttaccgcaagtaccttaattggtatcggaggttatcaaacagggagtga

SEQ ID NO: 7912 - RNA, 1137 nt, synthetic construct
  source 1..1137: mol_type = other RNA
atgtctagttcctcttttaccgatctgaatagccagcacaacaaggggtctagcctgttcctgtatcaaaactgcgacgaattgagggagtcattcaagtccctaaagaccccccgggacattgctcggctgcttgacgtgagctataacaagctcacataccacatcagcatattaccagaaaatgaaaggtacagagacttcctaatacccaaaaagtctggacagtcacgcactatttctgccccttgtactccactgaaaatcttacagcgcaagctgtcacaggtgctgtacagcgtctatgagcccaaaagtagtgttcatggctttgttcctaatcgctctatcctgactaacgctaaaagacatgtccacaagcgatatgtgcttaacatcgatctcaaggactttttccactcgattcattttggacgcgtgcagggcatattcatgaagcctccatacaatcttccgaaagaggtagcagtggtcctcgccaagatctgctgctatagtggccgtttgccacagggagccccgaccagtcctatcgttagcaatatgatttgtgcaaggatggactccgagttgagaaaactcaccgtggagttcaaatgtacctcctacacaaggtatgccgacgatatcacatttagtaccactctgtccaagttccccgtcgaaatcgcttaccaagaaaaatccggggatgataattcacaaaagctgattctgggtgagagactttcaagtatcattcagagcaatggatttgctatcaacgagtctaagatccggttgcagcataaatctcagcaccaggaagttaccggcattacagtgaaccagttcccaaacgtcaagcgttcattcgtgagggagataagctcgatgctgcacatctgggataggtttggtctgaagagcgcagaacaacgctttcgggataaggccgccgaggacctcaaaacatccgcatacacgctcccttcctttcaggaaataccctcctttaaagaggtacttcggggcaaaattaacttcctccgaatggtgcgagggaaagacaatgcgacgtatctgacttactccaagtggttctacgagttaagcagaaaagaggcgattaagtga

SEQ ID NO: 7913 - RNA, 1131 nt, synthetic construct
  source 1..1131: mol_type = other RNA
atggaaaatttgtcgcttctgctggagaggtcttgcgaggatctgtgcgaagacttccattcactcaaaaccccgagagatgtggccgctctcctggacgtgccgtataaacgcttcgtttatcatctctataaggaggagaaccgatacacttcctttgagattccaaagaaatccggcgaccgacggacaattagtgccccggtgatcggcttaaagataatccagcgtaagctgtcacaggtgctgtattgtgtatacaaccccaagccatctgtgcacggattcgtcccagctaaatcaatactcactaatgctctgccccatgtgaagaaacggtacgttttaaacgccgatcttaaggacttctttcccagcatcaatttcggtagagtccgcggcctttttatggcggccccttacgggttgagccccgaagtggccacagtgctcgcccaaatctgttgttacgaggggaagctgccacagggagcacccacgagtcctgtcgtgagcaatatgatttgcgcgagaatggatcgccagctgcagcaccttgctaaggagtaccggagtacttacaccaggtacgctgacgacatcaccttctctacaacggttcctaaatttccaaaagctctcgcatatgtgcctgaggagggcgacgaaaaaaagcttatcctgggtgaaaagctcgccgaaattatcatctccaacgactttcgcgtcaacgagcagaaggttaggctacaagataagcggagccaccaggaagtcacaggactaaccgtaaatgaatttcctaacgtagataggagatatgtacgatcaattcgcgcgattctgcacgcatgggataagtttgggctgcaaaaagcacaggaggtctatttggagaaatacgccccaacccctcgttatccccagcaagaaaagtcctctctgaaacaggtgttgcatggaaagatcgagttcttagccatggtcagagggaaggaggaccagatataccagaagcacatcaaaaaatacttcgagctgtcccaacgggacagcattccccacaaagctatattggtgaggcaggaggcagtgcatgaacagactggcaccagcaatgatgaagtttga

SEQ ID NO: 7914 - RNA, 1002 nt, synthetic construct
  source 1..1002: mol_type = other RNA
atgaaaacacctcgggatgtggcccagttgctcgaaatcccttatcagcggctcgtgtaccacctgtatcaggtccccctggaggagagatatctaaccttcgagctcaagaaaaaaagcgggggggtacgcattgttagcgcccctgcctccgcattgaagctgatccagaaaaaacttaaccaggtcttgcagtgcgcgtaccagcccaagccctccgtgcatgggttcacatttagcaaaaatatcaccactaacgctaaggcacacaccggcaagcgttacgtgctgaacattgacctcaaggatttcttccccagcattaattttggacgtgtgagaggcatgttcatcgcgatgccgtactcattttcgccagacatcgctactatactggcccagatctgctgctacaataaccaattacctcaaggcgctccttcctctcccatagtatctaatatggtgtgtgccaagttggattctcaactgcaacaacttgccaggaagctgagatgtacttacacaaggtatgctgacgatatcacctttagtacgaccgttccaaagtttccaaaagaactggcttatctcatcgacatcaatgagcagcagaaactagttctcggagacggcctgctttcaataataaaggacaacggatttcagatcaacgaaaaaaagattcgacttcagtccaaggatgaacaccaggaagttacagggctgacggtgaatcagttcactaacgtcaatagaaactatattcgccagattagggcaatgctgcatgcatgggagaaattcggtttagagttagccgagcgggagcatcgaatcaaatactacttcaagcaaaagagcccatacaaaaatattccgagtttcaaacaggtcctccggggaaagatcgagtttgtgggcatggtccgcggtaaggaagatcagatttaccagaagtatctgaatcactatctgaggctgaacaacccagtgatttga

SEQ ID NO: 7915 - RNA, 1095 nt, synthetic construct
  source 1..1095: mol_type = other RNA
atggcaaagacacggaattcaaaatcatccatccagccgacactgaggaaagagggagacgaactccggaaggaatttttccttatgaagataccaagagatgtggcacagcttctggaaataccttaccaacgcctagtgtaccatatctatatcgttccgctcgaagaccgatacctaaccttcgacattaagaagaaaagtggcggtaaccgcaatatctgtgcccctgccaccgcgttaaagatcatacagaagaagcttaaccaggtcctgcaatttgtatataagcctaaaccctctgtccacggattcgtcttgaataaaaatatcgccacaaacgcgaaaccccatgccaagaagcggtacgtgctgaacgttgacttgaaagatttctttcccagtattaacttcgggcgcgttaggggcttgtttatggctctgccatatggcctgtcttccgaagtagcaactgtgctggcccagatctgttgctacaataatcagttgcctcaaggggccccaacatcacctattgtgtccaatatgatctgcgccaaaatggacagtcagcttcagcaacttgctaaaaaactgcgttgcacctatacgcgatatgcagatgatataaccttctccactaccctgccaaaattcccaaaggaattagcttacttcattgagattgagaaccagcaaaaactgatcttaggcgatgacctcctgagcatcattaaggagaataactttgaggtgaacgagcgcaaaattaggctgcagagcaaggattctcatcaggaggtcactggcctgacggtgaaccagtttgtgaatatcgaccggaactacataagacaggtgagagccatgctccatgcttgggaaaagttcggactcgaggacgctgaaagagagcaccaggagaaatattacagcaagtacaaatcgccctataaggtcattcccaattttaagcacattctcaggggaaagattgagtatatcgggatgatcaaaggtaaggatgaccgtatctacaaaaagtatctcaaccactacattaagctgcacaagaacagccagaataaaaagtga

SEQ ID NO: 7916 - RNA, 1149 nt, synthetic construct
  source 1..1149: mol_type = other RNA
atgagtgagaattatgagaaaaagtctcaggtgatcaaagcattgaaaccatgtcttgacaagaattgcgatgaactcatcaagaagttttactccctgaagtcaggaagggatgttgcccgacttctggaagtaccgtatggcgacttagtctactatttgtacgtgatcccctacgaacagaggtatactacattccagattcccaagaagttaggaggctatagaattatcagtacccctgccacatcgcttaagctcatacagaaaaaactgaaccaggttcttcaatgtgtgtatcaggttaaacctagcgtgcacgggttcgtcaaggataagaatatcgtgaccaatgccaaggctcacattggcaagcgctatgttctgaacttcgacctcaaggacttctttgtatccatcaacttcggaagagtccggggcatgtttatggcccttccttacgcgctaaatccggaagtggcaacggtgattgcccagatatgctgccatgacaaccagctcccacagggtgcacccactagccctattgtgtctaacatgctgtgtgctaagttagattctcagttccaaaagctggcaaaaaagtatcggttcacttacacgcggtacgccgacgatattacattttctactaccaggcccaacctgccagaagagatagcgtacattattattaccgaggagcccgagaaactggagaaggtcgtgctcgggaaagacatttatagcatcgtgaaagagaactcatttgaagtcaatcagttgaaagtgcggatacagaacgacaaacaacaccaagaggtcacaagtatcaccgttaacacattccctaacgtagatcgtaattatataaggcagatccgcgccatgatccatgcttgggagaagtttggtctggagtcaagcgaactcgagtatatcaacaaatacgaattcaaagctcgactcttttccggagatactccaaaatttaagcaagtcctgcgtgggaagatcgagttcctgggcatggtgaaagggaagaatgacaccatctacaaaaagtacctgacccagtacttggaactgaataaacgcgataagaactttttctacagactgttttcctggagagaaggtaatctatga

SEQ ID NO: 7917 - RNA, 1779 nt, synthetic construct
  source 1..1779: mol_type = other RNA
atgggaacaacagcccttagtagaaccgaagaggaacttaaagaggatttttacaagctgaagacgcgacaggatatcgctcagctcctggaaatctccgattatcagttgagataccacctgtatatatatcctagagacaaagcttacacaaagttccagataccaaagaagacaggtgattatcgcatcatttccgccccaattaccagtctgaagattattcagcgcaaagtaaaccagatcctgaaatgcatctataagtcaaagccatctacctacggatttgtcacaggcaaaagcattgtgactaacgctaaacagcacctgcgacagcggcacgtgcttaacctcgacattaaagatttcttccccagcattaatttcgggagagtgcgcgggctgctcatggcagtcccgtacagctgtacagaagaagtggctactattttggcgcagatctgttgtcacgaaaatcagcttccgcaaggggcccctacatctcccataatttccaatatgatttgcgcaaagctggattctcagctgcagcgtctagcaaaaaagtatcagtgcatctataccaggtacgcagatgacataacttttagtactagcaggactaagtttccaggtcacctcgcctggttcagtcaggaagctgatgtgctgattctcggcaacgacctcaagaacatcattgagaataacggctttatcgtgaacgattctaaactcaggctgtataaccggtacaaacatcaggaggtcaccggaattaccgttaaccagaagctcaacgtgaagcggtcatacattcgtcagatccgagcaatgctgcacgcgtgggaaaagtatggcatcgtaaatgccgaggttgagttttggaataagtttgaccggaaatctagcttcaaaaaggaccgcaagtcattcaagagtatagtcaaaagcaaaatcgagttcattggtgccgtgaaagggaaggacgatactatttacttgaacttcctaaggtggttaaaacggctggcccctgagttggtatctgacaaaaaactaaaccaatacagcgacaaactgctggagaataacttccgcttaaaagccacaatctggaccgagggaaaaaccgatatcaagcaccttaagtccgccctgaagtggttgaaatatcaaggcaaagagttcaacgttgagctagaatttaaggaagatctggacgatcagaagcagggcgacggcgaactgctcaacgtctgtcagcaattctgcaaagagaagaagattatcccaatcatcgccgtgtttgacagagatgtccctaatataattccccgcgttcatgacgatactatggggtttaaagtgtggggtaacggggtgtactcatttgctcttcctatccccttgcataggaaggaaaacaaggatatctgcattgagttttactacacggacgaagagatccaaaagttagacgaagacggacgtagaatttacttatccagcgagtttaattccaaatcgggcaggcatataacctttgatgttaataccacggacaaaaataagctgaagcccaatcaactcaagatcatcgacaatgacgtgttcgacaagaacaataaaaatatcgccctgtcaaagaacaacttcgcagattatattttcgaacaaaagtccggattcaatgactttaatttccgggcttttgaggaggtcttcatcatcatagagaagatcataaagtaccatgcggagataatcaaagagtga

SEQ ID NO: 7918 - RNA, 1776 nt, synthetic construct
  source 1..1776: mol_type = other RNA
atgggtacaattaatctatctttgactgaggaagaacttaaggaacgctttagtcaattaaagacgcgcaaggacattgccagcctgctggaaatatccgattaccagcttagataccacctctacatttaccccagagataaggcttataccacctttcagattccaaaaaagaccggggagtatagaaccatttcagtcccgcatacatcccttaaaattatccaacgtaagctgaaccaggtttttaagtgcgtttatcagccaaaacccagtacacaggggtttgtgaccggcaaaagcatcgtaacaaatgccaaacaacatttgaggcaacggtatgtgctgaacatcgacattaaggacttcttctcatctatcaacttcggacgcgtacgggggctgctgatggcatctccttacaactgtacagaggaaatcgccactgtcttagctcagatctgttgtcatgagaataagctgcctcagggcgctcccactagtcctattgtttccaatatgatctcagctaggctggatagtcaactgcagcggctggccaaaaagtaccactgtatctacaccagatatgccgacgacatcacattttcaacatcccgaccaaagtttccaggtcacctggcctggttctcggaagaggccgaaaagctcattataagcgacgacctcaaaaagacgatcgaagacaatggcttcatagtgaacgaatccaaaagtcgcctgtatagcaaacaccggcaccaggaggtgactggcataactgtgaacaagaagctcaatgtgaagcgcaaatatattagacagatcagggcaatgctacacgcctgggagaaatatgggttggacaacgcacaagccgagttttacaaccagttcgacaataaatcttcttacctcaaaaagcagaagagctttcagtacatcatcaagtcgaaaatcgaatttgtgggaacggttcgaggtaaggacgaccagatttacttaaactttctccggtggcttaagaggctggctccagaactggtcagcaacgagaaactgaatgtctataacttgcttgaaaaccagaacaaaagctccataaaagcgtctatctggactgaagggaagaccgatattaaacatctgaactccgcgctcaaatggctggaggatcagggccgtaaattcgacttcgagataaacttcaaggacgatctggaccctcagaagcaaggttctagccagctcttggagatgtgcaagcaactttgcaagaccaaacatcagcaaccgatgattgcgatcttcgatagagacgaacccaatataaccaaacaggtcaatgatgattcacttggattcaaaaactggaagaacggcatgttctcctttgctctgcccattcctcaacaccggcatggacagaacgatatttgcatcgagcattactataaagacaatgagatccagcgccaggacgtgaatggaaggaggctctttttgtcaaatgagttccacgatgaaacaggcagacacttcaaagacgatttaaattgcaccgaccgaaataagtacaagtacgatgggaaaatcattgatcaggatgtgtttaacaggaataatgagaaggtgactctgtccaagaacgattttgcagacaatatcttcaacaagaaggagaagtttgatgattttcagttcgaggcattcgaggaggtattcctcatcatagagaagatcgtgaaaagctatgccgaggaactacaggagtga

SEQ ID NO: 7919 - RNA, 1470 nt, synthetic construct
  source 1..1470: mol_type = other RNA
atgggcacaacactgctttcactttcaaaggacgagctgaaagacctgttctacaaactcaaaactagagaagacatcgcagccctgctgcagatttccgactatcaattgcgctaccacttatacatatatcctcgaaaataccctttgaagaaagcgtacaccgcctttaagatttccaagaagagcggcgggtcccgttctatcctcgcacctaatacgtcgctgaagattatccagcagaaactgaaccaggtgctcaaaagtatttatcagcccaaaccgtccacacatgggtttgttgtcgagaaaagtattgtcaccaatgccaaacagcacctgcggcagagatacgtcctgaacttggatcttaaggattttttcccgactattaacttcggccgcgttcgtggactgctcatctcacccccctacggttgtactgacgaggtggccacagtattagctcaaatttgttgctacgagaatcagctcccccagggagcgccaacctctccaatcatttcaaacatgatttgcgccaagctggatagccagctgcagagactcagtaggagataccaatgcatttatacgaggtacgctgatgacatcacctttagtaccagcaggtcccgctttcctccacatttgacctggttttcgcgagaggccgagaaagcaatactgggagacgaactgaaggcgatcatcgaggaaaacggtttcctggttaatgagtccaaggtcagactgcaaagccgctacaaacggcaggaggtgacaggaatcaccgtgaacgaaaagctgaatatcaatcgcaagtatattcgacagatacgtgccgtgttgcatgcatgggagaaatatggcttggagaatactgaagctgaattttggaggaaggataaaaagcacaggtttcaggctaacagtgactctttcaggaaaatcatccgcggacggatcgatttcatcggcacagtccgagggaaagatgatcagatatacctcaattttctggggtggctcaagaagctagcccccgatctggtgagcgattctaagctcagcttagcatcaccaaagattttgcttgagaatcagaagaagaacagacaagaagcagtgctgtggactgagggcaagaccgacatcaaacaccttaagtctgctcttcggtggctagaaaaccggaagatctcttatgagttcaagctcaactttaaggacgatctagacgaacagaagcaaggtgacgaccagctgttaaaaatgtgcgagcagttctgtaaggaggccagaagcaaacctataattgctatcttcgatcgggacaaaccagactatgtgaggaaagctcatgatgaaactcagggcttcaagatctggggttccggggtgtatagcttcgccatacccataccttgtcaccgccaagacgtacgggatatctgcattgaactttga

SEQ ID NO: 7920 - RNA, 1806 nt, synthetic construct
  source 1..1806: mol_type = other RNA
atgaatactacgtttctgaacctctctgaggaggaactccgggaggagttttgtcgactgaggactcgggaagatatcgctaaactttttcagatttcggattaccaactgagatatcacctgtatgtcaatccatctcagaaggcctacgtgatattcgagatcaaaaaaaagtcgggcgggattagatccatcagcgcccctaaaacagcactgaagattatccagcacaaaagcaatcagcttttccagagcgtgtataagcccaagccttccacacatggctttacctccaacaagtcaatcgtgacaaacgctaaacagcacctccgccagaggtatgtgctcaatttggacttgaaagactttttcccaagcatcaacttcgggcgggtgcgtgggctgttgatggcgaatccatacaattgcactgaagaggtcgcaacagtgtttgcccaaatttgctgtcacaaccagcagctcccccaaggagccccctctagtcctaccatcagtaatatgatttgtgctaagctggatacccaactacaacgtcttgcgaagaaatatcagtgcatttactctaggtacgccgatgacatcaccttctccacttcaagatcaagatttcctagtcacttagcctggttctctcgcgattctgaaaaattgaacatcggctctgaacttaaagatatcattgagggtaacggatttcagattaacgagtcaaaggtaagactgcagaaccgctacaaccaccaggaggttaccggaattacggtgaacgagaaactgaatatcaagcggaagtatatcaggcagatccgtgctgtgctgcatgcatgggaaaagtatggtcttgagaacgccgagatgattttctggcagaaatacgaaaagcatcggcatacagaatttaaccctgactcatttcgacaggtaattcgcgggaggattgagtatgttggcagcgttcggggaaaggacgaccacttgtacctgaagctgctgcgatggctctctaagctcgcaccagatctagtcaacaaaaccaagtttgacatcgccaatattaacgagagtagtgaagagcaaaaggatctgccccaagtgattatatggaccgagggcaaaacggacatcaaacacctgagatccgcgcatagatggctgcagaataataaaactacccgatacaagatagagatcaaattcaaagacgacctcgatgaccaaaagcagggttccccggaactgttaaagatgtgtgagcagttctgcaaagagaaaaggaacaaccccattatagccatatttgatagggatgaacctgatctaatccggaaagttcacaatgagactaccggctttaaatcctggaataatggggtatacagcttcgcaatcccaataccccagcacagaaaagacaatcatagcatttgcattgagttctactacaaggacgaagagatcaagcggcatgataacgacggccgaaggttattcctcagcaatgaatttaatccgatctcaggacgccacattatagaccgcgatctggtgacacaggaaaccaagaagatcaagaagaacgagatcaagattatagacagcaatgtcttcgacagcaatgacacaaatgtggctttgtcaaaggataatttcgccaactatatcttacaggagagtgctaacttcaatgatttcgacttcaacccatttcttgaaatattcgaagtcatcaaccgcatctccaagcaccatgaagagaacatcaagtccgaacacattactcattga

SEQ ID NO: 7921 - RNA, 1758 nt, synthetic construct
  source 1..1758: mol_type = other RNA
atggagtccaatgacggcattaaacagctgttgggcggactggaaagtcgacaagacgtggccaccctgctggacgtgacagaccgccagctgaggtacctactgtactcaccacgttataagaaatacgagaagttcgagatcaagaagaagatgggcggagtaaggctgatttattctccttcccatgcattgaagaacctccagagacgcctcaacgccattctgcagcaggtgtaccagccaaagccctctacttacggttttgtgaaagggaaagggatcgtgaaaaacgctgaacagcacctaaggcagaagtgtgtgctgaatctggacctcaaggacttcttctctagtatcaattttgggagggtgcaggggctgctgaaggcagctccgtataatctcctccacgaggtcgctacagtcctggctcagatatgctgccatgaattcgaggtggacgggcagctgaatagaagactcccacaaggcgcgcccacgtctcctgttatttctaatatgatttacgcgcccttagatagccagttgcaacgcttggccaaaagacacaaatgcatctacacccgatatgcagatgacattacctttagcactagcaaatcaaagttcccctcctctctcgccttttactccgtgggcgatgagaagtggttgctaggcaaggagctcctcgaggtcgttgagggtaatggatttagtgtcaacgagaaaaaaacaaggctggccaccaagtaccagcatcaggaggtgacagggatcacggtaaaccaagatctgaatgtcaaacgggattacgtgagagagatacgctctatgttatacgtgtggaggactcacggtcttgaaaaagctgaagctaccttcctcgaaaagtttgacaagaagcaccgtcttaactctattacaccctctttccggtccgtagtcaaaggcaagattgaatttctgggaagtgtgaagggaaagagcgaccccatttatctgaaatttaccgacgaactcagggtgctggctcctgaacttgtcagcatagataaattactgaactcccctattgtaagagcccaaattatgactgaaggcaaaaccgatatctatcacttgagagccgcgtttagcaatctgcaaaagaaaggcctgttcctatcactagcaatcgatttcgtagatctgccacctgaaaagcagggagattccaaccttgagaaacactgcgagagcctctgtatagttactccccagtttccagttattgccatctttgaccgcgacaacagcgctatcttaaagaaggttcatgacgacagtaaaggctttaagagctgggggaacggtgtttattccttcgcccttcctgtgccgtcccatcgccatgaggatccagaggtctgtatcgagctttattactcgaatgaagaagtgactcgattgaacttacaggatcggcggctttttctgaattcggagttcagcaaaaaatcctatcggcatagcgaaaacaagatactgtcaaccacaaagttcaacgaagtgaagaataacagccttaaaatcatcgatagtgaggtccacgatgacgcagataacaacgttgccttgtccaagaacgacttcgccaagtgtatcctcaattcaaatccgggattcgacaattttgacttcagtgaattctcagcaatcttcgaggtcatcgagaaaatacttcagcggcacaatctggattcagcagtgtga

SEQ ID NO: 7922 - RNA, 1839 nt, synthetic construct
  source 1..1839: mol_type = other RNA
atgggaaataagctggaatacaacgcaaagtacctcgcatttctttttttgctgacagatatggggactacttccctggatctgccgcaagaagagctgaagaaacacttcgagcagcttaaaacccgacaggatgtcgcgcgacttctccaagtgtcggactaccagctgcgttaccacctttatatccatcctcgcgacaaggcctataccacctttaaaattcccaagaaatcagggggacatagattaattacgacaccccagacgtctttgaagattatacagcacaaactgaaccaggtactgtcctctgtgtaccaggtgaagcctagtgtgcatgggtttgcaatccagaaaagcatcgttacaaacgcaaagatccatttgaaacagcgatacatactcaacctggaagatcaggactttttcccaagcatcaactttggtcgtgtacgtggcctattcatcgccaagccctataattgtacacaggaagtcgccaccatcctggctcaaatttgttgctacaataaccagctaccccaaggcgctccaacctctcccattatctcaaacatgatatgtgccagactggactcccagctccaaaagctggccaaaaaatataggtgcatatataccaggtacgccgacgacatcactttttctacttccaggttcaaatttcctcaccggctggcctatttttcccaggatagcgagacattcgtgctcgccgacgaattgattactgttatcaaggacaatggtttttctgttaatctatccaagctgaggctccagaataggtatcaaagacaggaggtgaccggcataatcgtcaacgaaaagttaaatgtcaagcgcaaatacattcgccaagttagagcgattttgcatgcttggaaaaaatacggattagagaatgccgaagctgagttctataaaggattcaacgagaacaacaataacatgaaatcaagggactgctttcgcaagatggtgcaaggcaaaatcaattttattggtttagtgcgcggagataccgaccacatttaccttaagttccttaagcagcttaaggttctcgtccccgacctggctgacgattccaagatcaacttcataacaagcaagttatctgagatcaaatcttcaaacaacctgcacaaggccataatttggaccgaaggcaaaactgatatcaaacatttgaaggtggcatggaagtggctaatcaacaaaaaaatagtcgactacttcgatctggattacaaggatgacctggagccagataagcaggggtcaagtcaactgtttgatgtgtgcaagcagttctgcaaggagaaacggaatattccactgattgctatcttcgacagagacgagcccaatattatcaagaagattcacgacgatagtcaggggtttaaggactgggataatggggtctatagcttcgctctccctataccaaagcaccgccaggatgtgaaggaaatttgtatcgagcactactatcaggattccgaaattaaacggaccgacaaaaaaaacaagcggctctttctgagcaatgaattccatcgggagtcgggcagacatttgagcaagcctcagctcacaacaactgacaataagttcaagagtaaccagctgaagatcatcgatggcaaagtgttcgatagcgacaataacaacgtagccctcccgaaagacgatttcgcaacgtatatctatgacaaagaggagggtttcaatgactttgatttcaccgcgtttaaagaggtgttcgagatcatcgaaaagattctgaatcggcactacagtcagtga

SEQ ID NO: 7923 - RNA, 1746 nt, synthetic construct
  source 1..1746: mol_type = other RNA
atgagcacggagctgttcgcttcgaacgaggtccttatcgctgcattcttccagctaaaaacccgccacgacattgctaaacttctggaggtgactgaactccagctgaactactatctttacattgtccctagagacaagcgatataagcggttcgagatacccaaaaaacacggaggttcacgggaaatctatgcacccgcaactgccctgaagatcattcagcagaaactcaatcaggtcctccagtctgtgtataaggtgaagccctcagcccatggatttgtccagaagaagtccatcctctccaatgccatcccacacgtgagcaagagatacgtccttaatctggacctgaaagacttctttccgagtataaacttcggaagggtacggggattatttatggcgccaccgtatctacggaataacgaggtcgctaccaccctagcccaaatttgctgctttaatggctatctgccgcagggggctcctacaagccctatcgtaagtaacatgatttgttccaagctggattcacagttgcagaagttagcaaaaaagcatcgttccacctatacaaggtacgccgatgacataaccttttccacatccaggcccaaattcccatctgggctggcttactttctggaagaaacgggcaagttggagatcggcgatgagcttaaagcgctcattttggagaatgggttcgagatcaatgagaggaagaatcggctccagccttactcaaaaagacaggaagttactgggctgactgtgaatgtctttcccaacgtgcgccgagactacgtgagagaaataagaggtatgttacatgcctggcagcggtacggctacgatgcggctgagatgacatatagggaaaaatatgctggcaagcacccagaaagcaagcgagagcagatctcttttaaacgcgtcgtgcaaggaaaactgaactttctcaaaatggtgaaaggcgagaacaaccgcgtttatgtgaatctcgccaaatggttttggcaactggccccagagttcgcccagtctgaggtgttgacccctctccaccttcccaagccaattattttcaccgagggtaaaacagactggaagcatttgaaggttgctttcactagtctgaagaaaatggggatgtttaccgaattggatgtgcaatttcatgaatttggagatgacgtgcagatgggccacggggaactgttaaagatgtgtaaggcctactgcaagagagaaaaccggcagcctaacatcttcatctttgatcgcgacgtcccagcagtggtgaacgaagttatggaaaaagacaaagactacaagaactgggacaataatgttttcagtttggccgtacccattcctgcccacagaacaaacactacagatgtttgtattgagctgtattaccaggataaggatattaagcgcaaagatggcgatgggcgtaggctgtacctgagcgatgagttcgacagcaacaataactcacacaagcaacaaaatgacgtgtacactctgtctaacaagacccgacgcctggtgggcgtaaccattgttgacagtcaggttttcaatttcataacgaaggaaagcgtcgcactttctaaagactccttcgcagagctgatcgccaacgacgatcccaatttccataacgtggactttagcgagtttggtaagatcttcgatgtgatcgtaacaatcctcagggagcaccaatga

SEQ ID NO: 7924 - RNA, 1731 nt, synthetic construct
  source 1..1731: mol_type = other RNA
atgtcgaccgaactctccgcctccaaagatgagctacgagcgactttcttccagctgcaaactcgacaggaaatcgctgaaatgctcgacattcctgagaagcaactcaactactatctgtacattttgcctgagcacagaaggtataagaggtttgagatctctaagaagcggggaggcaaccgggaaatcttcgcccctgcgacggctctcaaggtcatacagcaaaagctgaaccaggttctccagtctgtctatgaggtgaagcctagcgcacacggcttcgtaccagagaaatcaatcgtttccaatgcacagccacacgcacgtaaacggtatgtcctgaacttagaccttaaggacttttttcccagtattaatttcggacgcgtcaggggtttgttcatgggctatccctatcacagaaaccatgaggtggctacaactcttgcccagatttgctgcttcaaatcttatctgccccagggcgcgcctacgagtccaatcgtgtcaaatatgttgtgtgctaaactagacgctcaattacagcgtcttgctaagaaataccggagcacctatacaaggtacgcagacgatattacattctccacaagcagaccaaattttcccagcgccctggcctacttcagtgacgatactggcaaaatcgaaattggagacgagctgaagagtataattcaggagaacgggttcaagattcatgagcggaagtctcggctgcagcccaacagccgaaggcaggaagtgaccggactaacagttaatgtatttccgaacgtaaagcgtgatttcgtccgggagatccgcggaatgttgaacgcctgggggaaatacgggtacgaggccgctgaacagatttacaggcagaagtacgccggcaaacatccagaaaatgaacgcgagcatctgtcctttaagagagttgtgcagggcaagctgaactttcttaaaatggtgaagggggagaataacagagtgtacctgaacctgattaagtggttttggaaattggcgcctgaactggcaaaacccgaagtcatcgcacccctgcccctggtcaagcccatggtgtataccgaaggaaagacggattggaaacacctgaaaacagccttttatgcactcaagaagatgggtctgtttgagcagctcgatatccagttcttggagtacggggacgagactccaatgggcgattcagaactgttaaagacatgtcaagggggttctaaaatgctgcacgagactcctcaaatctttatcttcgacagggataaaccagacgtggtgaagcatgtgaccgacaccgacaaaccgtacaaagtctggggtaataatgtgtttagccttgctataccgatcccagcccaccgcgttgacatcaacgatgtgtgcatcgagttttactaccaagacaaagatataagacgatcggatgaaaacggacgcaggttatatctgagtgacgaattcgattccaagaacggcaagcacaattcactcaacgtctacaccagaagcgagaaaatacgcaagatcaccatcatagattcacaggtgtttgattttgccggtgccagcgttgccctctccaaggacatgttcgcagaactcattgccaatgggaatcctcagttccagaatgtggatttttccgagttcggcaaaattttcgacgtgatcgtagctattcttagagagaattcttga

SEQ ID NO: 7925 - RNA, 1749 nt, synthetic construct
  source 1..1749: mol_type = other RNA
atgaccctggtcctcagcgctaaaccggagaacctccgcaagggtttcctgtccctgcagagtgccaaagacatcgcgggcttgttggagattgacctacagctgctctattatcacctttacatacgtccagaatcttctaggtacacttcatttgagatccctaaacgcagtggcggaagccgaagcatcttggctcccattagcgcgctcaaaattatccaacggaagctcaaccaggtgctcctgtccgtctactccgtgaagccaccagtgcactcttttgttctgggaaaatccatcgtgacaaatgcatccgtgcacgtcaaacgcaattacgttttaaacgtagacctgctggacttcttcccaagcattaattttgggcgagttcgaggcctgttcatgggcaaaccctactgtcttaatcccaaggttgcgacaattttggcacagatctgctgctttaagggcaatttgcctcagggagctccaacatcacctatcgtgagtaacatgatatgcgctagaatggattctcatttaacccagctggccaagaagaatcggagtgactatacaaggtacgcagacgacattacgtttagcaccaacaagggggtatttccctctgattttgccgtcataaacgaattagagcagctggaacttgggaaggagctggtcagaatcatatccgataacggcttccagatcaatcatactaaaaccagactccgtagtcgcaagcagcggcaggaagttaccggcgtcacagtgaacaagtttaccaacgtgcgtaggagctatcttagatctattagggccatgcttcacgcctgggagaagtacgatctggagaaggcccaggagaagttctggcatgattatgataaaggcaaataccggtccccatacaaatcaaaaccttcattcaagcgcgtggtgagaggaaagattgaatatctcggtatgatcaggggcaaggacgaccctctgtaccagcggctactggggcaattgcgagtgctggctcccgagctggcaaaaaaggctaagaagattcaacctgtgtatctgcagggctcacaagccattgtgtatactgagggaaaaactgacatcctgatattagagactgcatggaaaaagctgtatcccgacaagctgataccttttatcctcaagccttgcgactttaacccggcagacaaagcacacgggacgggaggtgcctctttcttgtccaattttataaagtacgtctcccccgatagtcccaatgtgattatcggaattttcgacagagatcatgatggcattagggcctacgagggtattggggaaagcttcccagagaaaaagggtctagggtcaaagctggctaaacacggcaaggccggagccatccttctccccatcccaaaaggcaaggaaaagtatgctaagtataagaacctctgtatcgaattctacttctcggaaaaaacactaaaccggaaaaacgagggcggtaaagggttagactttcaatttgggacggaggccatccatgtagccggaaaaccagcatcgggaagcaagcccagcgctattagagaaacccgcaccatcatcagggggaaagatgtcttctctaatgatattgtacctcagctcccgacatcagcgttccggaatttcaaacttctgttcgatgtgatcatcgctacccttgaaaagtgtaaaactaaggttgcctcccactga

SEQ ID NO: 7926 - RNA, 1569 nt, synthetic construct
  source 1..1569: mol_type = other RNA
atgtataagatagaactgtcagctaatcccgaaaagctgaaggctagattcctggctctcaagaagcctgaagatatagccgagctgttagaggttagttacaaagactttgtgtactggatttataggactccagagaaataccggtatgtgtctttcactatccctaaaaagcatggcaccccacggtatatcgacgccccaaacaacaacatcaaaatcctgcagcagaaactcaactacatcttgcagattgttttctctccaaagtattgcgtacatgggttcaccaacgggaggtcagtcgtgacaaacgccagaaaacatgtcggacgacgttacgtccttaacatcgatctaaaggacttctttccatccattcattttggccgagtaagaggaatgtttatgggcaaaccctataatctccccagcaaagtggcaacgtttctggctcacctctgttgttataaaaaagtgctgcctcaaggcgcaccaacaagccctgtgatctccaatatgatttgcgcgaagatggattctgagttgcagagacttgctgccagcaaccgttgcagctatacaaggtatgccgacgacatctctttcagcaccagcaaacactcctttccatccgcccttgccactatcaacgatctggggcaggtggaagtggggaaggaactggttaggattatcactgaaaacgggtttcaaatacaccccgaaaagatatggttacggcggaaggaccgcaggcaggaggtaactggtatcatcgtcaatgagcgcaccaatctaccccgcaagttcaccaacaatattagggcaatgttgcacgcatgggaaaagtacggtctggaaagtgcccagaagcactttgaagaaaagttcgataaaaagcacagagcgccctggaaaaagaagcctaggttccaagatgtcctgaaaggtaagattgagtacctgggcatggtcaagggtaaagagagctccacatacctgcgttttttagaccagttaggccggctcgctccgaagcttacaggaggacgcggcacgcctcaagatctcctgttccgcagataccaggcgctcttgaaatctgacgatccccagggaagaggctacctgctgcagtcactgctgcatgatgtgttcacttttctgaacgttacgatcgagaagagcttcaccagaaatcggaatggcgagcaaattgatggagcctttatttttgaggggtggcattacattgtggagtgtcggtggcgcgagaaagtgagtgacatccgacaggttgatgggctattgggccaggtcctgcgatccgggaaacagaccatgggagtgttcttcagtattaatggatggtcccaaaatgtgccgacccttttgaaacagaatccctcaaagagtatcattttgatgcacggtgacgacttccacgcccttctttctcagaagatatccctagataagctcctcaagggcaaaatttcggagctcaacctgaaatcggagccttttatctcagcagaagagataatcaagaaagacgacacatga

SEQ ID NO: 7927 - RNA, 1452 nt, synthetic construct
  source 1..1452: mol_type = other RNA
atgtcgctgtggctcgctgatccccctcatgtgctgaaagcccggttccacgcactgctcaggccatttgacattgccgcactgctcgacgtgcctttcggagactttttttactggacttaccgtgtcccaccaagcaggcggtacactactttttacatcgaaaagcatagtggcgcccctcgcagaatcgatgctcccgaattgaacattaaaatcctgcagcagaagctgaatcaggtgttgcgcgctgtgtacgtgccaaagcgctgcgtgcatgggtttgtgccgggcagatcagtgttaaccaacgcccaagcgcatgccggcagacgtcacgtcttcaatatagacctcagagacttttttcccagcataaatttcggccgggttagaggcatgttcatgggtaaaccttatcggctcccgccaaaagtagcaacggtgctggctaatctatgttgtttcgatcgccggcttccacaaggggcacccaccagtccagtggttagcaacatgatctgcgctcgcatggactctcagattttgggactggcgtatagacacaggtgcacatacacccgctatgcggacgatatgaccttctccacatctagacgacctttccccgctgaaatggccacacttaatgacctgggccaagtggccgttggagctgaactgcggggcatcattgagggcaatgggttccgggtccatccagagaaaatctggctgaggggtagggatcgaagacaggaggtaaccggactgacagtgaacgtagagccaaacgtccgccgacggtatgtgaaccagatccgtgccatgctccacgctgccggtaagtatggcctgccatctgcacagtccgagcgagagcagaggtacgaccacaaacatcgcgcaccctggaatgaccccccttcatttgagcgggcgctgcagggaaagattgaatatttggggatggtcagggggcacgcctgtcccaagtaccttaagatgctggatgatcttgggaggctggccccgcacttattcataataagaggaacccccagggaacgcttgctccggaggtaccgggctcttctaacatctccaaaccatcaggccagggggtatcagttgcaggcactcttcgaggaaggagcaagacctggtagagccggccgcggtggaattagtgccactcctgatcgtggcggtatctgccccggaacgccatcattacgggggcgcacacttgcccctaggtttcctgccagccatcctaccactgctaggggctccgagggccatgttcaggctccctacgaatcccaccctcgaccgagaatccaacccaggcacgggccggttgacgagcaagtagagcgtcacgagaagagagcagttcaccgacaccccgcgcgagatgaaattgtcgtccccgtgcaccatagctga

SEQ ID NO: 7928 - RNA, 1536 nt, synthetic construct
  source 1..1536: mol_type = other RNA
atgtctgacggacctccaagcaagccactacctctccccctctcccctacactcgcgaaaagcgatgccgacattaaagcagcctttcgggtgttacagtctgtgacagatgtggccgacctgctggaggtacgggagacacagctgacatacgcaatttggcgcacaccggaggagaagaggtacagcacctggagtataagaaagaggtccggcggcacccgcactattgatgctcccaggaagacccacaagatcctgcagcgcaagctggcttatgtcttatccctggtggcccagagaaggagcgttgctcatggattcagccccggtaagagtatcgtgaccaacgccgccgcacatgccaggtgtcgttgggtgttcaacgccgacctcaaggagttctttccaactatcaactttggccgggtacgtggaatgctgatggggaaaccctaccgggtgggggaaagagcagcaacggcaatcgcacagctgtgttgccataaaaggttgcttcctcaaggggcccccacctcacccgtaatttccaatatggtctgtgctcggttggatggagagctgcgaagactggcagagcactacgggtgcaattatactcggtacgccgacgatatcacgttctccacgaacaaaaagacatttccagaagaactggcgactcttataggcgaaggaaccaaggctgccgtgggctcagccctgtctcgagtcattgagagcaatggattccaggtgaatccagacaaggtccggctccaaggcaaacgcactcgccaggaggttactggcttggtggtgaaccgcaggcctaatgtcaggcgtgcattcgttcgacaaatcagagctatgctgcacgcctgggaacggtatggctacgacgccgcccagaaggagttcctggataagtatgatagcaaacatcggccggacggggcctcaggtagaacctacgaacgagtcattaggggcaaacttgccttcctcaagcaggtcagagggaaggacgacaaccgatacctagcaatgcgtcgcagattgagaagattacttggtgaagtggacgctggcgtcggaaggggtgtcgaaatggagtacgatgtctttatttgccacgcatctgaggagaagacaacagtggtggttcctttggctaaagctttaaatgacgctggcatacgcgtgtggctcgatgaggagaagataggatggggggactcagtaaccaaagaaatcaatgacggtctggccaaatccaagtttgttgtagtggtgctgtcggcggcatttatgaaaaagaaatggcctgctaaggaaatgaacgcggttctcaacaaggaaatcgcctctgacattacctgcgctctcccactgatcgtgggcgattcgagtgataaaaagatcatccttgagacttatcccttgctagctgataaacactataaagaatggtccccgtctgatatcgggaccattgttggggcgctgaaagctatgcttagtcgctatgcctga

SEQ ID NO: 7929 - RNA, 1635 nt, synthetic construct
  source 1..1635: mol_type = other RNA
atgcaggtgcggttgtctcagtcctcagcagacgagctgagaaggcgatttttcgcatgccggacagccagagatgttgcccgtctattggaagtcccatattcggtactgcattatcacgcatgcaaatccccagtgtccatccgctacgaaacctttacggtgccgaagagtacagggggctcacggcaaatccttgccccagccaccgccctcaagttgctccagcgcaagctgaatgtcgtgctgcaggctgtgtacaggccaagaccgagcgcacacggctttctgcccgctagatctattctgacaaatgcccgctgccacagcggacggtcatacgttctcaacgtcgatctggaggacttctttgggagcataaacttcggcagggtgagggggatgtttatggctcgtccatacaacctcggcgagggagctgccaccgtcatagcccaactttgttgtcatctgaatagactcccccagggagctccaaccagtccaatcgtggcaaatatgatatgcgcccggcttgatggcgagctgcagaggttagcgattcggcaccgatgtacatatactagatatgccgacgatctcagcttctcctgtcacagccatacattccctgaagccctcgctacctactctcctgggacaggaacctcggccagagttgggcccgagcttagccgagtggtgcaccagaatggcttccgtcctaaccccagcaaagtcaggctacaaaggccctctgagaggcaggaggtaaccgggctgattgtcaaccgggatcccaatgtacaccgcacgttcgtccgccaagtgcgcgcaatgctgcacgcgtggcgaaaattcggtctggaagctgccgaggctgagtttattgccaagtatgggtggagacacagagcaccggaacgggcgactccaagatttaggcgagtagtgaagggcaaactggactttctgcgcatgatcaggggaaggtatgaccccctgtaccgcaaattgttgcgcgaatactgcaccctttccgatgagcacttcgaagaagcccccaccgcccctactgtagaggccttgattgcacgggctgtttgggtcttggaatgcgatatctgtctccgccagggtacggctttttacctgagaggcaacggattagtgtcctgtgaccatgttgtttgcgaccacatccgggctttccggccagatgcacctggaactaagttcaatatcgacattgtcggacgacattctgtggttgacttagctgttctgcgactgagggatgccgacttttcagacgatggattacgcgctggtacagcgagtgctctccagaccggggacgaactaactgtttggggctttcccaatttccgtcttggggatactgtgcaggtgcatcctggcagggtggcgggattccgtcaggtgtctggcatcagacggattctggtgtccgcacctatagtgcggggggcaagtggtggtcctgtgctcaacaggagaaacgaggtgatcggcgtggccgtaactggtgcagagacaatggaaaccgcccatgagacagaggaccatggcgtccttcctatcaacgccctggagcacgtccccctgcgctaa

SEQ ID NO: 7930 - RNA, 1614 nt, synthetic construct
  source 1..1614: mol_type = other RNA
atggagataaaactgagagcggatgacagtacactcatcgaaaagttcattgccctccaaagcagaaaagaggttgcggaccttctggagattgatgtgaagaccctgatctactttttgtacaggagaaaggacaaggacaactataaaatcttctacctgaggaagcgaagtggcaaagaacgaactatttgcgcaccgattaactccctgaagattatccagcgaaagctgaactacatcctttccctgatctacaaacccaaaccttctgcccatggattcattgtggaacggtctatcttaactaatgcccaggcccaccttaagaataataatatgctcaacgtcgacattctggacttctttccaaacatcaatttcggtagagtaaggggaatgtttatggcaaacccttacaatatccctccggaacccgccactgtattggctcagatatgctcttgtaacaaccagcttccccagggggcgcctacttctccaatcatttctaacatgatttgcgcacaattagattcccagttacagaaactggctaagaagcattcatgtacatatacgcgctatggggatgacctctcgttttcgacatggcaatacaagtttcctaaggaactgggatacaaaacaaaaaccggcgaggtcatcgtgggaatttccctcgagaagataattaggcagaatggcttcaaacacaacaaagataaagtgaccttgaagagccggaaatcacgcctgtcagtgaccggtctgattgtgaacgaaatcccaaacgtgcccagaaagttcgtgcggcaaattcgggccatgctacactcttgggagaaggatgggctcatcaaagctgagcagatccacctcaataaatatcgctataaacagaagaacccgaaggcatttcaacctaaattttcaaacatcgtccggggaaagataaactacataaggatgatcaagggagaagagaatccagtctatcagaagctggccagcaaattcaatgatctcaacgggggtggttttcccaagtattaccacaatttgcgcgaggaactagaagccgcagtgtggatcatagagggcgaaggcggaaccaaccagggcacaggcttcatgctagaaggatttggaatgattacttgcgctcatgttctgaccaagtccatggaggctttccggtgcaatgactatgggaacaagttccccgtggagatcatttcctatgataacgagaatgatgtagccgtcctgaagataaagggcaatgagaattatcattacctccgtgtgggcgattccgacgagatcgacgttgggagtgagatcaaattgagtgggtttcctaactacaacattggggatagcatatatatcgacgatggcaaagtcacgttgtgtaggaaaagcctgggtcgtaccagataccttataagcgctcgcattgttaagggtaacagcggcgggccagtccttaataagaataatgaggttattggcatcgctgcaaagggagccccatgtttcgaagacaagaatatggacgagaaatttgaggtgattccaatcacaatcatcaatcccgaacccctgtga

SEQ ID NO: 7931 - RNA, 1656 nt, synthetic construct
  source 1..1656: mol_type = other RNA
atgagaaataggttggacattcaactaagaaagaacattgatgaggccgtcggggagtttcaaagcctttccagtccgcacgatgtggcggccctgctagaaattccctataaggtgttgaatttccacttatacgtcgcccacccaacccgtagatacaagacatttaccgtgcataagaaatctggtggggttagagagatttgcgcacctgtgactgctattaagatcatacagcagaaactcaactacatcctgcagaacctgtacaagaccatatataagaagaagttcagtgttcacggtttcatatatgggaaatcagtgagaaccaatgcgcagagccacacgcggaaggactacgtgttcaatatcgacctgctggatttctttcccagcatcaatttcgggcgggtgaggggcatgtttatggcaaacccatataggctgcctcccaaggtagccacggtcctcgcccagatttgctgttttaacaatcagcttccccaaggggctcccaccagccctatcatctctaatatgatctgtgcgaggatggacgacgaactgtatcgactggctaaacggttcgattgtaaatacacacgctacgttgacgacatgactttctcaactaaccggcctaacttccccgccgaactcgcaaacgtcacccgtttggagagtggctggcgactgaaagccgacgtaggaaaagaactcaacaaaatcatagaggagaataagttctcagtcaacacgtccaaagtttggattcagcaccgcaactgccgacagaaagtgactggcttaatagtaaacgagttcccaaacgtgtccagaaagtatacaaatcagattagggctatgctgcacgattgggataaacatggcctcatagcagccgaaaaccggtttgtgaatgactacgataagaaaaagcgatggccatacgagccaggtatcctttttaaaaacgtcgtgaaaggaaagatcaactttttgaagatggtccggggcgaccgcaatcctacataccagaagttctccgagaagttggcctccctcgatccggatttttctttcatcagaattgttagggaagctgacagcgacaatctgcagcaggccgtatttgtgcttgaatcaccaagagggcaaggcaccgcttttatgctgcgtggcatcggcctagtgactagtgcacataacttaaaaaacgacaagctggacacatatctgtacaagaccgatgaaccagcagacaaacagcggctgaaggtcaagcatatcaatacaaacctcgactttgctatcattgaggttgctcaaggttgggcaaaagcatctctggttaggggagattcgactattcttaagaccagggacacagtgaaggtgatcggatttcccaattatgccaaaggaaagagcattcatattcacgacggaaaaattaccggccgcggacgctggttcaaagtcaagactctcaatgtgagcgctcgcatcatatatgggaactccggaggcccggtgctgaatgataagaatgaggtcgtgggtatcgcgttctacggcgcccctgatcctgagaaagccgatcgcattgaatctggggtaatccccatcgagatcttggataaactcatgtga

SEQ ID NO: 7932 - RNA, 1743 nt, synthetic construct
  source 1..1743: mol_type = other RNA
atgtcgattagcctcgacgcaagtgaagaggagctgcagaatgacttccataacctggaggatttggaggatgtggctgatcttttggatgtggagtcctcgaaccttatttatcatataagagagagcccagaggagggacgatataaaaccttcaccctggacaagtcaggtggcggggagcgtgagatcagtgcacccgtgagcgcactcaaaatcatacagcagaagttaaaccagattttacaggccgtctacacgccgaaagccgctgtgcacagttttctgcccgacaggaatattcggacaaacgcagaacagcatgtcaaacagagatttgttttttgcgtcgacctcaaggacttcttccacgagattaattatggaagagtctggggccttttgcaggccgtgccttacgaactgcctgaggatgtcgcgaccgtgctggcgcaaatctgctgtcataacaatagattgccgcaaggggccccaactagccccatagtgtcaaatatgctctgtgcacagctggactctgaactgctgcgcctcgcggaatccaataaatgtatctataccaggtatgccgatgatctaacctttagcacatccatgcgccaattcccagacgaactagccaccggaggggaggatggaaacgtgaaggtggggaaggagctgagagaggtagttgataagaatggtttcgaactgaacgaggacaaaactcggctacaacacgaagattacagacagatggttaccggcctgatcgtgaacgaaaaggtaaacgtgccacgagaattcgttcgagagattcgcgccatgctgcacgcatggaaagcccacggctacgaagctgctgaggaagaattcctgagggaatatgacacgaagaatcggaagtccgagaaagaggagcctgtgttctccagggtgatcagagggaagcttgaatttctgtcaatggtaaggggcaaggatgacaagatctacaagaaatatctgacagagtacagtaggttgtctaacacgcctattaatatcgacaatcaggaggagcctgaaaacgacacatctaaactcatcgtgtacacagaaggcaaaacagactggaaacacctaaagcgggccattcgcgaactggctgtcaaccagtccagtgaacttcccgatctcgagttcaacgaaactgagtccgatcgcggcgacgatgaactccttgagaaatgccgacatactagcgagtcagaaggccagcaccagcacgcacacgttttcctgtttgaccgcgatcagccaaatcaggtccaggaagttactgaggatgaccaaagttttcgttcatgggggaataacgtgttttctgccgctatccccccacccccccatagagaggatgtcaacataagcatcgagttgtactacgaagatgacgaccttctcaaaagggatggaaactctcggcggatatttttaggtcaagaattccacaagacctcaggaaagcataaagaagaggccaagatcaattgctctctgctgaacaagactggtgacgaaaaccgtattattgacgatcgggtgttcaatgaggagaatgagaacatctccttaagcaagaatgacttcgctgagtacattttgaacgaggaacctccttttgacgatattaattttaagcccttcgctaggatctttgacctgctcagcgaaatcgaggagcgcgtagactcttga

SEQ ID NO: 7933 - RNA, 1590 nt, synthetic construct
  source 1..1590: mol_type = other RNA
atgatcacagaactgaccgccccggatatagtgctgactgacaagttttttgccctggcaagccccgaggacgttgcagatttactggaactgaaatcctatgcctttcttcagcacttgatttttatattgccttccagcaagcgatataaggaatttgtcatccctaaacgtcgtggcgggaagagatacctgctcgaaccttcacccaaccttaagatcgtgcagaaaaagctctcttacgtgcttcagctggtttacaaaccaaaacggtcagtgcacgggtacgtcaacggtagatcgattgtgactaatgctattcaacacgtgggacgacgatatctcctgaacattgacctggaggacttcttcccgagcatccactttggaagggtgcggggaatgttcatgtcatatccatacaacttcaacggccgtgttgcaacaacactggcacagatttgttccttgcggaattgcctaccccagggggcgccaacttctcccatcataagtaacatggtgtgcgccaaactagactcagagttacagaaattagccaaacaacatcgatgctactacactcgctatgccgacgacctgactttctccacctccatcaaacagttcccaacagccctggccgtatctattgtggaggggaaacgcctcagggtggaggctggcaacgagctgtccgaggtgatcaataggaacggcttcactatcaacgttaagaaaattagactccagaagcattctcagcggcaggaggtaaccaaccttaccaccaacgaatttgtcaatgtcaatcggaagttcattagacaaattcgcgcaatgcttcacgcctggcgcaaattcggatatgtggctgccgagattgagttcaggaacgaatacaataaaaagccacctaacaagccatacaagaaacagcctagcttcaagaatgtcatcaaaggcaagatcgagtttgtacagatggtcaggggtaagaatgatcggatcttcattatgctcaataatcaagcagcccagttggaacgcatccagaatatcgagccctatcaattccaaatactggaggatgaagaccatgagattgtaagcctgatagcgtctggagaaaccgagtgggtggaatttaaggaaggggcttgtttagaccctcacacaggcgagaacaacaagaagaacatgtctcataagatactcagagctgttgcatccctcattaacagtaaggttgagggcagggtgctgattggaatcaaggacaatggtgctatcacgggcgtcgagagagaatatgctctggctgatcccagcaaggtcaattgggatgggtacgaattgtacctgacaaattttctcaacgattcgctatcaatcgagaatgcgcataacttctttaagatcagtagacacgccattaatgataagattgtgtgctgtatcagcacgaggatggctgataagcccgtgttggtccacgagaaactttatatacgcagtggcaatcagagcaaagaaatcaaaggtaccgaaaaagtggactttatcctgaagtgggccacctccagttga

SEQ ID NO: 7934 - RNA, 1446 nt, synthetic construct
  source 1..1446: mol_type = other RNA
atgactatcaaattaaccagtaccgatactgtgctaaccgacaaattcttcgccctgacttcccccgaagatgtcgctgatttgcttgaacttaaaagctacagctttctggagtatcttatcttcatcctcccatcttcgaaaagatatcgcgaattcatcatccccaaacgcaggggtggaaagcgctatctcttggaaccaattcctaatctgaagatagtgcagaagaaactgagctacgtgctacagttgatctataaaccaaagcacgcagtccacggctatgtcaacggcaagtctattgtcacaaacgccacccagcatattggcagacgatacttgctgaacatcgacctggaagatttctttccgtctattcactttggacgggtgaggggcatgtttatgtcctacccatacaactttaatgggagggtggctactacgttagcccagatctgcagtctcaggaattgtctaccgcagggagcccctaccagccctataatcagtaacatgatttgcgccaagatggactctgagctccaaaagctggctaaacagcatcggtgttattacacaagatacgccgacgatctcacctttagcacatccatcaagcagtttcccccagccatggtagtgactctggtcgagtctaaaaggcttcgagtggaagtcgggattgaattaagcgagataattaaccgcaatggattcaacgtaaacatgtccaagatcagactgcaaaaggacagtcagcggcaggaggttacaaatcttaccacaaacgagttcgtgaatgttaatagaaagtacatcagacagatccgtgccatgcttcatgcttggaggaagtttggttatgtggcggccgagaacgagtatcgcaacgtgtataataaaaaacctcccgacaaaccttacaagaatgcccctagcctgaagcgggtgataaagggtaagattgacttcgtaaagatggtgcggggccaggaggacaaactgttcattaagttgaacaatcaggcagcccaactggagcgagcggaacgtattgagccctactttttcgatatactgcaagagcccgatcacgaactcatgactgtgatcgctaacggggaaacggatttagttgagtttaaggaaggagcttgcgttaatccccacacaggcaaagacgataaacgcaatatgagctcaaaaattctccgggcagtcgcttcactcatgaactcaaagtcaaacggtgtggtgctgattggggtagcagataacggagcaatatccggggtcgaacgtgagtactctgttgctaatccagcaaaggcaaattgggacggctatgagctctatctgaacaatttgctgaacgactccctgtcagttgagaatgcgtacaagtacttcaatatctccagtctgaccatgctgaactga

SEQ ID NO: 7935 - RNA, 1578 nt, synthetic construct
  source 1..1578: mol_type = other RNA
atggccatatatctggagtccactcctgagattatcgaagggaggttcagggatcttgccactcctgagggcatcgccgaactgctcgagctctcctctctcgcatttctgaagtactgcctttacaccttgccacaggcccgcaggtatcgcacgttcacgatcccaaaaaggagcggaggggaaagaattatcctggagcccgagcctaacttgaagattatacaacagaaactcctgcaggtcctgacccttgtgtaccagcctaagagagcggttcatggctttgtggacgaacggtcaatcgtgactaacgcctcgccgcacataaacaggagggctatccttaatgtcgacctactagacttcttcccctccatacacttcggcagagtcagagggatgtttatggcctttccatttcatttcaatgacaaagtggccaccattctggcacagatttgtagcctgccacactgtctgccacagggagcacctactagccccatcatcgctaatctaatctgcgcgaaaatggactcacaactgacacaactggctagaacccatcactgctattatactcgttacgccgatgacttgaccttctcaacaagtttagcccactttcctaagtctctggccactattatctctgaggagggagaaagaacagtcgagatacgagaagaactggcacgcattatccacaaaaacgggttccgcatcaatcccaagaaggtccggctccaaacacgggatcaccagatggaggtcaccggccttgttgtgaacagaaaggtgaacgtgaaacgatcctatattcgacatgttcgcgcaatcctgcacgcttggcagcagtatggttaccaggccgccgccgacgagtactttgctaaatacttcggaaaggctccagacaagccctacaagacactgccaggcataagacaggtgattaaaggcaaattatcattcatcgcaatggtacgaggccaggaggaccatctgtatattcggtataacaaccaagccgctcagttagagcgccgtgatctcccggaaccccatatttttcggatacttgctgaaccggataatgctatcgtcaggttggtggccgagggtgagtctgtatgcattgaattcaaggtgggggcgtgtctcaacccccataccaataaacaggataagaaaatgaaggacaagatcgttcgtgcggtggccagtatgatcaacagcttgcccgtggggcacctgctcattggtgtgaaggataacggcgagatcattggcgtcgaacgggagtttcccgtcgctgacagtagtaaacagaatcgcgatggatacgaattgtacctggcaaatatcttgaatgatagcctccaagtgaataacgcacagcagttattcaccattacgtttcataatgtaggttcccacaccgtgtgtcaggtgcagacaaccaagtccatgcaacctgttctggtaaacaatcaactctttattcggagccaggcacagacaagggaactgagcggacaggagatggttgagtacatccagcaatattcttga

SEQ ID NO: 7936 - RNA, 1755 nt, synthetic construct
  source 1..1755: mol_type = other RNA
atgtccctgcacctctcgtcggatccggacacactccggcagcaattctttcagctgaagtctcgcgacgacctgctgaatctactggacatttctcagcagcagttgctgtactacctctacatctgccctgagaataaaaggtatagacacttacgcctgaggaagaaaagggggggatatcggacgatttatgctccagccacccacttaaagattgtccagcagaaactctccagcatcttacagctcatttacgagcagaaacccgcggtccatggcttcgttccacacaaaagcatagtctcaaatgccgccatgcacttgaacaaaacgtatgttctaaatctcgacctacaagattttttcccgtcaatcaattttggtagagtgcgggggctgttcatgaatcagccgtactatctcaacgaagaagtggctacaatcctggcccagatatgttgtcatagaaacaccctaccacagggggcacctacctccccagttatatctaacatgatctgcgccaagctcgacagagagttattgaggttcgctcaggccaatagatgcgtctacacgaggtatgctgatgatcttactttctccactaatacaagacagcccccttctaagctggttcgcaggactgaggccacagctagcattgagctggggcgcgatttggtgagcatcatcaccgcgaacggcttccaggttcatcctgagaagagccgtctccaagtcaaaggcagacgacaggaggtaacaggcctgaccgtgaaccatttccctaacgtcccccgtcgtcttattagacaaatcagagcaatgcttcacgcctggcggaagttcggtctggatgcagcccaacagcactattatgctcattattgccaccggcagtacccagtgtttaaaccccgaccccccttccggcaagtgttaatcgggaaaatcgcatttgtaggcatggtgcgcggcaaacacgatcaactgtacctccgccttcgagatcagctcttgaaccttgatccaacttacagggcggcggtggaaaagaaggctgaagaaacttttattctcagtacccccctgatcaagactgaggggaagaccgactggaagcatatcaagcacgcactgcgagtgttgcaagctcaaggcctgtatgccggactgtctctggatttcgatgagagtttgaccgagggaggatcaagcgagttgaagaaaacttgctattacctttctcgggtcaagcaggcccagattataattgcactgttcgaccgagacgagcccaacatcatcagagaggtggccgacggtgatcggttcaaggcttggggaaatcaggtgtttagctttgtactgcccattcctgaccatcgcacccacacccctgacatatgtattgaatttctgtaccctgacaacaacctgctcctggtagacgaacacggcaggcggctgtacctgtcctcagaatttcatgaaacaagtggtaggcataaagaaaatccagccatatcatgtctgctttccagcaagttcaaaaaggacgcaaaacttagtattatcgacgcgagtgtgttcgatgcaaatcatcgttccattgccctcgccaaagatgcctttgcagactacatcttgcacgatcaggtgccttttaaccgcatgaacctagacggatttaagccaatcttcgatatgataatcgctattcttagggctgagacaaataagacatga

SEQ ID NO: 7937 - RNA, 1689 nt, synthetic construct
  source 1..1689: mol_type = other RNA
atgctgagcgctgccctcgctatctcgcgcatcggaggccaggtgagcctacgcatccacccagtgcccacatccacccagactcgccacttgaccgcttcggacgacgatttcaggcagtctttcgccagccttatcgatagggacgatgttgtaagattgctcgaggtgactgattctacactgatatacctgttgtatcggcctaggcctcggtacacgacttttactgtaccaaaacggggtggcggaataaggaagatcatggccccagttggcagtttgaagatcgttcagcaaaagctgaatcaagtgctaaatgccgtctatagggtacgaccctcagtccacggctttgcaatcgacaggaatgtgaagaccaatgctctgccgcacgttgggaagagatgggtgctgaatatagatctgctcgacttcttcccctctataacctttccacgggtgcgcgggatgttcatgggtcgaccatacgctatccccgaaagagccgccaccgtccttgcacagatttgctgcaaggattctctccctcagggcgcaccgacatcacccgtggtcagtaatatgatctgtggcaaaatggactccgagctccggcgcttggccactcactatcgctgtgtttatacgcgttatgccgatgacatgactttcagctgtaactcaaaggaatttcccgctgatttagccaccacttatctggacggagaaatgcggccaattgttaccgtcggagatgtgctggtgaaagccatccaggccaaccacttttcaattaacaacagcaaatccacactgagagggcatggtacgagactcgctgtgactaacgttaccgtcaacgagtttcccaatgtccctcgaacatacatccgccaggcacgctctatgcttcacgcctggcgtaagtatggcgtcgagagcgctgacgactcttacagggccagtcgaggcttaagacctgcggacgaccggtcaaggggtcaggttttccgaagagtggtgctgggaaaactggaatacgtgcgtatgatgaagggagacacagatccagtgtacattaacttaaagaaccgattagctgacgcggaccctcggtacccaagggtcccaaccatcgtaacagagcaacagctgggcgctgcactgtgggtggtggttagtcaacggggcgaagagattcggcagggaaccgcttttatgctgcaggggtttgggctggtcacttgcgaccatgtaatcctggaccgcaccgaggtctaccagatatccgatcctaccaatgcatttgacgcaacacccgtaaagagaaacggtcatatcgacctcgcgattctgtccatcgatcagaaacccgaggcacagttcacaggggccggaagagcagccattctcggcgaggatgtgacgctcattgggttcccgaaccttggtcccggcgataccgagcgcacagaaagggggcatgtgaccggactaaggactcggttcggggtgaaacacatacttatctccccgacaatttacagcggccatagcgggagtcctgtgcttgatgcggaattgcgtgtgattggcattgcccaaagaggaattgattatagaaacgacgatcctgatgcaatcgagccttccgcgattgccatcgacgaagtcaataaactgtga

SEQ ID NO: 7938 - RNA, 1695 nt, synthetic construct
  source 1..1695: mol_type = other RNA
atggccaaggcttactcaagagagctgaaggacccaccgagtgtcctggcctcacgcttcgcgagtctccgggattacagggacgttgctgctttattggaggtggatgctccaacactcgggtttctcctttatcggtccccccctagcgtgcgttatcatacgtacgatgtgccaaaacgcagagggggttcgcgcaccatatcagctcctatggcctccctcaaattcgtccagcgcaaattaaaccaggtcttgcaagccgtgtacagcgtcaagccatctgtgcacgggtttgtggacgaaaagtcaattatcagtaacgcagattgccatgatcgcagacgtttcgtgctgaacgtggatctggagaatttctttggggttatcaacttcgggagggtgcggggaatgttcatgggtaagccatatcgcttacctgagcgagctgccacagtgctcgctcagatttgttgcttcaacaatcagttgcctcaaggcgcccccactagccctgtcgtctcaaacatgatttgcggccagctggatgcacagctacagcgcctcgcccgggaccataaattgacatatagcaggtacgccgatgaccttacgttttctggcacgaatcatgtaccgtctgagcttggagccgacagacgagcacccaaaacatttgacgtgggccctcgactgaccgcggttatctccgcaaacgggttcgcaatcaaccggaagaaagtgaggctcgccacagctgctgaaagacaggaggtcacaggtctggtggtgaatcgaaaggtgaatgtaccgagaaaatacatcaggcaggtgcgagcaatgctgcacgcctggaggaaatttggactggctgcagcggaagccgaattctttgcacggtatgacaaaaagcataggcccgtgagtaagcgccctactttccggagagtggtgaggggtcggttggaattcattgggatggttcgcggaaaggacgatcccctctttcagaacctgctggcccagtatgacgcctgtgtggctccgtccggtagaagcaccccaagagcacccaacgatgtgattaggggagccctttgggtcgttgaagaagaccacagcgagatgtaccagggcaccgcctttgcagtatccgccgattccctgcccgagcacctgagagttgcggtacgggctgcaggcgtcgagtggactctgatcacctgcgaccactgtctgctttctggaatgaaagcatatcaccctgctaatagcggagcattctttcctgtggaagtcgtggcgcgtgacaatacactggaccttgccgttctggctgtcaggactgccagtctgggcaccttgccattagacctgtccgctaccatgacagatggaatgtctctacgtgtagctggctttcccaactacggtcccggcatgaccgccccaatatactccggaaccgtcgttggcactcgagcctggcatggccggcaactgcccattctcgatgcgactatagtagctgggatgtctggcggccctgccctgaataatagcggggccgtgattggggttgcggttaccggcgcaatcgaccacgcatctgccaaggctactgagaagcacggagcagtccccatcgccgccctttcggagttgcaagccctaccaaagcccgagccactctga

SEQ ID NO: 7939 - RNA, 1521 nt, synthetic construct
  source 1..1521: mol_type = other RNA
atgtcgacagagctccactctaatccagaggtacttcgcgaacaattctatggcctggagcaccccaaggatatcgcaaaaatgctggaaatctcctacctgactttgaactactacctgtacaggttacccgagaacaaacattacaccattatcgagatacctaaacgaagcgggggtaagagaagtttaagggtgcctatcagccccctcaaaatattacagtccaagctatatgaggtgctgttgtgtatataccaaccgagggcttctgtccacggcttcgcgaggggacagtcaatcctcactaacgcagaagctcatctccagagaaagaaccggaccttcatcctgaatattgatatcgaagatttcttcccgagcatcaattttggccgcgtccgcgggatgtttatggcccgtccttataacaggtctgaaaaagtggctacagttctggcccaaatctgctgcgttgataaccagctgccccagggttccccaacgagtcctattattgccaatatgatttgtgccaaactggactcacagctgcaacggttggccaaggaacaccgatgcttttatacacgatatgcagacgacataactttttccacttcactgtcttcattcccacgcgcgctggcgaaggtggaacacaacacctccggcaatcccctgattcccggatcaaagctgaatgagatcgtggagaagaacgggtttaccatcaatcctgacaaggtccggctgcagagttccgacaggcggcaggagattacaggattgacggtaaataaattgccaaatgtccctcggaagttcttgaaccaggtgcgggccatgctccatgactgggaaaaaaatggatacggcagagcccaggaaaaccacttccagaattggagaaagggatacagctctccgtacagtagccctacaagctttgccgctatcgttcgagggaaaattgagtacattggtatgattagaggtacacagaatcgcacatatcgtaaactactgaagaaactcagtgagctggatcccactttcaaaaaaagtgggcttgtggatatgcgcgagcagatctttattagctatagccacaaggacaaaaaatggctcgaggaactaaagcgtcatctaactgtcctcgagcataaccataagttggttgtctgggacgataccaagatcgaggctggctccaagtggagacaggagatcgagaaggcacttaactctgctaaagcagccatccttcttgtgtccgataacttcctggtgtcggactttatcagagaacacgagctcccccctctgttacaagccgctgagaaggagggcctgaaaatactctggattccagtaaccagcaccatgtatgaatataccgagattgtggaataccagtgcctgaccgaaccatcccggccacttaattcactcaagaagtctgaaaggaacagggagctggtggagatctgtagaaagatagcagaacttgcctcttga

SEQ ID NO: 7940 - RNA, 1542 nt, synthetic construct
  source 1..1542: mol_type = other RNA
atggacatcgagctctctgcaagtcctgaagatctccagaaaagatttttcgcccttcaaacatctgaggacatcgccgagttgctcgagattccttacgactaccttatttactacttataccgggtaccgtttgagcaccagtacacgacattcttcatccctaagaaaagcgggggaacgagaaagattacagccccaatttcccctctgaaaatcattcaaagaaaactcaaccaggtgctgcaggctgtatatatccccaagccttcagttcacggatttgttcccggccggagtatagtgaccaatgcagaagcacatatgtacaagcggatacagaagaagaaatcacagaaggttgagaagccacgcaattatattctgaatattgacttggaggacttttttccgtcaataaactttggaagggtccgtggcatgttcatggccgtcccctataagtgtcccgaaagggtggcgaccgtgctcgctcagatatgttgcgcgtacaatgaactaccacaaggggcccctacctcacctatcgttagcaatatgttgtgctccaagttagatagccagctgcagcgactcgcacagaaataccgctgccactacaccaggtatgccgacgacattacttttagcactagccttctatcgttccctcgcgctttggccacaactgaatactcatctcagagcgggtaccaagttgtggtaggtccagaattgaacgtgatagtcgaggagaatggcttccggatcaatcgacaaaaggtgagattacagacccccgatcgcagacaggagatcacaggactcaccgtcaatgaatttcccaacgtcaggcggcagtacattaaccagatcagggcaatgctgtatgcttggaaaaagtttgggcatgacaacgctgaggaaaggtatcgagagctccacgataatcaggaataccaatgcccggacaaactgctgccatcctttagaagtatcgtgcgtggcaagatcgagttccttggcatggtgcgtggaaagcaagacaggacttatctgcgcttcctggaaaaattggccgaggtcgatcccgaattcagggccaactgggagatgaacaagatcaaaaaaggcggcaccaacaaacaggtcttcattagctattctcgaaaagatgaagatttcgctcggaagctggtgaatgccctgtcgaatcggaacatcggtgcgtggctggatgtaaacgaaatcagtccaggtgaaaattgggttaatgtgattcagaacgggctggtggtgtgtgagctgatgcttgtcatcatatcccccgatagcatgtcttcttcccaggtggcagaggagtggcagtattttctgtcccagagtaaacccgtgattccacttctgtataagaacacaaacactatcccatacaagctagataccaagcagagaattgatttccaagagcattatgaattcgactccgccatggacatcctgctgcgcgctctcaatagagagaacatcgcttccaactga

SEQ ID NO: 7941 - RNA, 1665 nt, synthetic construct
  source 1..1665: mol_type = other RNA
atgacagatgtcgaacacagggaagacactggcgcacggttttcagccctcaaagacgcgcgggatgtagctagcttgctggacgtgtcctatgagtacctacgtcaccacctctatcgcgcccccgcaggtgagagatacacgttattcaccattaggaagaaaagcggaggcgtgcgagaaatcatggcgccccgtcgaccgttgaagctgctgcagcacaggcttgcaaaagtcttagagtgtgtgtacgaaccaaagtcatccacacacggtttcacccgcaagcggaatgttctcactaatgcccatattcatgcccggcgtaagcacgttcttaatatagacctcctggacttttttccctccatcaatttcggccgggtcaggggaatgtttatggctaacccataccgctgcccacctgaggtggccaccgttcttgcgcagatctgctctcataacaatcagctgccacaaggagccccgacatctcctgtgatcagtaacatgctgtgtgccaggatggatcgccatctccaggaagttgctaagcagtaccgatgtgcctataccaggtacgccgatgacctgacttttagcacctatctggacgagtttccacctgagttagcatcaatgcagaccgaacacggtgtagacagatgcgtcccgggccggacactggtgaatatagtgaccaagcgcaacggattcagaatcaacgagagcaaggtgaggttgcaaaacaacaaacagcggcaagaagtgaccgggcttacaacgaataaattcccaaacgtgcagcgagcctatgtgagggtagtcagagccatgctccataactggaaaaagcacggcctcgaggcagcacaacgccaatacttgagcaagtataacaaacagcaccgccctccagaatctgtgcaacccctgttccgatacatggtgaaagggaagattgagtacttgggaatggtgcggggcaaggacgacgctatctatcagagatttctcaagcgcctgagggaattagcccctgatctggtcaaggcatcttccgtagacgatccttacgccaagatacttgacagactgtgggtcctggagacagaggaaatcggcaagtgtagtcagggaactgctttctatattcaggattacggcttcgtgacctgcgcacatgtgctgggggagtctgagcttgccatcattactgcacacaccagacatgacgcttcacagaaatatagggtcaaggtaacagccaaagacgatcagattgacttggctcgtctggaagtcatcggggtgacgcctcaggtcggtctgaaagtaggggcctccgagagtcttcagatcggggatgcaataaaactcgccgggttccccaaccaccatatcgatgataccggaattgttgctagtggcactgttattggccgaagaaacgcgcccgtgactagagagccccggatcctgattagcgctaatatcattgccggtaacagcggcggacctgttctggattcgaacaatagagtgatcggagttgcggtcagggggggggctaatgaagaggagtcccgcaatacagaatttcacggcgtggtgcccatagaggctctaggacggctagttgtggctggcgtcggtgggaattga

SEQ ID NO: 7942 - RNA, 1662 nt, synthetic construct
  source 1..1662: mol_type = other RNA
atgacagcaagccctcaaagggaggagatacggacacagtttacttcattacgcagtaggtccgatgtggcatcactcctcggggtcaccgatcgtgcccttcgctacagattgtacgggctcccgatcccttcacagtacgtggtattcgaaattagaaagaagtccggtggcctgcgcagtattgccgctcccatccctccacttaagatcctccagcgccggctgcggaagatcttagagtgtgtgtatgaaccaaaagatgtggtccacggatttaccgtggagcgctccattaaaaccaacgctactcggcacgagaagtccaagcacgttctcaacgtcgacatctccgaattcttcttgagcattaacctcgggagagtgcgtggaatgtttatggctgcaccgtataaatgcgagaaagaagtcgcaaccgtcctggcccaaatagcctgcctggagggcaaattgcctcagggggccccaacaagtcccataatttctaatatgttgtgcgcacggttggatgctcatatgaataggcttgcaggatcttttaaatgtacgtactcaaggtacgcagacgacctgactctgtccacgctgcagactaagttcccgcgggaggtggccgaactgagaattgtggatgggcagcccaagtgttttgccggtcctaaattgattcgggtactaacaaggagaaatggcttcaagatcaacctgagcaaaattcggctggccaatagaagtcagcgccaagaggtgacaggcctggttgtcaatgagaaggtgaacgtccctcgactttttgtgcgagagatacgtgcaatgctccataacctgcacaaaaaaggcgtcgaaaagtgtcaacaggattatgagactaattacgcccgacacaggcgcccttcttcgccagtgcccccattcctgtgggtgctgaggggcaaggttagctatgttggaatgattcgcggggagaatgacgagctgtatcggaaactgttgaagaggctcgacgagctggcacctggactagtgaaggttcccgtcatcaaggacgagctggattccatatttgagcacctctgggccattcaggtggagacagaggctggggacggaggacagggcactgctttcatgttgcggggagtcggtctagttacagcgagccacgtgcttggcaccaagaaaatcctgggtataaagatgcagagctccgacggacgagtggaaagagaagcgaccgtgtttcgaagagatggcctgctggatctcgccattctcgaatctcctgacctagatccctctcgtgggctggaagcctctactcttaaatccaccaggaagatggctgtaaccttattaggcttccccaatcataacacaggggaccccggccatttcgatcagggtatcgtaacctcaatgaggagaagtccactttcggaggaccaaatgtttctgatctcatgcccaatcatccatggccacagcggcggacccattctggacagtagctctaaggtacttggggttgctgtgcgcggcgctatcagcagaaaggaagccgcgctcaccgagttccatgccggtatgccaatcgctgcgatcgaaaaattaacgaacgaaatggccgaacccgaaaaatga

SEQ ID NO: 7943 - RNA, 1635 nt, synthetic construct
  source 1..1635: mol_type = other RNA
atgccatatcatctgaccaagagcttagatctgctcagagaggaatttaaaaagttgaactcccctcaggctgtggcagcccttttggaagtagactacaaacgacttatatatcacttgcacaaagtcccaccttcaaagaggtataccgttttcacaattccaaagaagtccggtgcggccagacagatcactgcccccatctcccccctcaagattctccagaaaaagctgtcattcattttaagcagcgtggtggattctaagcattccgtgcacgggtttgtgcgagggagaagtatccggaccaattctagagtccacgctggcaagaagtatgttttcactatagatctggagaacttcttcccgtctatcaacttcggccgggtacgcggtctattcatggcccccccgtttaaatttaacgctgaaaccgccacaattctggctcaaatctgcaccttcgagaattccttgccccaaggggcaccaacctcccctgtcgtcagcaacatactgtgtcggaagatggatcagcaactcagccggctcgcacgcaactacaaatgcgactacactcgatatgctgacgacatcaccttcagcacagccaaggaaacctttcccaagtcaatcgctttcacgctccctgactcaaaggaaccgcattgtggagatgagcttagcaggatcatctcggatagtggatttactataaacgccaaaaaagtgagactcattgagcgctgtaggcagcagaaagtcaccgggctcgtttccaatgaatttcccaatgtcgatcgccgttttatccgccagattagggcaatgctgcacgctgcgcagaaatttggcttcactgccgccgagaaggacttccacgcgaggtactacaataagctactaaaacctggtggtaaaaagccctctttcaaaaaagtgctcaagggcaagatcgactttgttggcatggtgcgcggcaaacttgataggctgtacctgaagctgattagaaagttacagctgctggatgagacactggtgcgggcagtgcctagtgaggcttggattaacgaaatcaaagcagccctgttcgtgatagacgttcataagcctgctgaaaagcctggggtcccaacaatcgaacaggggacgggctttctattaaagggaatcgggctggtgacgtgcgcccacgtcattaatgagcgaattgggaaactggaggtgtatcagggagccgaccccagcaaactttacgacgtggacgtttctattgaagatctggacgccgacatagcagtgctgaccatccatggattcacagggccccaactcttgcagggggacgatgggatcgtacgggaggatacagaggtgattctggccggatacccaggctatgcccgtggccatagtggtactataggccggggcagagtagtgggcactaatctgcactttgacaaaaagcgcatgcttatcgatgcagttatttttccaggaaattctggtggccctgtcttgaacaacgagaggagagtaatcggcattgccgcaaaaggagacggaggacaaaattcaattgtgccaattagtgcgatcaaggaggctatgatcaggtcgcgttga

SEQ ID NO: 7944 - RNA, 1758 nt, synthetic construct
  source 1..1758: mol_type = other RNA
atgtccattagcctgtcattactgaacgaagagttaaaggagagactcttcaacctccagagcaggaaagatctcgcagatttgctcgaaattgatgaaaagcagctgatataccatctctatatcattccgcccgaccagaagtacaagaaatttatcatctccaaaggtcatggctccgtgagacgtatagacgcaccaatcagtgctctgaaaattatccagcggaagctgttgaaggtgcttacctgcgtgtatcgcgtgaagaagcctgtacacggcttcgtgtatggcagaagcatcctgtcaaatgctaagacgcatagacgacgccgctatgtgctgaacctagacctgcaggacttttttccctctataaacttcgggagggtgaggggtatgtttatggcacggccgtaccaccttaactccgccgttgctacagtgctcgcccaaatatgttgtttcaacaatcagcttccacagggagccccaacgagccctattgtctccaatatggtgtgcgctaagcttgacgatgaactccaacggctgtcgggaaaatatcggtgcatgtatactcgctatgcagacgatataactattagcaccaatctgcccgcattcccttcaaatattgctaccctcagtgataagacagggcaacccgagctgggagtcgaactgcagaggatcattgatgagaacgggttcgttgttcacaaagataaaacaaggctccaaattaagtcgcaacgccagcaggtgacaggccttaccgtgaatcgtaaggtaaatgtgaggcgttcttttattaatcaggtccgagcgatgttacatgcctgggacaaatatggcctcgaagcagctcaggaagaatttatcaataagtacgacatgcggtctagaagtccttacaagaacaagaatggggtttctttcgcacgggtggttaaaggaaaaatagattacctggggatgatacgtggtcaggatgacacgatctatttaaaatactacgcccaatactgcaggttggctggcattcctaaccgccgggccttgacttacccagtggacgaaactttgcttcctctgattgtcacagagggaaaaaccgactggaaacacctgaagattgccctgtccaagctgcagtcagagggaatcttccagaacctgaacatcagcttccacgagtatgaggacaatatggaggcgggcgacaatcgaatcatccagatgtgcagagatcgggctttgctgccaaataacgtcataactatcttcatcttcgaccgagataacaaggaggtgataaagaaagtaaccgagaacggccaggagtacaagacttggaataacaatgtgtttagctttgccatccccgtcccgaatcacagaaccgagacaccagatgtctgtattgagctatactacaggaacgaggaaattactagggaagatggtaataagagacgactttacttgagtcgcgaatttaatcctgagtcagcccgcaatcatgacgggagtctgaactgtaccgatatgaacaaaatccgggatcagaggaaggttaacgtcattgactctaatatctacaactcttccaaagagaatgtagccctacccaaaagcgactttgcggactatatcctgcaccaggaggaaaacttcaacgactttgattataccgagttcaaagccatctttgagatcatccaaagaatcattcaggaaaaccccattacatga

SEQ ID NO: 7945 - RNA, 1434 nt, synthetic construct
  source 1..1434: mol_type = other RNA
atgggaaagctcctctcaagatctaattcccagatcatcgaaagattcgacgcgctggagactcccaaagacatcgcagatctactcgaagtcgactaccagcattttgatagcatactgtttaaaaccgcccgcgccaccctgtatagagagtgtctaattccgaagaaaaacggcgagttcagacagataaacgtgcccgcagtgcagcttaaaaatattcaacgccgactccatgaagccctgcaagtcatccataaaagcaagctcccttctcacggattcgagcgtgaacgttcaatagtgacaaacgcagaagctcacgtcaagcaaaaatttgtgcttaatctcgacctgaaagatttcttcccttccattaatgctgggcgggtgtggggcatgtttcagaccgtgccatttaactgcaatgaaaaagtggcttcaatcttagccaacatctgtactttcaaaaatgagctgcctcagggggctcctactagcccgatcgtgtcaaacatgctgtgcaggaaactggattccgagcttcagaagctggctaagaagtataatgcaacgtacacccgatacgctgatgatataacaatctcctttagctacggggagatccccaaaaacatcgccacaacgaacgagttgggccaattagaacttggtaacgaaatcaagaacgtcattaagaacaatggcttccggatcaattatgacaagtttaggttgcagtctaagaacatgcggcaggaagtgacaggtctaaccgttaatgagtttgtaaacgttaatcgcaagtacgtgagacagattcgggcgatgttgcatgcttgggataaatacggatacgagaaagcagaggaagagtttaggagagagtatgacaacaagtatcgcccacactggaagagcaacccctcgttcaaaaaggttgtcaagggtaagatagatttcctcggaatggtccgagggaaagatgacaaggtgtacattaagtatagggaaaagctcagggagttggccccagacattatctctgaaccacctcctccaccagagagtgagtccccccaaagtatggtacccattatccggaccgagggaaaaaccgattggaaacacctgaaagccgccttaaggtggctgattgacagaggcgagataagtgatctgcagattgaattcgacgaattcgaggagactttgggggaacctctgctgctgcaggactgtgaagcactttgccggcataagcagcctaggcccattattgccatctttgaccgcgatactaagaacgttaataagttccacaacgagaagaagggctacaaggactggggcaataatgtgtttagcttcgctatcccagtaccggcccaccgcaaaaatacacccaaagtttgcattgagctgtactattga

SEQ ID NO: 7946 - RNA, 1743 nt, synthetic construct
  source 1..1743: mol_type = other RNA
atgaaaaacctccttcaatatagccctgagatcctgaagaataagtttcactccctgactacacacttcgacctgtgtgacctgttagagatcaagtacaaggacttaatttactacctttacaggattgatcccgatgtccaatacaagaccttttacattccgaagaagaacgggtcattccgggagattaacagccccatcagcactattaaaattatccagaagaagctggcccagatactcaatgctgtgtatctgcctaaggaacctgcgcatggattcatcatcgaaaaatccatcctgagcaacgcccgactgcacgttcgccgtaaatatgtgcttaatctggacctcgagaatttctttcccacgattaactttggcaggataagggggatgttcctcaaaaagccatacaattttgaccccaaaacagccacaattatcgcgcaaatatgctgttataaaggatttctgccccagggcgctccaacatccccaatcttgagcaacatgatttgctccaagttagactcaaatttgagctttcttgccagcaagaacaaatgcatctacactcgctacgctgatgatctgtcgttcagcacctccttgactaattttccaaaagcaatcgcaaaaccgaatcctaccggtctggtcgagttgggcgaagagctgaagaagataattagagacaatgggtttgaggtaaattctgacaaaatcagactccagtacaaacaacagcgccaagaagttacgggtctagttgtgaatgaattccctaacgtaaagcgtaaatttgtccggcagatacgggcaatgctccacgcctgggagaagtttggctatgacagtgccaattatgaatactcaactgtgtacaacaacaaaacccggtttgcctcatcttctgtcgatttcgcgaaagtggttgcaggtaaaatagagtttcttgggtttatcaagggaaaagacaaccagatttatcagagcttcttgaacaaacttatcgctctggatcccgagaagtttaagtatttggagaagttcgtgatttcttctaccaactacgttaatcccttggtgtttaccgagggcaaaaccgacctcaaacatctaagagctgccctgaatcatttccagaagaatggcgagtttaccgagataaagctggagttcgatgaagaggaaaaggaaatgggggacgaagagctgctaaagttatgcaaaaactacgtgaagatgacaggaaatgcaaagccaataatcttcattttcgatcgcgacaacgaaaagataatttcccaggtcgacaataaagggagttacaagatttggggaaataacgtgtatagtttctccatccctattccagaccacaggacagatctcacttatagtccgatcgagttctattataagaacgaggaccttaaaatctgtgacgtaaaatcaaggagattattcctctcagatgaattcgataagaactccggacgacatctgttcgagaaggaactgtcttgtaacaacctgaagaagatcaaagattcgaagctgaatattatcgataactctgtcttcaacagcgaatctgtgaacgtgtccctcagtaaaaacgatttcgccgaaaatatcctcctaggcatcggcaagtttgctgacgtggatttcgccagtttcaaaaagatttttgatctgatcctgcagatcatcaaaattcaggacaattga

SEQ ID NO: 7947 - RNA, 1467 nt, synthetic construct
  source 1..1467: mol_type = other RNA
atgagccacaagctgaatagcccaccacaggatctggccaagtctttctccgcccttaaagacgggcgcgatgtcgctaaactcctcgaggtggagtatgcccacttggtgtatcacctgtataaaatcccacaagaggctagatacagccagttcaaagtgaagaagcgcgggactaacgaattcagaacgataagcatccccaacgggtccctgaagatcattcagaccaaattggtccaggtgctggaagctgtgtacttccctcgtatcgcagttcatggattcattaaaggtaaatccatcctgtctaatgcgagaatacacgcgaaccagaagtgggtcttcaacgctgacctggagggcttcttccccagtattaattttggaagagtgcgaggcttatttattgctaaaccgtatgttcttccggacaatgtcgccacagtgctggctcagatctgctgttataacaatgaactcccacaaggcgcacccacgtcgccgattctcagtaatatggtttgcgcaaagttggatagcgagctgcggatcctcgcacagcattcccggtgcaactatactaggtacgccgacgacctgaccttttcaacatcttcacctaagtttccccctcagatagccagtattgatggcgattcccagaacacaattatcgagctgggagagcagttgcgcacaatcattgggaataatgggttctgtgtcaatgcacagaaaacccgactccaaactaagactcaccggcaggaggtaaccggactggtgacaaaccagtttcctaacgtgtcacggcaattcatcaggcaggtgagggccatgctgcacgcatgggagaaatttggattagagaaggcccaaaccgagtacttaatgttgtaccgggaccagcagcgcaaccccctgaagaacgatcccaagtaccgtaatgtatcacttaaggacgtaatcttgggtaaaatcggctttattggatctattcgcggtaagactgactttatctacattaagctactcaacaaagtgataagtctctccccagaactcgccaagcaaaaggataagattagtgcacttatgtcgagcgggccagctccccttataagggtgaccaccgaaggccctacagattggatgcatatcgaaaccgccttcaataacctgcagtctaaaggcctatttgccgggctagcgttcgacttagttcgatacgaacacgatatgggccattctagactgctgtccatttgtgaagcctacgctaccctgccaatacctggtggacttagccatgtttttatctttgatagggacgaaccccagatcgtcaataaggtcaatgaacatggcgacgtgaggaaatggcctaacaacgtatattcattcagcattcccatcccaacgcacagaactaaaacacctgagatatgcatcgagctgaattga

SEQ ID NO: 7948 - RNA, 1635 nt, synthetic construct
  source 1..1635: mol_type = other RNA
atgcccgaagcccagagatataccacattcaaactggctaaggcttccggcggttttcgaatcataagcgtccctaatcactctctgaaaatactccaacaaaagctgaaccacatcctacagatggtgtaccagcctaaggcctccgtgcacggcttccttcaaggaaagtccatactcacgaacgctgaacgtcacgttaagaggaagtatgttctgaatctggacatcgaggcattcttcccttctatcaacttcggcagggtgcggggcatgtttatcgccgccccctataacctgccagagaatgtagccacggtattggcccagatttgctgttaccagaatcagctcccacagggtgccccgacttcacccattataagcaatatgatttgctcccgcatggacgtggctttaaaaagattggctcagacatataagtgtacatatacacgctatgccgatgatattaccttctctacctcgaagccccagtttccaccccagatcgcgtcaatctttaacaagcaggagacttctgtcattgtcctcggaacagaattgaatcatgttatcgagtcaaatgggttcgaagtgaacagttccaaggtgcgcctgcagactaaaaatcaccggcaagaggtgaccggggtgacggtcaatcgatttcctaacgtcaagcgggcttacattagagagataagagcaatgctacacagttggcgggagaacgggtttactgaggctgagcagatctttagggaaaagtacgacagcaaacaggagaacagaaaccctaaccttcccatcccatccttcgcaaaggtgctgaggggcaagattgagttccttggcgccgtgagggggaagaatgaccatatttatctgagatatctgaacgagctcagcagcttggcaccgcctggcaccattaagttgccaaaatctgtgggcaagagcaatatcattaaactgaaacccaccgtgtacgtcgagggaaagaccgacaaaaaaatactttcaattgcttgggccaagctctttgaatcccgcccaatccctttcaacatagaagatagtaacctgagtcaaacagaccagggaggaggtcttgggggggcagagattctcaaacagttcattagtgttgtgcgtgaggaccacttgcatctggctatcgcgatgtttgatcatgatcaagaaggaatcaagtgctacaatagtctcccaaaatacttcgatcaggtatcggagctcgaggcgaaaattagcaggcatggcaaagccgcagcctttctgcttcctgccagtgatcagaaatccgaatacatcaagtacgagaattttgtgatcgaatacctgttctctgatgctgccttagccaaaactaccgaggacgcacaggggctgatcttccagcaagcgtctatcgaacagcgcatcgttggctctggtaaatccttccggctgtcaagcacaccgtccagcattcccgaaacccgtaccatcaaggagggaaaggttgtattcgcagaacggatcgtgccccacctagacaagtcagaatttactgaatttcgatttgtcttcgcaaaaatccagcaaattataacttacatggccagcttatga

SEQ ID NO: 7949 - RNA, 1695 nt, synthetic construct
  source 1..1695: mol_type = other RNA
atgaataatctgtcccctgtgctgtcggcctcagctgaggagttgagaaaaaagttccaggagttacaaacccgtgaggacgttgccaatctcctggagatagatgaatcccgcctgaattactacctctacatcattcctgagcctcatagatacaccacatttcaaatcccgaagaaaagtggaaaattccgaacgatttctgtcccagcgaccgccctgaagattttgcagaggaagcttaatcaggtccttctcgctgtctatcagcccaaagcagctgttcacgggttcgtcctcgggaaaagtattgtgaccaacgctcagatgcacctaaggcaaaagttcgtgctgaatatcgacttgaaagatttcttccccagcattaacttcggacgcgtgagggggatgttcgtcgcacctccatacaaactcccgcctatggttgccacaatccttgcacagatttgctgctggaacaaccagctgccacagggcgcaccaacaagccccatagtgtccaatctcatttgtgccaagatggacagtcagctgttgcggctggccgagaaacaccgctgtgtgtatactaggtacgctgatgacataactttcagcacatctaccagtcagtttccgatcgcaattgcacgaaagtctgaagtcaccaatcaggtggaagttggtggggacctgggtagagttattaacgaaaacggttttgagatcaacagcgacaagatccggctacagacaaggcaacaaagacaggaagtgaccggacttatagctaatggcaagacccctaacaaaacacccaatgtccaacgacgctatttgaaacagatccgggcaatgctacatgcctgggaaaagtttggcttggataacgccgagaaagattttctcgagaagcatgacggtcactataggcaccccaacctcaacgaaccatcttttaagaaggtggtgtgtggcaagatcgaatttctcgggatggtccgtggaaaggacgatgtgacttatcaccggtttagagataagctgtggtcccttgcgcccgagttagcccggtttgatccagagatagaatcaactaacattcccacttctgtactgataattacagaggggcagactgattggaaacatctcaaggccgccttacagcagctcaaggaggccggcgacttctccgacctgaatatcgaatttcgcgaatatgacgacagcatccaaatgggtgatggcgaactggtaaaactgtgtattcagatggccaagatccctcaatctaaaattacaatctgcctgttcgatagcgacgcaccctccaccctgaaaccactggctctgagcgacgctatgtacaaacacatgggaggcaatgtgttcgctatggtactaccaacgcccaaccataggcagggactgcctggggtgtgcatcgagcactattaccaggatagcgaaatcactcgggaggacacccacgggagacggctttacctttccaatgagtttcatgagaagagtatgctgcatcgcacgaagcacggcatctcaacatcagacagacgcgtacatgatttgaaaaaggtggtttgccaggtgctgtgtaagttaggcggcgcgggacaggccttagtctcaaccgtgatgaggcgtaacttccgactgagaatcactgcgtga

SEQ ID NO: 7950 - RNA, 1959 nt, synthetic construct
  source 1..1959: mol_type = other RNA
atggtgaacgtagacgaggagttgataaagaactttcagaacctgaaatctgtgaagggcctatacctcctgctgcagaaattccacacaggacccgcatcatttccagactatagcacctttagacagattctgttcaatcaatggcaagacgagccctatgagtccttcaaaatggccaaaaagaatggcagtcataggaccattgaggtgcccaagcctgagattaagctgctccagcagtctcttaatacaatcctccgtggtatctatgaaccaaaagccagtgtacacgggttcaccatcaaaaagaacatcatttcaaacgctcagaaccactgtggcaagaaatacgtgttcaatatcgacctggcagatttcttccacagcataacccaacagcgaatccggggggtgtttatgaaacccccttatagtctgccttccaaagttgccactgctatcagccacctgtgttgctacaatgatcgattgccgcagggagcaccaacttcgcccattatatcgaatatagtgtgcgccaagcttgacagcgggctgaggcttcttgccaaggaaaataactgtttctatactcggtacgccgacgatataacttttagcacgacacgcaagaactttcccactgacttaggagtaatatacggcggtggaacccaggatatcaagattggagacaaactcgcctccatcttagctgagaacggatttaccgttaatgctgcaaaaacaagaatccagattaacactcttagacaagaagtcacaggcctcactgtcaatacaaaggtgaatgtgtcccgtgattatataaggcatgtgcgcgctattctgcacgactgggagctgaacgggtacgtgaaagcgaactcaaatcactggtcacattgttctaaaaagcacttacggcatgggaacattgatgacgttctgggcggtaaactggcttttatcggccaggtaaggggcaacgaggatcttttgtataagaagctgctccagaagtatgcggggctaattgttaatgaaatggctcgcgatttggctctcaagttcgacaacaagttatacgagttatggtcaggtgtgatcgatcagtacctggaacaagcagtgattgattatgtcgccaacgagaacattacaaacgaggacataaagaatggatttgaggaactgaagaaactgaagcctattaacggccgggactacaagcaaagacaggacccagactacaatcaagtgggcgtccccgtcgcctacacctttctctatctacctcgcaagatcatggcagccactgcgatcctgacacattactttggacagaagaacagtaggatcccctataatatcctcgatattgggtccggcacgaatgctgtttctatcgcaatcgggctgtttttgttcaccgataagatcaatatcaacttgaccgccctagaaccatcccactatatgcgccatttctgctcataccagccaaatttcagtcatctgaatattagctacagggaggggatggttggagaatggcaggatgtgctgcattccaactactacgagcttatctttatgtcctctgtgctgcagaattctttcaatgaccaacaggatacctggtgggaagatcggtgtcgagaactctataactgctgcaaaaacaacggcacgtttattatagtcgagccaaacgccaaaatggatctgctcaattctctggtcaacgccatgcagaaaattggttggagtttcaaagaaagactcttcctgagcaatctcttgcctaaggtcagcaagaacgacgaattgatcaaaatgcagaagctgaccgaccttaaaaaagaatacaagtgcgactatcacaattacagcgtgtgtaactggaatcctaatccgaagtataacgagatcatttacatcttcgagaaatga

SEQ ID NO: 7951 - RNA, 1932 nt, synthetic construct
  source 1..1932: mol_type = other RNA
atgaggtatttactgcgcgaggctagcgaaattgtggagagcttccggaaaattaacagctttcaggactttgcagacctcttggaggtagattacttttggttcaagcaggaactgtttgccgtgcctctggaggagaagtatacatcatttaccatacccaaacggaatggggaatccagagagatctatagtcctgtgtccgggatcagggagattcaggcccgtcttaatgaagtcctgaggcttgtctacgagcccgaacgcaaacaatctgtgcatggatttaccacatcccgcaacattgtaacgaatgccaaaaaccactgcaacaagaaattcgtcttgaacctcgatattaaagacttcttcccaaccattactcagcaaaggatcagaggtgtaatgatgagcccaccatacaacctgccgagccagatcgctaccaccatatcacatatctgctgttatgagggcaaactacctcagggcgcaccaactagccccattattagtaatatcgtgtgtgccaagcttgactcagagcttaggttgctcgcaaagcagaataaatgtttctacactcggtacgccgatgacattacgttttccacaattgtcaagaacttcccgctctctatcgctaagataactggacttaaaatcactgatgtgtctctctccgacaatctgatcagcattttcaagtctaacggtttccagattaatttcaacaaggtgagaatccagggagacaatcagagacaggaggtcacgggacttactgtcaacaataagcccaatgtctccaggaaatacattaggcaggtaagagcaatgctccacgactggcacaaaaacggttatgtgcaggcctatatcaatgacagtgctatacgctaccaaaaaaacaagaaccgagttaactttagctcggccctgcgggggaaaatcgagtttattgggcaagtgaggcaaaaagatgacttcatataccagaagctcctgacattttacgagaaactgatcgagcgagaaatcatccgtcagagatccctgaagttcgacgacaaagattataacaattggtgcgattctgtggacgagtacgctctacatatcattaacaactacatcgatgcgataagcgttgatatcgataatatgaaggagtgtatacaacagggatttgacgaacttgataaactccgcaagaagcaggatccagattatgacttgcctggtgtgccgatagcttatgcattcaaatacctcccccgcaagatcatagctatgacagcggttctgagtcactatttccgtgaggaaaatgtgcctatccctgagaaaatcttagatgtcgggtctggcacagacgcagtggggatcgcgttaggcctgttccggcaaaagatgtcatttcaaattaccgccatagaaccctgctcctatatgagacagtttgccatgttccggccttctctgcccaatttggaagttctcaatgtgaatggccgactaggcgactggttcaactacttgaacaacaactactttaacctgatctttatgagctccattctgcagaattcattcgaaaatctgggaaattcgtggtggctggagtgggcaaatgaactgtatcaagcctctaccaacaatgctcgattaattcttattgagccttcagttaaggttaagctggtgaacaagatgaagtgggccatggaaagttccggctggatcctgcgggaacagctgctcctgtcagatttgtttccaaacgtgttcaataagggctgccagttaaagaaactgacaagtctcaagcaggagctaatcggcaactactgtccatggcccgtcagcgggtggaatacctattacaagtacaacgaagtgattcacatctatagtaagaataaccagtga

SEQ ID NO: 7952 - RNA, 1725 nt, synthetic construct
  source 1..1725: mol_type = other RNA
atgactaaaacactgttgagtatcactccgattgaacagagggaggccttttttgccttaaaaaccagacgcgatatagcagtcttgctcggctataggtacgacggcctggtctaccaaatttacaaaatccccgcagaaaagaaatacgaaacattctttgttcccaagaagagcggggagctaagaaccatccacgcaccttcaccaaagatcaagcgcattcagcgattactgaacgaagtacttcagaatgtgtacaaaccgaaacccgttgttttcggctttactagtgggaagaatatcgtcgacaacgccagtaaacacaaaaagaagaattgggtgctgaacgtagacctcgagaatttctttccatctatcaatttcggacgagtgagagggatgttcatgcacaagccctacaacctccccgatgaggtggccacaacactggccaagatttgctgcttcgagaatagcattccacagggagcgcctacttcaccagtgataagcaatatgatttgtgctcaaatggacagtcagctgcaggatctggcttggaaacacagatgtttctataccaggtatgccgacgatatcactttcagcactaccctgcacgaatttccactggagatagcaaaggtgaactctgtcctttcaatcgatcttggtcaagagttaatcaacatcatccaacagaatggtttcgagataaaccatggaaaagtgagagcctttgcttatttccagaggcaagaagtaactggcctgacagtgaataagttccctaatgtgcggcggaagtttgtaatgcagatacggtctatgctgcacgcatgggacaaaaaagggctccagaccgctgaggccgaacactacgaactctacaataagagacatcataaccagaactctaagctgcccgcctataagaaggtggtgaaaggcaaaattgacttctttgggatggtgaagggattaaacaattccaggtacatggaattcaagcgcgagtacttgcgtctttcccgacgggacaaaaacgtcccttttaaaaacatttcggcgaaaaccgagagcaaaatcattatttacacagaaggcccgaccgatcccccaattctgaaaactgcctggcagaaactttatcaggacgagatccttttcatcattacccctgtggaaatcaagcccggaattgctacaggggcaaccgcactagccgctgagctcaatacccatcgcaagcagcatggcatagttattggtatcttcgatagggatgctgaaggcatcaaggcttataagtccctccacagcggagagtttgaggaaaaggatggattcaagatttccatcgaccggaacgcagccgcgattatcttgcctatccctaccggtaaagagaaattggccgaactggataaactgtggatagaaaactatttctcagaaacggccctaaatacgaaaacgaccgacggaaagggcctggcgtttgagtataagccagttgtcgtgaccaaaaagattggggacaagatcattgaagagacaaagacagatgagcgttccctcgagacagccgtcataaaggacggtggcaagcgcatctttgctgagaagatcgtgcctacgctccccgttgacgagtttaaggggttcgagctggtctttgagaaaataaacgaaatcgctgagttgctgcaggagctgtga

SEQ ID NO: 7953 - RNA, 1662 nt, synthetic construct
  source 1..1662: mol_type = other RNA
atgtcgccccacctcccacattttgttgcacgcatcgtgctgttgaagaacctgctggacgtgaatacgtcaagagagctggccacctttctgaagatcaattacgaaaaccagctgatatttcacgcttaccgcgtgcccagccacgagaaatacctgacattcgagattcccaaaaagagtgggggaacccgtaggatcctagctcccgcgactgctctgaaactgattcagagatctctggccgaaaagctgttggagatctataaacctcgagcatcaacctacggtttttgcctcggacggggggtcgtcgacaatgccaaacagcacttgggcaagcgggtgattctgaacgtggatttcgagaatttcttcccctccattaactttggccgcgtccgaggactgcttatggccaagccttactctatgcctaaggaagttgccaccatcgttgcgcagatatgctgccatgacaatcagcttccccaaggcgcaccaaccagccctgtggtgagcaacatgatctgcaggtccctcgatcggcaacttcagattatggcaaggaaacataattgttggtacacgcgctacgtcgacgacatcacaatttctactaataggaggcggttccccccgcagattgcccagagaaccgatgacctgtctgctaccgaagcgcagttaggggaggagttcaagggtatcgtggaaaatgcaggattcaattttaacccctccaaaaccaggatcttaacaaacatggaaagaaaggaagtgactggcgtgaccattaacgaattccccaatgtgccccgtagctacgtaagacaaatccgcgcaatgctccatgcttgggagcactatggctttgccgcggcccaagaagagtatattaaaaagtatcagccagcttgtcggaacgataagaagggcgcagtgaactttgagtgggtcgttagaggaaagctagagtatctccgtcaggtgcggggcacacaggatccaatcttcatcaagcaggcttcacgcttcaatcttctggcaagctcctctataaaattgccgctcgctgccgagacaacagatgtaactacctccacttggatcgtacagtctactagtgccgacggcaagaccctccaggaggggacagcctttttcttggaaggcgtcggtctggtaacatgtgagcattgcataatcggccctactattatattttcagcctccagcccaacgattgagttcccggtggtggctagtaaaaaaaacgcttataccgacgttgcgatcctgaactttacagatgacctccagcctacgaagacacaagacctcagaagaaacaaaggactgggcgataatctgccacctcctcttactgatatccgattaataggatacccaaactgggcacttggggccggtatgagtataaggctcgggcgagtgacctcaattaaccacgacgaacctcggtattttcagatcgacgccagcatcattagcggcaactccggggggccagtcttggatgccgaaggtttcgtcttaggaatggccagtaggggggcaccaaatcaagaggatgctcaaaagactaatgatcaccgcgttgtcccgattcaggccatcttcgacctatgtaatcagtga

SEQ ID NO: 7954 - RNA, 1773 nt, synthetic construct
  source 1..1773: mol_type = other RNA
atgtcactgagtaatccgctgcccccccgaaacgctgcctccttaaccgagctgtccatactgcagaccaagagggaggtggcctccctgcttggtatcaagtacaagtacctcatatactacatccataagtatccccacgacaagaggtatacttctttccagattccaaaaaagagcggaggcgtgcgtgaaatcctaagcccaatcggccccctaaagtttattcagaggcggttgtctgaggtgttgctcaaggactataaagtaaaaccttccgtgtatgggttcgtgaaggaaaaatccattctgaagaacgcacaaagacatgtgggtaagcgttatgtgttcaacgccgaccttaaagacttttttccatccatcaactcaggacgcgttcgcggtatgttcatgtcacctccttactctttaaataaagaggtagccaccttcctgacacagatttgttgtcacaataatgctttgccagcgggggcccctacgtctcctattatcagtaacatcatatgtcggtccctggataaccagttgcaagaactggcaaaggagaaccgatgcacctacacccggtatgttgatgatatcacgttcagcacaacactcagatcattcccccaatctattgctcacattaacgaagccggtcagatcgaggcaggcagccggttaaaccagatcgttagcgccaatggattccagtttaactctaaaaaagtccggctgcaggctaagaacaagagacaggaagtcactggattgacagtgaacgaaaagccgaatatcacccgcaaattctctaaccagattagggcgattatccacgcaatcgagaaatatgggctggaggcggcagagaaggagtttctggctaaacaccaaaaaaaacaccgcaatccaaaacttccaactgcgagtctgctgcgcgtgctgaaagggaaaatcgatttccttggcatggtacggggcaaatgcgacccgctgtatctcaagttcctgagacagctgaaggccatagctccacaaatggtgaaggacctccctgaacccaggaaggagtgcacaaaagttgaagtctggaccgagggcaagactgattggaagcaccttaaagccgccttcacaaatttaaaaggccaggggtactatatcaatcttgagattgacttcaaggaattcgaagacagtatgggggagggagagctgtttaagcactgtcccatttggagtaagacaacccatcagagccccttgatatgcatcttcgaccgagatattcctactagaacaaaagaggtcatgaataatggaaggtttaaagattggaccaataatgtcttctcttttacgatcccggttccagagcaccgtcagtccactcaagaggtatgcatcgaactctactacaaggattccgaactgaaaagagaagatagtaacgcaagacgactatttctctcgaatgagtttgacgcaaaaaccactattcataaggagattcctggcctcatatgtcctgataagaaggctaaagacgccaagaagttgaccgtcattgacaacaacgtgtaccatagcctcaaccataaacgggagaatatcgccctgccaaaagacgatttcgccagcaaggtgcttgctggcgaaaagaactttgatgactttgacttttcgcagttcaagaagatctttgatgtcattgtggaaatagctgacttttcaaggcgcaattaccccagcaacctctcaccctga

SEQ ID NO: 7955 - RNA, 1641 nt, synthetic construct
  source 1..1641: mol_type = other RNA
atggaaaagatgcagctgaagcttacagcatcagatgacgaacagattaccaagtttaaaaccctcaaaaactactacgacattgccaatctccttgaggtcgagtctcgctatctgaagtatttgttgtaccaccccaagaagacgcactacaagatcttcttcatcaagaagaaatccggcaatctgcgaaaaatctgcgcccccatttcctcactcaaaattatacaacagaagttggcacacgtgctttatctaatctatgctgcaaaaccaagtacacacggcttttgtccaaataagtcaatcgttacgaatgcccagctccatatcaagaaaaagtacgtcttcaacatcgacattaaagacttcttcccctcgattaactttgggcgggtttacgggatgtttaacgggtggccttacggccttccgtcgcgtgtcagcgctgtgcttagcaagatctgctgcaacgacaacgaattaccacagggggcccccacctcccctataatcagcaacatgatttgtgccaagttagatagcaaactccaggaactcgctaaacggtgcaacattacttattctaggtatgcggacgacataaccttctcctccacttcccggttgcctaaagagattgtggaatttgaaatcctggattccagtgtcgccataactacaggcgaaagacttcgaggtgttctgaacaacaatggcttcgagataaataacgaaaaggtgaggctcaagtataagaccaatcgccaggaagtcactggactcacagttaacgagatcactaatacaaaaagaaggtacgtcaaacaggtgagagcaatgctgaatgcctgggagaagtacggcttgaaaaaggccgacgaggagcatttcaacaagtttaacataaagcagcgtaaccccgagttcaaaaaagccagcttcatgcaaatcgtggaagggaaaatcagttttatcaagatggtaaagggtgagaagtctcccgtttaccggaagctggccaacaggttcattaatctatctggcaaaaagaagctgaagtatttcatcgatccaaacgatgagattaaagctgctctgtgggtactggaggacgacattacgggataccaaggcagcgcttttatgttgagcggagtgggactggtgacctgccagcacgtgctgtcaaagaatatccaggctttcaagtgtgaagatccatccaaaaaataccgggtatcttctgtactgcaagacaaagattgtgatctggcaattctaaaaatcgataccgaggatagtcattatttaaaagcgggaagatcagaggtgataagacatggtgagctgatcacaatcgctgggtttcctcaataccgactgggaggttctcttattatcattgagagcaaagtggcaggtttctatcctcgctttaattttaagaggatcctcatcgacaaacagattgtgggaggcaatagtggcgggcctgcgctgaatcgcgataatgaggtcattggcatcgtggcaaccggggccgaaaattttgaaactaccacaaagaccatagagtatggaatcattccgattgagctgatattcgaaatgctgaagaagagcgagatctgtatttga

SEQ ID NO: 7956 - RNA, 1611 nt, synthetic construct
  source 1..1611: mol_type = other RNA
atgaacaactatatagaagtggacaaaaacgtactaagggaattcaagaacctgaagaatgagagggatgttgctaatttactccaaataccctataacgtcctgcattactacattgtcatcaataggaacaacaactacaagaagttcatcatcaaaaagaagaacggagaaataaggaccatttatgccccaatcagttcactgaagattcttcagagaaagctccacaaaattctgagcgagttctataaggtgtactatcgcccatctgtgtacggcttccgagataatctcagcattgtggataacgcacggaagcaccaggataagaagaacattttccacatcgacattaaagacttcttcccttcaatctcttataaaagggttattgggttactctcatccgggatatttaactttccatactccgtcagcatcatattaacaaaaatctgctgttaccagggcatgctgcctcaaggcgctccgacaagccccatcctgtccaatattatttgcagtaaactggactacgagctgcaactcatctccaaagacaattattgcacgtatacaagatacagcgatgacatagtattttcaaatacggcgaatactttccctaaagacatcgctaccgacggcaaatgttcagacaaactcgtgagcattctgctccggaatggattcaagatcaatgattccaaggtctatttgcaaaggaatattcagagacaggttgttactggactgacagtaaatcagtttcctaacgtgaaacggatttacgttaaaaagatccgtgccattttgcattcctgggagaagtatgggctaaagaacaccgagtccatctactgtaagaagcgggaagtcgagaaagaaaaccggaaggaatttatgtgttctttggtgaaggtgattgagggcaaaattgcctttctgaagatggtgaagggtaaggacaactacacctacctcaaaatctacaagagattctgcgatcttattgggcgcgaatttccctaccacgatctacttaatgcactgaaagtggagaaacgagtcatgcttaataagtacgccaagtctatcagaaaatgtatctaccggtgcaatcagtcttacgcttacgatatctttaaacccacgaatgatcttatcaacagtttggacaatcttggaatcgacgccagagattaccatcgttttggtgataggatcgacgatttatatatgatcttctatgagggaaccggttatatagaacgcctgaaggagcattctttggatcgtacaataattaccgaaatcaacatactcaggacctattatcgacacgacattgatcacgggaagactaatgagatccgccggaaacgaataaaaacgatgaaggtgattcagaagtacatcaacaaaaacagcattatcaacgcaagtgaattggacctgtatatcttccagaagaagctgtacgacaacgtgatgatatttctggaagagctggaggagagcatcaataagaatacctataacaatgacacgactggcaacatccgccgcctcatcaaagagattattagttcgctgaaaagactgtga

SEQ ID NO: 7957 - RNA, 1530 nt, synthetic construct
  source 1..1530: mol_type = other RNA
atgcaggcattttttaaggcgtccaatctggaactgattaacagatttcacaaagtcgatgggttaattgacctggccaatctgctggaggtggattctagcgagcttctgcttctgttttacggattgaggcgggggggcggctactataaagagttcagcatcccaaagaaaaccggcggtgaacgcaagatactggcacccgactcgcgcctcaaattcgtccaacggaaactggcttacgtgttaagtctggtgtatttcggaagacccagcgtccacggtttcaggctaggtagaagtataattaccaatgctgaatgtcacgccagaaagaaatgcttgctcaacatagacctcaaggacttcttcccaactatacacttcggccgggtgcgagggcttttgcaggctaaaccctatggtctatcaaaaacaggcgcgaccgccgttgccggaatctgttgcttttgggggaagctgccccagggggctcctacttcacccgtaatttccaatatggtgtgcgccaaactggactatgagcttcaagccctcgccaggggagagggagctacctattcgcgatatgcagacgatatcaccttctcaactcaaaggaggaatttgtccgagaatatcgtgaagttcgaaaattctagctttattgctggccctaagctggttgaaataatcaggaagaatggcttcgagattaacaaggataaaattaggatgcggttccttaccgaaagacaggaagccaccgggcttgtggtgaacaagtttcccaacgtcaaacgttccttcatccgcgaaatccggattatgctgcatatgtggcggaaatttaacctagaaacagcctccctcttctatggtatgaaatttccaggacgtgagatctactttcctgaaattgtacgaggtaagattaacttcgtgaagctggtaaaaacggagcgggatccaacatacctcggacttgcagagaagtttaacgacttggtgggcaaacccgtctttaaaatcgtgccaatcaaggattggcctgacgaggagtacatcccggcaggacatcgctacagagccatcgagacgctcgagactatcttcgctaacgctgacaaggaaatcttaatcagcgacaactttctccgaaaagatatcgttggcctactggagaagcaggttggccgcagccctcgcctgaagattcgcctgctcttttctagaggccgttacaagtcagaggagcgaaagtacgcagagtgcattgaagcaattaagaagatggtgtccctccataaagatctgtctatcgactgtcgggaggttttaccagggggccctcatgggagaaatattatcatagaccgggaagaagtctaccacagcggacacagtttggatcagctggggtctagggccgatagtatcataaggatgcgcatccagtccgccaagagagatgccctgcaggacatcgagacatggttcgcgaactctgctgaaattccgttgatttga

SEQ ID NO: 7958 - RNA, 969 nt, synthetic construct
  source 1..969: mol_type = other RNA
atgcgcccggatttgctgaattcccctgaggtcctcaaagaaaagtttcggaacctaaaaaccttgatcgacgtggccgatattctggaaattgattgcaaaaccctgatttatctcgtgtaccggaagaataagcctacaaattacaaggaattcgtgatcaagaagaagtctgggggggaaaggcgtatactggcacccacctccactctgaaaattctccagagaaagctgaactacatcctgtcaatctgttacgagccgaggccctcagttcagggttttgtcaacaatagaaacatcgtgagcaacgcctccgcccatagcggaaagaaaatcgtgtttaaccttgacttgaaagacttctttccttcaatcaactttggacgggtaagaggcctcttcttaaaaccaccattcagtctcccagcacccgtcgcaactgcccttgcaaacctgtgttgccacaataatcagcttcctcagggtgctcccacatctccaatcatttccaacctcatctgctctagaatggacggagcgtttcaagcgctagtaaaaaaatataacgccgtctacacccggtatgctgatgacatcactatctctacacgacaagcttttttccataaagagattgttgagagtgggtcggcccctctgtgtgggaagggcatattaagtatcattgcaagcaacggcttcattataaatgatgccaagacgcgcatattacgtacaggtcgaagacaggaggttactggactggtgaccaatcgcacgcccaatatcaagagggagtatattcgggaaattcgagtgttgctggacaagtggaggaagtacgatctgagggtggctgaggaagcttatttcaagaatcgccttaaggaacgcgccccacacataaagagcgtggagttcagcaaaatcattgagggcaaaatcaacttcgtcaaagacggctga

SEQ ID NO: 7959 - RNA, 1656 nt, synthetic construct
  source 1..1656: mol_type = other RNA
atggatacgcagctaaaggcgagccaggatacaataatttctttatttgcagcactgcgcacccccagggatgttgcgaaacttctcgaagtgccttacggccttttgatctatcatctccacaagactcccccaagcacccgttatatctctttcgccatacgaaaaagagccggtggcgaacggattatttcagcccccggaaccgcgctgaagatcttgcaaatcaaactgaattacgtgctcaaaacagtataccgtccaaacagctgtatttatggattcatcgtcaacggagggatcgtgaaaaatgcaagcgtccatgcgaatcggaggctggtgtttaatctcgatctgaaggatttctttccaagtattcacttcggtcgggtaaagggcatgttctcatctcctccctacaactgtccctccgaggtgtcaaccgtcctggctcagatttgctgtcttcccaagacttatccctccctggctccatatgctcaattaccgcaaggggcccccaccagccccattgttagcaacatggtgtgctcaagtctcgactcccaactgctaagactagccaagaagtacaagtgcagttactcccggtacgcagacgacattacattttccactaacctgccacgcttccacgaggccatcttagtggagtcccaggccgaggaaggccgcatctctgtgacagctgggagtgagcttaaagctatcatctctagcaacaccttcagaattaatgagaacaaagtccggcttcagagggcaatgcaacggcagtcagtgactggcctgactaccaataaattccctaacccgccaagacgcttgatacggcaaataagggcaattctgcacgcttggaccaagtatgggtatgagaacgcccagaacgagtttaggtcacgatactttaatagaaccaggaatcctaacaagatggctcccgagctgaagcatgtcctgcacgggaagataaactatgtgggcatggtgagaggccagacagacccactgtatcttagctatctcaaacagctgaaagccctggcccctgaactcattattaggcaggtgattgacgttatggacgccctgtgggtcctcgaatctgatggcgcttacgcccagggaacgggatttagtttgaaggggtacggtatcgtcacctgctatcatgtgctgcgagctagaacaaaactgttcaaggccaatacgcctgcaaagaagtacaacatcgaagtcatcatacaggatcaggaactggacatcgcagtattggccacggacgggcctcagggccctgaattgctcctagaagaaggagagcgtccacgccaggatgactggattcttctgacagggtacccttcttactccgcccacgcaaccggagtggtcagaagggggcgggttactggttactatcagtttttcggcactgagcgaatgctcatcgacacaccgatcgtgtacggcaattccggtggacctgtgctcaatcaaagcaataaggttgttggcatcgcggccaaaggacccgtatcgttgaacgatgcccagaaaacagagaaatttgaggtgatcccgatatcgatcctgcgccgcttagctcccccagcaccaactgctcagtga

SEQ ID NO: 7960 - RNA, 1587 nt, synthetic construct
  source 1..1587: mol_type = other RNA
atgaatacagagctaaagagttcggacgaggaattgaaaaagaaattcttcgccctcaagaataaacacgatatatgcgccctgctggaaatcgacattaagactcttatctacatcctttaccgaaaaatgccatcgaccaattactccactttcacgattcagaaacggtctggggggcttcgcgtcataaatgcacccagcacatctctgcgcatcctccagcagaagttgaactacatttttcagctcatcggtatgatcgctccttgtgctcatggctacatcaatggtaaatccatcgtttccaacgctaagcctcacgccaagaaaagatatgtcttcaacctggatatcgaggatttctttccaagcattaattttgggagagtgagaggtctgtttatgagctacccgtactacctgccaaaagaggccgcaactatactagctcagatttgtacttatgagaacgaacttcctcagggcgcaccaacctcacccatcatatctaatatgatatgcgtcaagatggacaagcagctcatgaaactggcctatgataccaaaagctattacacccgatatgctgatgacatgacattttccacaaccctccggatgtttccctccgaactggcttataataaggccagtggggaaatcgtggcgtcttcaagtcttaccaaagtgattatcgacaatggtttcaagataaacaactccaagattaggctgcagaagtctacccagtcacagcaagtgaccggcttgaccattaaccaaatgcccaacgtgaaaaggacttatattaggaacattagggcgatgttgcattcttgggagaaatacggattagataaagcagaagaagaatatctgagtaagtacaactatcggaacaaggattacatcaaaccatgctttcaagacatcgtgaaaggaaagataaacttcgttaagatggtaaagtcagaggactcaaaagtcttccggaacctagcgattaagtataatcaattagccggaagtggattcagcgattatacaatcaatcagccctcagaggagatcctcttacagatctataccgagggaaaaaacacagaacatatcgagaaggcaattcacatactggacaaagatttgtctgccctgatttacaacgggaagattaagatcgttaatggggtagagcacagaagcggcgaccagcaactcaagaccacatacgagattatgagcaaaagtaagaactccaacaagttcttgtttgtgtgggattgtgactctaagaataagattaatagcctggttgaggagaataacttcttcaagtttgtgtttgcctccaacactgataatacgaaagtcgaaaagggcattgaaaatctctatcctgagtccctgttcactcaggacctctactccctggaagaaacaaaaaatgattacggcggcaaaaagagcgaggagaaattcgacaaaagcaagtttcttaacaagatcaaggaagaaacggacccttacgtgtttgagaattttaagccgctgttccgtgagatccgcaacatcctggacatgtga

SEQ ID NO: 7961 - RNA, 1584 nt, synthetic construct
  source 1..1584: mol_type = other RNA
atggacgtcgaattaaattactccaatagggagttgaaacagaagtttgctaacctgaagagtttgcgggaggtttcagatcttctcgagatttccagtgacaagctcaagtattacctctacattcttgatgacgagaagaaatataacgagttcaagattccgaagaggtcaggtggcactaggtctatctcagcgccaaacgatagcctgaaaatcctacagcagaaactgaaccatatactccggttgttctacaatccccgcgtttgcgtgtacggttttgtgaacgacagggatatcgtggaaggggcctctaagcatacggacaagaaatacgttctcaacgtggatattaaggacttctttccctctatcaatttcgggcgggtgtggggactgttccaagcaaaaccctttaatcttcccgaggaggccgccacagtcctcgctcaaatctgtatctttaagaattcactcccacaaggagcacccaccagtcccgtgatatcaaatttcatttgtgccaaactggatagtgagctgactcgacttgctaaaaagcataaggtcacatatacaaggtatgcagacgacctgacattttccacaaccatcccagttttccctaagagcctggccaaaattaacgatgccgggcagactatagtgggatctgagttggaggagatcattaacgacaacgggtttgaggtgaatcacgataaagtcaaattgatgaacagcagtcaacgacaggaggtgactggcatcaccgtaaacgaatttaccaacgtaaatcggagctacgtccggaaaatcagagcaatgttacatgcatgggaaaagttcggttatgaaaatgctgaagacacttttcacagagaatattgcaaccctggtataaaccctgaaagatccaaacctcctcttgataaagtaatcaagggaaaattggagcaccttggcaaggtgaagggcaagcacgatccggtgtttctgaagtattatcacaagctcgtaaaactagacgataagtacgaacgcgaacactataataagaagtaccagctgctggaccacaacgaataccccttcatcctggatcgcttgaatgaccgtttccaggacatcaagaagctgaaaccacatccgagaggctatgcgttcgaggacttcttaaacgagctgttcaaaacctactcgctagagccacgaaagccttttaagaatgtgggggagcagatcgacggatccctgaattttgagggaaatgcctacctgatagaagctaaatggcaggataaaaacatcgaggccaaacacctgaataatttccaggtgaaagtcgactctaaggccagctgggctcgcggcattttcataagcatctccccattcaccgatggatgcctgaaaaactttcgcgaaggcaagagcacgaagctcctgggcattctgggggatgaaattgaatccatgctcaagcataaaattgacttaagagaggttctgaagtacaaagcccgtaagtctgtcgagacaggcgattttttcaccaggattgagaacgaacttaaatga

SEQ ID NO: 7962 - RNA, 1095 nt, synthetic construct
  source 1..1095: mol_type = other RNA
atgagtaaagatacaagccattctctcctcctttatgacagttgtaaggaactgagtgagaaattcaagaagcttgagtcgcctcaggacgtggctcagctgctggaagtaccgtacaagaatctcatctactatatctaccgaaaaagcgaagatagccggtacaatacatttatcgtgcctaagaagtccggcgggtctaggacgattcattcccccaataaatctctggcgatcatacagaggaaactttcccaggtgctgtacactatctatagacctcgtgccagcgtccacggtttcgcagccaagcgtagtatcgttaccaatgcgaaggcacacatcaagaagaagttcattctgaaccttgacttgaaggattttttcgattcgatcaactttggacgcgtgagaggggtgttcatagccaagccatacgaagtcaacgagaaagttgccaccattctggctcagatctgctgtttcaacaataaactgccgcaaggcgccccctcttctcccataattagcaacctgatttgcgccaaaatggactccgaattacagcggttcgctgaggagtacggattattttataccagatacgccgatgacataactttttcaattaaccgcgatgaattgccatctgcactggtcgactcctataaaaaaggcctcccacatgtggtgctcggtaaggagttgaaatccatcattgagaagaacggattccagattaacgatgccaaagtcagactggcctataaaacacagcgacaagcagtcaccggcctgatcgttaacaagagcgtgaatgtaaaccggaaatatattcgcaatctctacggggcactacacgcatgggagaaatatggtctagaacaagctgtggagacttatatatcaaagtacgctaaaaagcccattctgccagagaaggacattcctgcttttttggactcattgcgcgggaagatcgagttcatcggaagcgttaggggcaaagacgatgacctgtaccagaagctcttaaatatctttaatggccttaggcggaaggaggccgataaggaatcaatcgctgtggaatga

SEQ ID NO: 7963 - RNA, 1095 nt, synthetic construct
  source 1..1095: mol_type = other RNA
atgtctaaaaacttgtctcattcgattctgctctatgatagttgcgaagagctgtccaagaaattcaaggaactgaaatcgccacgagatgtggctcggttgctagaggtaccattcggggacctgaattattatctctacaggaagtccgaagacagcagatacaaaactttcattgtgccgaagaagtctggcggttccagaaccatctactctccccacaaatcactctccatcatacagaggaagttaagtcaggtgttgtacgcggtgtaccggccccgtgcatccgttcacggctttgctgtccagcgcagcatcatctccaatgcaaaggcccacacgaagaaaaagtttatcctgaacctggatataaaggactttttcgactcaatcaacttcggaagggtgcggggggttttcataggcaagccttatgaacttaatgatcaagttgccactatactggcgcaaatttgctgttttgacaacaaactgcctcagggagccaggacatcacctatcatcagtaacctgatttgtgccaaaatggattcagagctgcagcgctttgcagagaagtacggttttttctacaccagatatgccgatgatatcacttttagcattacacgtgaagagcttccaaccgagcttgtcgcttgctataagaagggcctccctaaggtcgtgcttgggaccgagctacggagcatcatcgagacgaatggctttgaaatcaatgaggcaaaagtccgcctcgcctacaagacccagaagcaagaggtaacagggttaatcgtcaataacaagagcgtgaatgtgaacagaaaatacatcaggaacatatatggcactttccatgcttgggagaagtatggactggagaaagctctcgaaatttacaagagcaagtatgccaagaaaagcattcttcccgagaaagacattccccattttctcgatagtctgcgcggaaaaattgaattcattggttctgtgcgaggaaaagacgacaacctgtaccagaaattattgaccatcttcaatgacctgaaatctaaggagacaaatgccgaaaacattgaaaaatga

SEQ ID NO: 7964 - RNA, 1134 nt, synthetic construct
  source 1..1134: mol_type = other RNA
atgaagaagaaagcatacctgtcgcttttcctgtacgagtcttgcgaagagttgtccaagaagtttcaggagttacaatcccctcacgacatagctcagttactgcaagtcccatatgagtatctgacttattacctgtaccggatccctcatggcagtcgttacacagagtttcgggtactgaagaaaagcgggggatacagaaccatccacagcccgaagggatcactagggattgtgcagagaaagctcagccaggtcctgtatgctgtgtacagaccacggccttcagttcatgggttcgccgccagccggtctatagtgaccaatgcaaaagcccatgtcaacaagaaattcgtcctgaacgtggacatcaaagatttcttcggctcaatcaactttggccgcgttcggggtatgttcatcgccaatccatacaaattggacgagaaagtagccacagttcttgctcagatctgttgcttcgataacaaacttccccagggcgccccgacgtctcctgttgtttccaacctgatttgtgcgaagatggactcagaactacaacgatttagtaaacagcatggtctgctgtacactagatatgccgacgacataaccctcagtagtaaccgcaacgaactccccacttctttagtctcccactatgagaaaggactacccaatgtgatgctgggagatgagctgaggtccgtgattgagagaaacggctttcagattaatgaggcaaaggtccgcctcgcttataagacccagcgtcaagaagtgaccgggctcattgtgaatcaaactgtgaatgtatctcgcaaatatgtgcggaatatcgacggtgctctccacgcctgggaacgatatcgcctggaggctgcgacagaaacctaccgagcgaaatacgccaagaaaactactttccccgagaaggaaagcgcactcttccttgatagcttgaggggaaaaatcgaatttgtgggctccgccagggggaaggacgatcacctgtaccagaagctgctcaagaagtttaatgatctgaggaccagggaagcaattgaccagaagacaacagagacagagccattgcagaccacgttggaacttccctttaacgattga

SEQ ID NO: 7965 - RNA, 1077 nt, synthetic construct
  source 1..1077: mol_type = other RNA
atgaataagaacagttctttatcaatcctgttgtatgattcatgtgaagagcttagcaagaagtttaaacaactacagtcccctcaggatgtggcacggctcctgcagatcccttacgactatcttatatactacctgtaccggcggcccgatgacctgaggtacacaacattcagcatacccaaaaaatcagggtcgcatcggactattcactctcctcacaaatctctcgccattgtgcaaaggaagctgagtcaggtcttgtacgcggtgtattctccacgcccctccgtccatgggttcgcagcttccagatccatcgttactaacgctaaagctcacaccaagaagaagttcgttttgaacattgacatcaaggacttttttgattccattaacttcgggagggtgcgtggtctgttcatcgccaaaccgtacgagttaaacgagaaagtggcaaccattctcgcccagatttgctgctttaataataagcttccccagggggctccaagtagcccaattatcagcaatctgatttgtgcgaagatggattcagaactgcaacgcttttcgaaggagaatggattgttttatactaggtacgccgacgacatcaccttcagtctgacaagaaacgagctgcctccgggcctggtaagttcttaccagaaaggatttagccaggtagtgctcggcaacaaattacgatcaatcatcgagaacaatggtttccagataaacaatagcaaagttagacttgcctatagaaatcagaggcaggaagtaaccggcctaatcgtcaatcaaggcgttaacgtcaatcgtaagtatatccgcaacgtctacggcgcactgcatgcctgggaaaaatacggccttgaggaagccgtgaaggtgtatataagcgagtatgctaaaaagtccgtgtctccaaagcagaagtatatccaagactaccccgattatctgacgtccctgcgaggaaaaattgaattcataggaagcgtgcgcggaaaagatgacggtttgtaccagaagctcctcaacatcttcaacgagctcattaataagtga

SEQ ID NO: 7966 - RNA, 1101 nt, synthetic construct
  source 1..1101: mol_type = other RNA
atgaagaagaacatctccttatccccattgttatatgattcttgcgaagatctatctagtaagtttttgcagctcaaaagtccgcgtgacgtggctagactgctgcagatcccatacaactatctgatctacgccatttatcggaaagacgagagcctgcgataccgtacattcaatatccctaaaaagtcgggggattaccgagtcatttcctcccctcataaatccctcgccataattcagcgcaagctgtctcagattttgtacgcagtttataaaccccgccccagtattcatggctttgcggccaagcgcagtatcattaccaacgcccaggcccacaccaagaaaaagttcatccttaacatcgacatcaaggacttcttcgatagcattaatttcggcagggttagaggcctgtttatggcaaaaccttacgaactgaatgaaaaggttgccaccatcctggcccagatatgctgtttcaataataaattgccgcagggagcaccatccagccccatcatcagcaatctgatctgttcaaaaatggactcagagcttcaaaggttcgcgaaggagtattcgctgttctacacaaggtatgccgacgatctcacactatcattgactcgggatgagctgccttccgagctcgtagcttcatacaagaaagggtttagtcaggtcgtcattggaaatgaagtgaggagcattatagagcagaacggctttcaaattaacaattccaaggtccgcctggcacatcggacccagagacaagaagttactggccttattgtgaacaaaaatgtgaacgtgaaccggaaatacatcagaaacattttcgggactttacacgcttgggagaagtacgggcttgaagaatctgtaaagacatacataagcaagtatgctaagcaacccatactctctcagaaggacgtgccaacgtttctggacagcctcagaggtaagatcgagtttgtgggatctgtgaggggtaaagaagatcccatctatcagaaactgctctcaatatttcacggacttaagaacaaagagatcgataacgctattgtcgtggacagcgagaattga

SEQ ID NO: 7967 - RNA, 1065 nt, synthetic construct
  source 1..1065: mol_type = other RNA
atgtatgaaagttgtgaggacctcggaaagaaattcaaggagctgaaaagtgcccgagacgtggcacagattctcaaggtaccatataactacctcatttactacatctaccggacctctgagaattctaaatatcagacgtttaacctggagaagaaatccgggggctacagaacaatccactgtccaaataattccctggaaatattgcagcggaagttgtcacaagtcctgtattcggtttacaatcctaagccctgtgtacatgggtttgcagccaacaggagcatcgtcactaacgccaaggtgcatacaaggaaaaagttcgtgctaaatatcgatatcaaggactttttcgacgctattaattttggtagagttaggagcctgtttattgccaagccctatcaattgaataaagaggtggccaccatcctggcgcagatctgctgctttaaaaataaacttccgcaaggagcacccacctcacctatagtcagcaacctcatctgcgcgaagatggacaaggaactgcagaattttgctaaagagaacgggattttttacacacgctacgccgacgatatcaccttctcaataaaccgtgagaatcttccatccgggctggtcagttcttacagcaagggttttagcaaagttattctaggcgacgaactcagatccattattgaaaacaatggcttccagatcaacgagagtaaggttcgattagcctacataaatcagagacaggaagctacaggactggtggtgaacaaaggcgtgaatatcaaccggaagtgcatccgcaacctgtacggtactttacacgcttgggagaaattcggcctggagcaagcacagaagacttatatcttcgagtatgctatcaagcctgtgagccccaacaataaggtccctcccttcttggattctctgcgcggaaagatagaattcattggctcagtgagggggaaagatgatccactttatcggaagttacttaacattttccacgaactcaaagaaaaggagtccgataaaaacaacatcattgtgccgtga

SEQ ID NO: 7968 - RNA, 1095 nt, synthetic construct
  source 1..1095: mol_type = other RNA
atggaatcacgctctgatttcctgcagcccctcctgtacgaaagttgcgaggaactggccaagtcctttaaatcgctgaagtctccacgcgggctagcaagcctgttgaaaatcccatatgagtatcttgtgtactatgtataccggtttccccaggacaggaaataccgagctttcaaaattttaaagtccagtggaggtcatagggcgattctggtgccaaataaaagcctcaagatcgtacagagaaagttgtcacaggtcttatatagcatatacaaccctaggccgtgtgtgcacggatatgttcccggcaagagtattattaccaatgcaaagtctcatactagaaggaaattcatcctgaacatcgatatcaagtcattcttcaagtctatcaactacgggagagtgagaggcctctttatcgccaaaccttattgtttaaacccccctgttgccacatttattgctcaaatatgctgccacgagaatcatcttcctataggcgctcccacctccccagtggtttccaatctaatttgctccaaaatggatagtgagctgcagaggtttgcaaaggagcacggttgtttctatacccgctacgtggacgacatgacttttagcatcaacaagaagaatcttcccagcgctctcatagccaaccatggccctggcttttccgaggtggtcctcgggaatcaacttcgtgagataatcgaagaggataatggttttcagattaacagcagcaaaattcgtttgcggcactacacgcaaaagcaggaagtgacaggactgaccgtcaacaagttcgtcaatgttgaccggaaatatattcgaaacctgctcgccaccattcacgcgtgggagaagcacggcttccagaacacgatcgacatgtatatgaaaaagtacgccaaggaatcggtcctgccagggaaagaaacaccgaacttcctttcttacctccggggaaaaatcgagtttgtgggctctgtgcgcgggaaaaatgacttgacatacaagaagctgctgaataaattcttcgaactgaagactagagattcaaagatgatccggggaatctga

SEQ ID NO: 7969 - RNA, 1119 nt, synthetic construct
  source 1..1119: mol_type = other RNA
atgcgtaatcagaaaaccatctccctggaaggacgcacagacgatctgcagcaagactttctcaaggtcctcaacaacagagacttagcgaagctgcttgaaatctcatatcctcagttgatctatcatagcctgaagacaattaatagtgtcactcggtatcaaacattccaggtccagaaaaagtccaaggggactcgtaaaatttgtgtgcccaacaagtctctgaaaatcattcagactaagatatcccagatactatacagcatttacgagcccaaaagttgcgtgcacgggtacgtggttgagaaaagcataatcaccaatgcaaagtcacacaggagaaaggagtttattctcaatctcgacatccgcgattttttcggatctattaatctcggccgggtgcgggggttattcatcgccaagcccttcagcctgccaaaagaggtggctaccactatcgccaatttgtgttgccacgaaaataaactaccacagggcgccccgtcttcacctattctgtccaaccttatttgccagcaattggatagagagctccaatatttcgcacagaagaatcgactttattataccaggtacgctgatgatatcaccttttcgagcgagtatctggagagcctcaagtctctgataaagaacctggaattagtaaccgaaaactaccctatcctgctgaacaacgaacttgagtacattttcacaaagaatggtttcaccatcaaccaaaagaaggtgcggctcctgtacccccatcaaaagcagcaggtgacgggcttgattgttaacgaaaagctaaacgtggacaggaagtacatcagaaatttgagggccgcattgtatgcctgggagaaattcggacttgaggaagctagtcaggtttacctggaaaaatacgcgaaaactcctacactgcgaaggaagaaaaaaagttcttttatcgaggccattcgcggcaaaatcgagtttctgaagaatgtaagaggtgaatcagatccaatcacacgcaagtttctggacaagtatagcgagctctacgaggaatacaaaaaaaacgtcatacaggctaaagaggagccagactcccagtccacgtga

SEQ ID NO: 7970 - RNA, 1110 nt, synthetic construct
  source 1..1110: mol_type = other RNA
atgcggaaccagaagaccattttcctcgagggcaaaacagatgatttacagcaggatttcctgaaggttctaaacaaccgcgaccttgcaaaactgctggaaatctcatatcctcagctgatttactactccctgaagactatcaactccgacaccagatatagaacatttcaaatccagaagaagacaaagggtacaagaacgatttgtgttcccaataagagcttgaaaatcttacagaccaagattagccaaatcctgtacagtatctatacccctaagagctgcgtgcatgggtacgtcttcgggaagaatatgattactaacgcggcagcccaccgacgaaaagcatttgtgctgaatttggatatccaggacttctttggatccataaatctaggtcgggtgcgcggcttgcttatggctgaaccatttagtctgagcaataccgtcgccaccaccatttcaaacctgtgctgctaccagaataaactaccacaggggagcccgagttcccccattctgtccaaccttatttgtcagaaactcgatcgggaacttagccattttgcgaagaaacaccggttctactatactagatatgccgacgacataactttttcctcgaagagtttggatgccctgccattcctgattaagaatctggaccttgtgaaggagaaatatcccatactcctctctgacgagctcgaatacatattcacgtctaacggctttacgctgaatcagaataagatcaggatcctgtatccacaccagaaacaacaggtaacaggacttgtcgtgaacaaaaagctcaatgtgaaccgtaaatacatccgtaacctgcgcgccgccttgtacgcttgggaggaattcggactggagaagacatctcaagtgtacctcgagaagtacgctaaaacacccactttgaaacagaagaaaaagtcaccttttgtcgaggcaataaggggcaaaatcgaattcctcaagaacgtaaggggcaaaagcgatcctatcacccagaagttcttagacaaatattcggagctctattctagggacgttactcaagctaaggatgatcaggactctcaatcaacctga

SEQ ID NO: 7971 - RNA, 1056 nt, synthetic construct
  source 1..1056: mol_type = other RNA
atgtacctggaatccagctgtgaaaggctcaagcacgattttctaaagcttgagaataaccgtgagctagctgagctcttaaacataagcttcagccggatcacctactatgtcgtgcggataccagattcggcacggtaccgctcctttcagatcaaaaagagaagcggcgggtttcggaagatcgatacacccattaaatcactcaagatcatccagcagaaactgtctcaggtgttgtattcagtctaccaggaaaagtcttgcgtgcatggcttcgtggtaaacaaggacatcattagtaatgcacgagctcacaccaaaaaggacttcgtcctcaacatcgacttggagaacttctttggaacaatcaattttgggagggtacgcggcctgttcattggagaaccctataatctgccccaggacgtggcaactatgattgccaacatttgctgctataacaatcagctgcctcaaggtgcccctacgtccccgataatatctaatatgatttgtgagcgcctggacaggaagctgcagcaattcgccaggaagtataagctgttttacacccgctacgcggacgacattacactgtcagcgactcgaaaggagattccttcctctttagctaccgtctcacccgagaatagaaacaagatcgagcttggtgacgaattgcagaaaatcatttacgagaatgggttctccattaatcataaaaagacgagaatcgcctatagtgatcaatcccagaaagttactggcctgatcgtgaacaagaccgttaacgtgccacggaaatatatccgagacgtgagagcagcccttcatgactgggataaaaacggctatagcaaagcccaggaaaagtaccaccttaaatacgctaaacaaccatcactgcagagtaaggatagcccttctttgcacgattccctgagaggatctatagaatttattgggcacgttaggggaaggaaagataaggtgttctgtcgcctcatcgccaagttaacagtcctcaaataccgtgatctgagcaaaagttga

SEQ ID NO: 7972 - RNA, 2148 nt, synthetic construct
  source 1..2148: mol_type = other RNA
atgatagagtatgacaacaagtacaatcagtacttgcataagttcaccaaaatcaagacgtctctatctgaggataaatttaggctggtagaaatcaatctgaaaactatcctgagtaccaaaacattcaatggcctcttattcaccaatgagtgtcttaactacttcatcaacaaggacaagaataagtttcccgattggttcataaacaacattgaaagcgagatcaagcgtcgcgacgagctcctcaccctgaagaataatttcttcaagatcaaacacgagcacgagttagcggggatcttagggctggactacggtactctggtatatcacatcttcaaggtgcctgacaacaggaagtataagattttcaagatcccgaaaaagacaggaggatataggactctgtgttctcccatcagtaacatcaagttgatccagaaaaagcttagcgaaatcttgtacgaaatttatatccctcggattaatgctcacgggtttattcccggccgtggcattgtaaccaacgcacgaatccatgtgaaacagaatgcaatcctgaatattgacatcaaggactttttcccaaccattaatttcggccgggtgcggggcctctttctgaacaaacctttttattttcccaagtggattgcgaccttaattgctcagatctgcacataccagaatcagctgccacaaggatcaccagtgagtccaattatctcaaacatgatttgtagcaagctggataacaagcttagcgcaatctcaaagaagtatttctgctatttctcgagatacgccgacgacatcactttttccacgaagaaatatgatttccccgaggagctcattaggaaaatcaggattatcattgaggaggaaggattcatcgtgaataataacaagttccgcatccagaaaaagaatcagcgcaaagaggttactgggataacagtcaacgaaaagttgaacgttaagcgaaaatacatacgcaaaatacgggccatgttatcatcctgggagaaactaggatatgagaacgccaacaacacttttaacaagaaaattaagcccacttacccccacattaactttctccctcgactcgataattccttgcatggtatgattgaatatgttggtcaggtgaggggaaaagaggacaacatatacctgaagtttctagagaagtacaatgcccttaataagacaccacactccgaaagagccataaacaataacgaaacagactcaaaagtggagaaacgggaagagcacaatcaaaacccgcaacatgtgcctataaaagtgtgcgaactgctgaatagctttaaaaaagagggctcttacctcaagaaactcgttcacaatgatgaggataagcctgacctgccaaaaatcttggacggtgctaaaaatgagatcaacaccaagaagtcaattctgccctacgaactttattccaacatttgggtgaacctgatacgtctttacgaaaaggaggggatgggcgtctggaatagaaatgataagaagcacccaattagtattaccaagttcaacgacaagatcatccaatttaagaaggatatcagattcggcgcctcttcggatcagacgagcatgtttacaaccattcagtccattatcaaagagctacccaacaaacagctcgaaaacaagattaaagtcaaccctaatctggacaaattggacatctatactgatgtgcagcatatcagaaatgggttgaagataatcatagagcacgttattaagtacatcgacaaagggaatggaattcggattaatctgtccgaacttaaatgggtcaatgaaaagctgtacaagtatgaaatcagcatctgtaacctgaactcctctagttatatcaacaagcaggtgctgattaagcgctttaacgatctcgagcatgacctcccaaaactgaaagataaacacagttccaaagggcatctgtttaatagatgcgactggtacatagaggctatctttgacggccaaataagcaagattaacgtccttagcaaagataacccggatggttctacattcgaagatgcaaatcctaaatctaacgatggcttcacccatatactggtcttctacggaatgtga

SEQ ID NO: 7973 - RNA, 1650 nt, synthetic construct
  source 1..1650: mol_type = other RNA
atggtgtatatctataagatcgaacctaatcgcagatatacaattttctcaattcccaagcactccaagggtgagcggaaaatctctgtgccctttaaatccttgaagttcattcagaagaagttgagcaatatccttcagactgtgtatgagcccagcattcaaactcacggattcatccaagagcgctctatcctgaccaacgccaagctgcactcacggaaaaagtatgtgcttaatctcgacctcaaggacttttttccaagtattaatttcgggagagttcgagggttatttatccaccattacaatttctcaccagcaattgcaaccgtgctagcccagatttgctgttttgataatcagctaccacagggcagtccaaccagccctattatttcgaacatgatctgctctcgaatggataacgagttggctaaactcgccaaacggtacaattgtatctattctaggtacgcagacgacctcaccttttccacttctgaatactacttcccccatgagcttgctcggaccaaaatcgtgaataatttcacgataacgagactgggcgaagaattgagagacacaattgaggataacggctttaggatcaataacgagaaagtccgcctgcaaaagacaaacgagcgtcagatagtaactggactagttgtgaataagttcccaaatacaacccgcaagtatgtgcgtcagatccgtgcgatgttatatgcatggggtaagttcggactgcagccggccgaggaagagtacttcaaaaagtacgacaagaaatacagagccccctataaaatcaaaccgtcctacaagaacattgttcgaggtaagatcgcctttctgggaatggttaaaggcaaggaggataaggtgttcattcggtactggaaccaactggtggccctggctcccgagttcggtaaaccgatcgtcccaagtaccatatctgcttttatcccccctattatatatactgaaggcaaaaccgaccctaaacacatggaagcggccttgcaacatctgaagaaacgcgggacatttcacgacctgatcataaaattccatcaggaggagggcgattccgggctgggccatgacaacttactcaaaatgtgccagaacttcagtaaaactcctaacagcgaggccaggatctttctgtttgaccgggatgtcccaggaaatgtgaagagtagggtaacaggcaagggagaattcaagtcctgggggaacaacgtcttctcattcttacttcccattcctacgcacagagaaaacaacgcggatagcgtctgtatcgaactgtactttgaagataaggatctgatgctgaaggacgaattcgggcgacgcatttttcttaatagggaattcagcaacctcagcggcaggcacaaatcccttgatttgatttgctccgacagaaataagataaagagttcactcctcgagataatcgattcttcagtctacgattctaatgaccagaacgttgccctgagcaagaacgacttttcgaacctgatactcgagaggaagcatcctttcgatcaggtcgacttttccgcttttctgaagatcttcaaagtaatcggggacattatcagcaaagtgaacgctaatgcatga

SEQ ID NO: 7974 - RNA, 1695 nt, synthetic construct
  source 1..1695: mol_type = other RNA
atgaagaagtatactgtgaaattaaacgagaacgaaatcaaaaggcggatagccgacttttgtgacgattccaaaggcgaaaaaacgattgaggacttcctcgatacaagtttaaagggcctgaagatcaaactgtacaagaactacaatgaactctataaggaaaagatgatcctcaaaaggaacggtgagcagcgtatattaagagtgccgaataattacctcaaaaaaattcagcgcaacctcaattacatcattcaaacaatctacaagggaaagtttactagtcatgcgtttgagaaagcttccgagggcaaatccaaaaatattatcacaaacgccaagattcacactaataagaagttcatccttaagatcgacttgaaggatttttttccttcaatatcgttcccccgtatttacggagtgttccagaaacctccattcaattttgataacaagactgccaggttgctggctcatatatgcatattccagaagtccctttctaaagacgatgtcggagaactaccccagggggcacctaccagcccaattctgtctaatctggtttgccggaatctggacaatcagcttttcaaattgtgctctaaaaacaagtgtcaatacagccgctatgctgacgacattaccatcagcacgaatctgagcatcatgcctaatgaaatttacagcaacaacgatatctccacccagataaaggagattattaagcagaacggtttcattatcaaccaggaaaagaccaaattgttgacacagaaaagaaggcaaatggtaacgggattggtagtgaacaaaaaagtcaacctgaagcgaaattatatcaagaatatccgcgctatgcttttccagtggcagcaaaagagaatcaaatacatgcgcatactcaagaataagaagaacatcttcaccatcattaagcttatcaagaagtcgaacttcaagaacattaactctaagaacaagaacgagcgaaagaaaataattaaggatctgctgagcaatgacaagtacaacaatactatctacttcattgccatgaaaagtgcactactggatgtggagaaagagatgcacgacaagtactatcagaacaagtttgacaaacccaaatttaaacgggtgctgtcaggtagaattgggttcgttaggaaggtgaggggggatgaggatgatatctatcggaaactctggaatcaatattgctacctgaacaataagaagaagaagatcaaacccctgataatcaagaatgtgagcgacgatccgatttggaatattattaacaaaggggagtctatggagctggaactaaaacaggaatactcagaacagcatttactggagacaatcaacgcctttctcaattccaaatttaatggcacactcatctttggcgttgaagacctgacccacattatctacggcatcgacaaagagctgaagactaagagtaaagacgcctttcgaaatgagatcatacacaaaatcttcgatacctttaacccacagaagcagctgcccgtcatgtgtaaattctatgagcgctacaagaaaaccatttgtataatcgaagtccagccatatggagagagaatctatcttgacgcaaagaacaagatttatttcgaacggatggatgggtattcacaaaaaagacaagacccttga

SEQ ID NO: 7975 - RNA, 1731 nt, synthetic construct
  source 1..1731: mol_type = other RNA
atgaagaagaagtttcagcatgacctcaaggcttccaaacagcagattcttgaaaaactggacaagatcagcaataatccccttgccaccaagaaagacgtggccgacctgttggaacggaacctgcaggcactttgtataaaactgtacgtcaacaccgatgatctctacgagatcagtaagatacaaaagaagaatggcaaggaaaggataattttcaagccaaacccttatctgaagcaggttcagcgcaacttgttgtatatcttgaacttgaagtacgagtcaaaattttgtagccacgggttcgagaaagacaaatccatcaaaaccaatgctgccactcatgtgtctaaaaaatacatcctgaagtgcgatatcgagaatttttttcccacgatcaacttcaagcgcgtctatggagttttcaaatctccaccttacaactttaaccctgagattgctgcattcttagcacacatttgtatttatcaggtgtcaacaactgataagcacgatctcggtatattaccgcagggggcgcctacctctccccttatagccaatctggtttgcagaacgctggataatcaactattcaagctggcgaagaacaataagtgctattacacacgttatgcagatgacatgtatttcagcacttatctaaccaactttccggagaagttgtatacgaatggtaaactgagcaacgaaattgaggagattatctacaacaacgactttcgaattaactatgacaagaccaaactgatgtacaataatcaaagacaagccgtcaccggaattatcaccaataaaaagctcaacgtgaaaaggtcctacattaaaaacactcggactatgttatacctgtgggagaagttcaagaataaatatacgctgcagctgtttaatgctacatccgaaaaggataccgttcttcatctgctaagcctctgcaaatctctgatattcttcccttcaaaatctgaattcaagaaataccacacactcaacgtcactgaacaggaggaccttgtgcaaaagtacctcaatgacgataataaacgtaagaacatgtactacgccatcgctaccgagttatccctttatgaagccgaacagctcatgcacgagaaactgtataaaaacaaagtcaagaagccgttctttaaaaatgtgctccggggcaagattggctatattaagctgatcagaggagaggacgacaacttgtatcgcaaactgtggaacaggtactgcaagatcataaactcaaatcagtttaagccactaatctaccccaatactcctgataatagaatctacaacatgctccacagcgtgaaagaagggctggatgtggaattcaaagagtattacgacaagaaaaagctgctggagacagtaaatagttttctcaattccgataagggaggtcagcttatcttcggcatcaacgacattaccatggagatcaccggcatcgacaaggagattaataagcaacaaaaaggggaagacggcttacggacaatgataactaacatcatttgctcgaagtttcatcccacaagtcagctcaacatcacctgtaaattccacaagatctacaacaagacaatttgtcgcatcgaagtacagccataccataataagccaatctactacgagcccgggaaatattatattaggcaggatggacgaaaacagctggtgcagacatga

SEQ ID NO: 7976 - RNA, 1737 nt, synthetic construct
  source 1..1737: mol_type = other RNA
atgaagaaaaatgaacacaaaccgaaacacaatctctttttctccgacgaaattatcctggagaagattagtagtctccagaacaatgtgttcgccgagaaaaaagatatggcagccttgttaaaatccaatatcatagccatcggaattaaactgtacaagcacaatcatcttctgtacaaaagcatatctatcactaagagggatggcaccactcggacgatccgagagccaaatgcttatctaaaacagcttcaacggaatctggtgcacattctcaacctcatctacaaaggtaagttttgttcccatggatttgaaaagggcaaatctattgtgaccaacgccaagttccataccaacaaaaagtacatcttcaagatagacctgaaagactttttcccatcgattacctttgcccgcgtctatggggtattttgctcgccgcccttcaacttcaacaaagatatctctatcttgctggcacatctctgcatataccaggagactctgtcaagtgactctgagggtgaactgcctcagggtgcgcctacaagccctataatctctaaccttatatgccgtagccttgataatgacttgttcaagttatccaagaagtataagtgcaattacacaaggtatgctgatgatattacgtttagcacaaatctcagcgtttttcctaaggagctgtacgataattcccagatcggcaccgagctgaataagattatcattaagcaccagttccaaattaacgagtctaaggtcagactggtgtcaaataagagaagacagatcgttactgggatcgtggttaacaaaaaaaccaacacaaagcagagctatatcaagaatatacgaacaatgctccacaattgggagaaggcgaagtataaatatgtgcatatcctgttagactccaaggtaactctggagaagaaaattcagctggttaagctctcaaaaattcccatcattaaaccatgttccgaggaagtgcaggtggagaactttaaaaagtttttcgacgaagagaacaagaagaacaatatccacaacatcatcaaactggctatcgagcttggtctgcaagaagcagaagccgagatgtatgagaaattgtacaaagacatcgaaaagaaacccagttttcaacgcgtgctgctcgggaagatgggacatttgaaaaatgtgcggggcgaagacgataacgtttacattaagctttggaatcgctactgcaggatcgtgaacatgaacaagtacaagcagtatagcgtcaaagacattaaagaggatggattgtggttcctgctgtacagccaggaggaaaatcttaacatcgagttcaaggaaaactatcaaaaagatactgtgctaaaggtgataaactcatacctgaatagtgaaaccggaggagtattaatcctgggcgtctcagactatcctagagagattgtcgggatcgaccatgaaattaaaaagcaccagaaaggcgaggatggcttcaaactatccatgcagaatgctatcattgacaagttcaagccaaacaagtcactcaacattaactacaagttccacaaattctgtaacaagacgatttgtgtcatcgatattaagcatgagaaagagcccatatactttagccccgaagagaaggaattttatgtcaggcagaacgggaatacaagtaagttgaaccactctaatccatccgaaaccatatga

SEQ ID NO: 7977 - RNA, 1602 nt, synthetic construct
  source 1..1602: mol_type = other RNA
atgaagcataatctcaagagaaagcccaaagacatcatcgagaagtttaaagctctctcttcacgagaggatgtcgcggaccttctggaaatcagcgataagcagctgcggtactacctatactccctgtccgatactgagaagtacaccaagtttaacatacccaaaaagaatggggggtccagggatatcacggctccaataaagaacttcaaactcatccagaagaacctggcccatattctgtatcttatacacaatcctcggatttgttcttacggcttcgaaaagaattacaagaacaaagaacaggagacagtgtacaaaggcatatgtccaaatgccaagctgcatatcaataagaacaacgtgctgaatgtagatctgaaggacttctttactagcattaattttggccgcgtgagaggaatgttcatggctttaccccataattttagttcggatgttgctaccgttatcgcccagatctgctgcaccaataatgcactgccgcaaggggctcctacttcacccatcatctccaacatgattctaaaaagcttcgactccaaaatgctcaagttggtgaaacctttgaaatgtacatattctcggtatgcggacgatatcactatcagcacaaacctgaagacgttgccaaaagagatatacgattacacccagaatagcatatcaaccgacttaaacagtattattgaggataacggattcgaggtgaacaaacagaaaatccggcttcagacaaagattcaaaggcagtctgtgaccggactaatcgtaaataagaaaaccaatgtccctcgtgattatattaagaacattagggccctcctgtttcgctgggagaaagatggcgaagaaaatgccgacaaatacttccaggaacactttaaaaagtgtaagcttagaagagtgcttctcggccggatctcacatataggaaacgttcgaggtgtggaggacccgattttcattaagctctggaacaaatatcacatcttaatcgggcaatccgataagatcaaggcactgattagtgaggacaaggagattttgacactgattagtaagggcgaaaatagcgagctcgaattcaaacaggcatatgaatatagccaggatgaaaaacgctgcaacaataagctgtattacaggcctcaagggaaaaaagaggacatccccaccatgaaacacaaagtattgaagacagtctgcgcctttctgaactccaattcgggtggcacacttctcctgggagtcgaggacaattcaacgataagaggcctgaaagaggacatcaagaacaataagaacaacctggactctttagccttgtctattgaccacgcaatcaaggacaacataactcctagtccaatcggtaacattaagaccaagttctacaagattcacaacaaatacatctgcaagattgatatcgagccatattacgaccccgtttatctgaaaactcacgggggaattttttatgtgcgtcatgacgtcgagagcgtggaaatcaaggaaaaagataagattgaccagtggatcagggcccacaacaaactccaacgcaattga

SEQ ID NO: 7978 - RNA, 1713 nt, synthetic construct
  source 1..1713: mol_type = other RNA
atgaagaaaaacttcacggatctaaagacaaaaaacgacctggccgagtttctagacataacaataaagcagcttgattacaatgcctataacgaggacaagaaatacaacaaattccacgtacccaaaaagaatggatccaagcgcgagatatatgcaccaattccaagcctgaaaaccatccaaaaaaaactcagtaaggagctcactaaactgtacttgcctaaaaaacacgtgcattcctatacttcaaaaaagggcatccgcaccaacgctaagattcatgtcaatcagaggtttgtgttcaacatcgatttggaaaatttctttccaagcatcaactttgggagggtcagtggcgttttcaaagcacctcctttcaattttaacaacgaagtggcctacatccttgcgcagttgtgctgtcaccagaactcactgccgcagggatccccctgttcccctgttatttctaacctaatttgtcgctcacttgataacgacctgaaacgcctggccaagaataacaaatgcttctactcgcgttatgccgacgatatcacattttctactagtctgcgcagattcccagattctctctgtaagatagtgaagcacgagatccaaattggtgaaaagctcaacgagatcatatgcaagaatcgatttagcatcaatccgaataaatctagtctcaagcggccatatgaacatcagtatgtgaccggcctgaccgttaaccagaaggtcaatgttaaacggaaattcctgaagcaggtgcgagctatgttacacgcttgggagacttttggattatccaatgccgcgcaagaacattttaacaagtatagcgtaaggcacaaatctaagaaggacgactcattgtttatcagaattatcgaaggcaaactgctgttcgtggcagatatacgggggaagaatgatcccatcttcaaaaaactcctggccaagtttaaggtgcttgctccaaaggatacgttaaagaactacctctcttatcagggcgataagatcctggtgtataccgaaggtaacacagactggatgcatctgaagcacgcactggagtcctttaacgtaattaataactacctgcaagtgaattcggcaattaaaatctacgagtacgatgagactttaacaattggtgacaaaaagcttatggagatactaaggggccatttgctgtccgacaacaccaggcccataattggggtgtttgatagcgataaccctcagacactgggggagttcaatcctacccgaaaccggaagtacctgaatttcgacaatcgcgtctttaccttctacctgccccaaccctttcatcgtaagacggacaaaaattgcattgagcactactataagaaccacgacctttgcatcaaggacgagtacggacggagaatttttctgagcaatgaattcaatgaccagtctggagaacatatcgaaatggaaaatgtgcgttgtgatttcggccagaagaagctcagaatgactgacgggattatcgatagcaaagtctatgatttggaagagagaagtctcgctctcagcaagaaagactttgccaggaatatccttagcaaacacgacaacttcaaaaaggtcaatattgactcattcagattgattttcgaccggatccaggaaatcattaaggatatcgagtccatcaagaacgagtga

SEQ ID NO: 7979 - RNA, 1797 nt, synthetic construct
  source 1..1797: mol_type = other RNA
atggaatcaaataaactgtcaccagaagaactcgctaagaagaacgaagaactccggaattcatttctagccactgacagtattaagaaactggctgtgttcttcaacttacggcactctgtgctgacttaccgcgtatataaagtgcctgaggacgagaagtacaaggagttcaaactcaagaagaaaaatggggggattagaatcatcttgtcacctaatgagaagctgaaattcttacagcgcaagatatcggacgttatatacttgatttaccggcccctaatctatagccatgggttcgagaagggtaaatccgtcaagaccaatgctcagatacatgcaaagcagaggttcatcctcaacatagacctcaaggatttttttagcagcattaatttcggcagagtgaggggaatgtttatgtctccaccctttgccttttctcctgaaatcgccacaatcttagcccagatttgctgttacaaaaatgcgctgccccagggggctcctagttctccagtgatctctaacattatctgccttaagcttgatcgccagctgtccaaattcgcgcttgaaaacaagtgttactactcacgatacgccgatgatatcacattctctactagctgcaagaaatttccgaaacagatctcctctatcaaaacgggcaaggtcaagctgaatactaaactcgaaagtatcatcagcaagaacggctttgagatcaacgaggaaaagattagtttccggtcggagtatcaacagcaaattgtgacaggcgtcgtggtcaatgtatcccccaacgttaagagaaagtacgtaaggcaagttagggctatgctgaacgcctggggaaagtatggcctcgaggaagccgagagagagcacttcgagaaatacagcacaaagaacagaaacatcctgcgacagcgcccgtcacttcgtgatataatctccggtaaagtccactacatcgggtatattcgcaaaaagttgaccggatccgacaagctgtatatcaagctcaagaaagatctggagaaactgattaaggaggaagacagcatccccaagtatcaggacaacggtagccagctaccattgattataactgagggacatacagactggaaacacctgaagaacgcactgtcacattttaaagggtttaagaaggatgcaattgacgtggagttttgggaatatgaacaaaacctgaagttcggagactcggttcttaaaaagttttgtctgaaagagtcacacaagcccaaatcccggaaatacatttgcatttttgaccgtgattctcctgaaatcattaagtccatgaatggcgataacaacagtagtttcaaatattggggcaataacgtctactctttttgtctgccaactccatccaatcgagaaaattattccaatatcagtgtggagatgtattacacggattccgaggttaataccattgacactgacaccggaaagagcctgtttttcaccaatcagataaaggaaaccattgaggtcaatcttaccaacaatacaacgacccagaaaagggagatcctcaaaacccctttggcaatcaacgagttcgataagaagatattcgactacaaagtggatttgatcaagaacacaacaggcgtgcaagtggcccatagtaaaaccgtgtttgcatccagggtatataatagccacaaagacttctctaactttgatttaagcgagttcgaaaaagtgttcaccataatcagcgagattattaaacacaactctagccagtga

SEQ ID NO: 7980 - RNA, 1632 nt, synthetic construct
  source 1..1632: mol_type = other RNA
atgaagttcacagagcttaaagcgaacattcagcttgccgccaagctgaacatggattatagctacttcacctatctcatctacaaacgcaccgacgatcaaaattatatcccatacatcatccccaagaaatccgggggctataggaaaattgcagctccttgtaaaactctcaagtatatacaacggcagatcgccaattttatctacgacgaaatacaggtgaaagattgtgtccacggttttgcaagaggcaaggacattaaaactaatgccaactatcatctcaagagaaagcatatcctgaacctggacttgaaagacttcttcgatagcatcactgtcaaccgagtgtacggtgtatttcatgggcacccgtttaactttccagaaaagttatcaagctgtctggctaagatcgcaacatattacggctctctcacacagggcagcccacttagtcccatcattagtacattggtgtgcagaagattagataatgaccttaaagcctttgctgtcaagtacggactcaggtactctcgatacgccgatgatattaccttttcctctattcggaccatgaaggagctgtttaaagagaatcccgtgacaaacaaaattattttgtgcaaggagttggtggatatcataacgagaaatgacttccaaatcaacgaagataaggttcgatatcgcaacaagacccaaaggatggaagtcactggcctgattatcaacgataaaccaaacctcgtccgcaactatcgtgaccagataagggccatgctgcacgcctggaagaagttcggttatgagaatgcggagaaagaatacctgtccaagttttcccgcggacacaaaagcttcaaacaggtcatctacggtaagctcaatttctacaagagcgtgcgtggcgtgacagaccactactaccagcagatggctaaactgttcaatacactatccccagacatgaagctcttgctgaagcctacacctgaggaaataattcagaaggcagtatgggtcattgataatacagtaaatgctgagaagaacgattctccgattgaacggatgtctcaggggacgtgctttttcctaaagaacatcgggatcgtgactgccgcccacgtactgtttcctaacaaaaagaacaccaccgacgagttcgacgtggacttcaatcagtcacccatgtccaatttctatatccttaacccaaccaatcctagccatagggtgaatgttcagctcgtgaatctggacaagaatcgcgactgggctgtgttatccctgaaaaacactaacgatctgtctattaaccgggactacttcgagcttgaatcatgctgcaaaattcagacgggcactgaaatcatgctgtgtggatatcccagttttgaactggggcaccagatcaggaaagaaaccggccaaattgtggcaaagaagaccgagcacgcggttaagaaattcgagatcactgctgatatacggcatggcaacagcggaggacctatactgaataataagatgcaggtgttgggatgggcagacgccgctgaccccagtatcgttaatgagattggggagctactggataactacaaatcgacctcagtttga

SEQ ID NO: 7981 - RNA, 1671 nt, synthetic construct
  source 1..1671: mol_type = other RNA
atgaatgatcccaccgagcaggccaaactggagcaagccttcagaggccttaagacacgggatggagtcgctgctttactgggcgtcaaccgtagaagcttggcataccaggtgtttaggcaccctaagccgtatatttcctttgctattaagaaaaggagcggaggtatgagaactatctctgcccctaaccccagcttgaagaaaatacagcggtccctttctaagtacctctgcgcagtttataggactcggaatcctgtgcatgggtttgccctggaacgatccatcgccaccaatgggaacgtccatctggacaaaagatacattttgaagatcgacctcaatgagttctttgactcaattcacatcggccgcgtgatcggacttttcgagaaggtgtttcacttcaacaaagacgtcgccactttgctggcccaaatctgctgcaggacaggctctcttccgcagggcgcacccacaagtccagtgctatcaaacctgatatgttggaacctggataatgaactccggcgcgtggctatgacacatcggtgctcctacacccggtatgctgacgacataaccttcagcaccaaccaggcacgcttccccaaagatctcgccacgatcgcagaaatcgatggagtggccgcagtgactgtcggtgctgccattattggagttgtgactgccaacggtttcaccattaatcaaagcaaagtgcgactgctcacgaagacccagaggcaggaagtgactggagtagtggtgaatgtcaagagaaatgttgaccgtcgcttcatccggaacataagagctacactctttaagtgggagaaactggggactctgcacctccagaagcagtacgaagatgtttatcgtagatcggcaaatccctctaggccaccagccgccatagaagatgttattcgcggaaggattgagcacatcgcttatatcagaggtcaaagggacacactatatgctgggctggccacacgtttcaataagctcgcggaaaaatggctgatcattcccgcgaccgcctttgaggcgttcaccgctcgattacggcgagcggtttgggtgattgagtgtgacggagacaaactaagtcctgatagtgagccaagcgacggcgccttgatgcaaggcaccgccttttaccttgaggggaccgggtgggtcacttgtgcgcactgtgttgagtgggatgggattgacaatagcaaggtgaagtacctgtttcgacctgataacccctctaagcggtactctttcaaaatctccagatcccagccgacggtagacgtcgctgtgatatccgccgacataccagcaagcgaatacgaacccctgcagattgccgctacagcaccttcacgcaacaatcttgtacaggtggtaggttggcctgagttccgcctgggcgatgagatcaccgtgatggacagtagaatcatctcgtttacaatggtcagtggcatcaggaggatgcgcgtctctgccccaattatcggcggcaattcaggtgggcctgggctcaacgctgatggccaggtgatcggagtggttgtaacggggtcccataaaggcgaacagactattaacaacgcattaatccccatttcagcactgagctatctggaggatacaccagactga

SEQ ID NO: 7982 - RNA, 1137 nt, synthetic construct
  source 1..1137: mol_type = other RNA
atgatctgtagcccgctggatacccaactaatacggttagctaagaaatatggaatcgtgtacactcgctatgtggacgatataaccctcagcacatttaacgattccttccccgaagctatagtcaagggtgaggtgtccaatcttattatcggctccgagctggagaacatacttaagcggaactccttcagtgtgaatctggacaaagtctttctgaataataacttcacacgccaagaagtcaccggccttatcgtgaatcgattcccaaatgtgaaaagggagtacatcaaaaaccttagggctattctccacaactgtttcaaagaaggaatatacgaaacggccttagaatacatttgtaagggctactgcaagaacaaggatattatcaagaattctgacaacaaggagtgcgtgaataattggttcaaatacgttctgaagggcaaaatcaacttcatcagagaaattaaaggcgccaatgattacatctttctgaaatatgcccagcagctgaatagattgttcaacgaggaactcttcaatctggactttttagacgagttcatctacaacgtcgttgtgctggagactatgaaccccgataatattgttcaggggtctggtttttttattaaggatcgtgggctctttactaactaccatgtaacggagaacaacgaattttactcggtaaaaacatacaagatggagaacctcggcgcggtgttgaaggggatgaatgaaatcaacagtaacattgacatcgattatgcactgtatgacctgaagtcttcaaagatctcaggattggagctgggagagtctaagaatatcaagataggggacaaaatcgtcgtgataggttatccagaatattgcgataatgacagccctaatatccagacctgcaatatcattagcaggaccaactatcttggggaatgtctgtatactatttcagggagaattgtccatggcagcagcggcggcgtagtgctcaatatgaaccacaaagttatcggaattatcaaggcaggggtggtcaccctcaacgagtcagacacatccagtaaacagggttttattcctattcacctggccctagagcatttgaacaagggagtttga

SEQ ID NO: 7983 - RNA, 1665 nt, synthetic construct
  source 1..1665: mol_type = other RNA
atgctgcgtgatgagttctaccggctgtccactcgagaagacgtggccaagatattggagatcgaggaaaaaagcctacggtacttcctttacgccaagaaacctgataatatgtataccaccttcaagatagctaaaaaaagcggcggcacccgggaaatttccgcacctgccaaggaactgaaggctatccagcgcaagctcgcttatatcctgaatctggtctaccgggtaaaaccaagtgtctatggcttctttcatgaacgcaatatcaaggacaatgcctctaaacacactaggagaaaagtcattctcaacatagatctgaaagacttcttctcccaaatccactttggcagagtgcgaggtatgctgatgaataagccctacggtatcgggcaggaggctgctaccgttatcgcacaactggcgtgttacaaggggatattaccacagggtgcgccatcaagtcccgtgttaaccaatatgatttgcagccctttggacacccagctcacaaacctggccaaaaaacacggtctggtttatacaaggtacgcagacgacattacgttttctactttcaacccggtatttcctaaagacatcatagagcgagacttgagctctattatcatcggccaggagttggatgctattctgaaaaaaaacagcttctccgtaaatcccaagaagatcttcctcaataataacaaggtgagacaggaagtgacagggctggtggttaataagtttccgaatatcaagcgcgagtatatcaagtccatccgggccattcttcataattgtttcaaaaatggcgtctacgaaacagctatcgattacgtggcacgtgggttttgtaagaacaaagacatcgaggagaacatcgataacatcgagtacagggacattatcatattatggttcaagtctgtcctgaagggcaaaatcaattatatcaaggagataaggggctcagatgactacacattccttcaatatgccgatcaactgaacagactcttcggagaggagatttttaacgtcgagaagcataatgagttctttaacaagatcgcctacaacgttgtgattctggagaacagaaacaagctggtacaggggagcggtttctttttgaaagatgttggactggttactggataccatgtgactgaagatcgcggattttttatggtgaccacatataaaggggagaatattggcattgtgtctaaggagatgaatgagatcattagcgacaagaacattgactacgcaatctataatcttaacaactcgtcgatggagggactcgaactcggggattccaatgagatcgagattggagataaagtgacggtcgtggggtatcccgactacattgagggcgatacgccctatgtgcatacctgcgaagtgacatcaaagaccaagtatctaggagaatgcctatatactgtctcagcgaggattattcacggggcctctggcggggccgttcttaacaaggacaacaaggtaattggaataatcaaggccggcgtggtcagttacgaagaaaaagaagacgtgggtaagcacggatttgtgccaatacacatagcactcaaacactggatgagtcagcaggaaaaccagaaaattaacactgaaggctga

SEQ ID NO: 7984 - RNA, 1665 nt, synthetic construct
  source 1..1665: mol_type = other RNA
atgattaatatcttctccaaaaacgacgacgaattaaaaaaggccttttatgcccttaagagtcggaatgatttggccaatctccttgagattgaggaaaaaactctgaggtactttttgtatggaaagagcgacgacgataaatacaataccttcgaaatccctaagaagaacgggcagtttcgcaagatagctgcacccatatcacctctgaaaaccattcagaggaagctaacatatgtactctctctggtttataaagtcaagccgtgcgcttatggattcctcaaagaccgcaatattaaatctaatgccaagaaccattccaagaaaaaggtgctgctcaacattgacctgaaggacttttttagtcaagtccatttcggaagaatacgtgggatgctgatatcaaaaccatatgacatcggcatcgaagccgctaccagcattgcacagttgacttgttataaaggggttctggcacaaggtgcaccttcctctcctattctaactaatatgatctgttccccaatggatactcagctgatcaagctcgcgaaaaaatacaaacttcaatacaccaggtacgctgacgatatcactttctctaactacaatgagcaatttccgcagggaatcataaagggggaaatcaataacctgattatcggagatgaactgaataacattctgacaaagaacggctttgaagtgaacatgaacaaggttttcctgaacgacaacttcacaagacaggaggtgacagggctgatcgtcaacaaattccccaacgttaaacgagagtacgttaaatcattacgcgcaattttgtacaactgttcccgagatggcgtgtataataccgctaaggagtacataagtaagggcttttgcaagaacaagaatgtgctcgagaatcaggacaacgaggagctggtgatcaattggtttaagatggtactcaaagggaagatcgacttcatcaaagaaatcagaggtagtaacaataacatcttcctgaaatacgcgcagattcttaataaggtgttcaacgaggatatttacgacctcaacattttgaacaagctcacgaataacgtggtcattctgaattacgaagacaataagtgtatgattcagggtagcggcttcttcgtaaaagatgtgggcttatttacctcataccacgtaacagagtcaggcgccttctttagcgtgaaaacccagtatctggaaacaattggtagcgtggccaacgagtttaatgagatatccaaagataagcggatcgactacgcgatctacgatataaagaagtctacaatcgagggatttgaagtcggcaacagcaaggatataaaggtcggcgataaagtcattattatcggctaccccgagtatcaggaaaaagataccccaaccatccagacgtgcaatattaccagcatgactacgtatttgaaggctccactatgcatcgtgagcgggcggatcatacacggagcctctgggggtgtggtgcttgacatgaatcacaaggctatcggcatcattaaggccggggccgcctccactgagaaagaatataaaggaaagcaaggcttcatccccattcacctggcacttgagcatatgaagaacaacaagaaatcgatcagtaattga

SEQ ID NO: 7985 - RNA, 1266 nt, synthetic construct
  source 1..1266: mol_type = other RNA
atggtgaatatcttcaagaagagcgatgaagagctgaaaaaggagttttacaacatgattagtcggaaagacgtcgccaagctgcttgatatcgaggataagtcactcagatattttctgtatagcgacaagaacaaatctatgtacactacattcgaaatcccaaaaaagaaaggcaatcctcggcgaatcaacgctcctaacgaggagttaaaaaatatccaacgtaagctgtcatacgtgctgaacctcatctataaagtgaagccgtgcgcctatggcttcatcaataacaagaacatcaaggataacgccaagaatcacgttaagaaaaagatgatcttgaacattgaccttaaggactttttcactcagattcatttcgggcgggtccgcggcatgctaatgaaacccccctatggaattggtgtacaggcggcaaccgtgattgcccagatcgcttgctacgacggcgtacttcctcagggagccccatccagccccattctgacgaacatgatttgctcccctctcgacactcaactcactaatctggctaaaaagtacacactgaagtacactagatatgccgacgacattaccttcagcacctatgagagtacattacccaagagcattctcgattaccaagttaattctctgacaatcgggaatgagctgaatcacatactgaacaaaaactctttcagcgttaatccagacaaggtgcacttgaataataattacacaaggcaggaagtcaccgggttggtcgtaaataaatttccaaacatcaagcgcgaatacataaaaacattaagggcgatcctgaataactgtaccaaaataggagtttacgaaacggcattggagtacataaacaagggttattgcaaaaacaaggaaattgctacgtccaaagaagataaagagaaagtttgtaactggttcaagtgtgtcctaaaaggcaagatttcatatgtgtcccagatcagaggctacaaggattacatctttctcaagtacgcacagaaactgaacaggatattcaacgaggagatttttaatctcgactatgtggatgactttatttataacgtggtcgtgcttgaaacctccaatcttgataatgtgagtcaggggtcggggttctttatcaaggatataggattgtttaccaactatcatgtgactgaaaatggagagttctacaacgtcaagacctacaaaatggaaatcctgggtgtggtgtctaaagagctgtga

SEQ ID NO: 7986 - RNA, 1659 nt, synthetic construct
  source 1..1659: mol_type = other RNA
atgttcaaaaagacagatcaacaaatcaaggactgcttctataagctgaaaaaccgctctgatgtatctgatcttctggagattgaggataaaagtctgcgctactttctgtatgtgaagcgaccagagaatctatatgtcacctttacagttttgaagaagaacgggaataaacgcataatcaacgcgccgcaggccgaactgaaatctattcagaggaaactggcttacattctcaatctcgtgtacaagatcaagcctagcacacacggctttgttattggaaagaacatagtcaccaatgctaataaccactgtaagagaaaggcaatcctaaatattgacctcaaggatttctttacccaaattcactttgggcgagtcctcggcatgttggtgaaggggccctatgacatttcgaaagacgcagcaatcgtgatatctcagatcgcctgttgtaatgctgtgctgccccaaggtgctcctagcagccctatcattaccaacatgatttgctccccactggacactcggctgaccaggcttgccaagaagaacaatagcaagtacactagatacgctgacgatattaccttcagtacattcgacaagcagttcagtagcaatatgattaattccgatatcctcaacctgaaactaggaaaagacctgaacaaagccattaaagataacggctttgtggtaaacgaagacaagatattcctcaatacaaagaacacaagacaggaggtaacaggcctggtcgtgaataagtttaccaatatcaagagggagtatctcaagaacatacgggctatattgcataattgcgagaaggataatgtctacaacactgcgaagacctacgtaaaaaaagggtattgcaaaaacggacagatcaaagccaatatcgacgataaaaattacgaaacccaggtggtgctgtggttcaaggccgtcattaaaggcaaaatcaatttcatcaaggacatccggggaaagaatgacttcatttacttaaagtgtgccgagaaagccaatattatcttcaaagaccagatcttcaacatatccaagctgaaggattttaaggacaaaatcatctcaaacgtgctggtgttaaaaggtgataacaacggcgtgcagggatcagggtttcttcttaaagactttggattggttactagctttcacgtcactcaggataacgcattttacaaggcctatcattacaacgagtatgaggagacgtctctttgcgtgatttccaaggaaatcaacgaaatcaaaagcgacttgaatatcgattacgcaatctacaagttcaacaaggataacgagaatttcctcgaagccggctcttcggttgaagttggagacaaagtgaagataataggttatcccaactttatgaagggtaacagttataacgtgcagacttgttatattacctcccgtaaatactacatgggcgcaattttctttacggtagggggtacagtcttccatggcgcttcaggaggggtggtgttaaatgatcaaaacaaagtggtcggcatcattaaaggtggggttgtttccaacactgagtcagaaaccaatgaaaatcagggctttgtcccactggacatcgtgctgacgcacttccatcagcagtga

SEQ ID NO: 7987 - RNA, 1719 nt, synthetic construct
  source 1..1719: mol_type = other RNA
atgttcaaagcatcagacgacgaacttattgagaagttcaacaacttgaagaaccgagccgatgtagctgagctgcttgaggtggacgaaaaatctctgagatatatcctctacgttaagaggcttgagaacatgtacaagaagttcaacattagtaagaagaagggcggatttagaaccattaatgcccccgagggtagcctcaaaaccatccagaagaagctgtcttacatctttagcctgatctacaataagaaggcttgcgcgtatggttttataaagggacgagacatcaggggcaatagcaagcagcacatcaaacgcaacttcattttgaatatcgacctggagaactttttcgactcaattaatttcgacagagtcatctgcatgttccaaaaacctccttacaatgttgagaaagatgcagcaaccgtcctatctcagctggtgtgttgtgatgggattctacctcagggggcaccaagctcccccatcataacaaatatgatctgtaggcctctggacacccaactggttaggctggccaagaagtttagcttaaactacacccgttatgctgatgacatcactttctcgtgcaacaagtcaactttcccaaaagaaatggcctactatgatatgcaggaaaaactctgtatagggaaatcgcttcaggaggttatatcacgcaatggatttaagatcaacacaaacaaagtcttcctgaactataaggaccggggccaggaggtgacaggacttatcgtgaatagatttccgaatctgcgtcgcgaatacctgaaagaaattcgagccattctctacaactgtcgcaggtatgatatatattcccaggccaagaagtacatcaaagaatcctcctacactaacaagaacataatgcggattagtatgttagaggacaaaaagagcaaggagattatctacaactggttcaagaatgtcattatcggcaagattcggttcattgggaatatccggggcaaggagtccccgtgctatatcaaatatgcgctcgaatgcaacaaactcttcgatgaggagatattcaagatcatcaaatctaagagccaagaattgatagagaacacagtgtttgtggtgaagattgagaaagggagcaagtatattcagggaagtgggttcttcattaaagatctaggatttgtgacttctatgcacgttacaccagatattgatgagacgtacgacgtatttacccccaaagaggacatcccccggaaactgtgcttgtttaataataaagccaacaaccaggaactcgattactccatatatgaccttaagaatccaacgagtaactacctcaaactgggcgatagttcaaatttgaatatcggtgacagaattactgtatgtggctaccctatgtatgataaaggcgatagcatctatattcaaaacggcgagataacaaatctgaagaaggactattttggcagtagaatatacaccgtgtcacaaaggctcatccatggtatctccggtggcgccgtgttaaataccaataacgaagtgatcggaattatcaaagctggggctgaaaatatggacgaggaagacgaatccattcaggggtttatccccatcaatgatgtcattgaggatgtgaagtctcagggaattgaactgcgcccaaaatctatcctggtcaaatccaacaattacaactga

SEQ ID NO: 7988 - RNA, 1665 nt, synthetic construct
  source 1..1665: mol_type = other RNA
atgctggaggagccgaatatggtgagggagaaattctttaacatgaaaagccgtgaggacgtggcggatattttgggcattaaggagaagagcttacgctatttcctgtattcgatcaaacctgataatatgtatgtcgagttctcaatcagcaaaaagaacggcggggagagggtcatatgcgctccaaacgacaagctaaaagctatccaacgaaagctcgccgtaatcctgaacatggtctacaaaaccaagcctgcagcccacggattcgtgctcgataaaaacgtggccactaacgcaaaaggacatgtgaagaagaaatacgttttcaacattgacctggagaactttttcgatcagattcatttcggccgcgtcagaggaatgctgatgaagccaccctataatttgggagaagaagcagctctagtgatttcccaaatcgcatgctacaaaggcaagttgccccagggtgccccaacctcacctatcctgaccaatatggtttgtgcacccctggacacgcagttgacgaaattagccaagaagtacaatctgcaatattctcgatacgcggatgacattacatttagcacctacaaggctgacttccccgtggagatagcctacgtggactttaacggtgtccatgttggaacagtgcttgaggagctcattaagaaaaacaacttcctgatcaactacaacaaggttcggatttccgactataggcagagacagatagtgaccggtctggtcgtgaatcagttcgttaaccttcgtagagattacatcaaagagattagagcgttgctttactcttgtaaagtgaagggcctgctcgaaagtgccaagctttatgtagaaaaaggcaagtgcaaaaatccaaaaatcatcgaggccgtcaattcaggtaagagtgagaaggaagatgagataataaactggtttctgcaagtcctcaagggaaaaatagaatacatcaagtccattagaggcgataataatccgacctacctgaaatatgcctctgagctcaatcgggttagcggcaagatcttttttcgggttgacgagtatctggattttatcaagcagattgaaaagagcgtctttatcatcgaaattaacgctctggacgattacattcagggcagtggctttctcctggaccccgatctccttttgactaaccaccacgtgactaagaaggagggcttttataaggtgacaaccttcaaagaagatcagatagggatcatctccaatgacatcaagttcttaaagcgcaatgagaatatagactacgcctgttataatgggtttgggcgcgaggatcttatcccttgggaactgggagactccgatgacatcaaaattggctctaagatcattatgatcgggtaccctgattataatctaggaaatactccagacgtccagacagtgtatgtaacaggggaaaggacgttcatggggcagaaactgatcactgtgagtggtaggattgtgcatggagcttctggcggggtagtactcaacgaagaacacaaagtgattggtatgatacggtgtggggttgtgtcctactgcgaaaccgatacaactaacaatcacgggttcatccccattaacgacatcatgaaagacattaagtcatga

SEQ ID NO: 7989 - RNA, 1662 nt, synthetic construct
  source 1..1662: mol_type = other RNA
atgaggcaggatagcgaacagataaaagagaagtttctcacactggagacaagagaagatgttgctgccctgttaggcattcaggacaagtctctgcgctatttcctgtacagcattaaaccggacaacatgtactccgagttcattatcaagaagaaaaatggagaagaccggcacatttacgcaccagatcgccgattgaaaaatattcagcgcaagatggcgcagatcctgaattgtgtctacaagatcaagcccgctgctcacggattcgtgcttgacaagaacattgtcactaatgcggagaatcatatcaagaggaagtacatcttcaatatcgacctggaaaacttctttgaacagatccacttcggaagagtacgaggtatgctgatgaagcctccatactctatcggtagtgaggccgcactggttatcgcccagatagcttgttataaaggcaagctccctcagggagcccctactagccccattctcacaaacatggtatgttccccccttgacacccaactaaccaaacttgctaaaaagtacaacctgcactatacccgatatgcagatgacatctccttctcttcctaccgcgatgagttaccaaccggtatcgtgtacgaagacctcgagggtatacacatcgggaaagagctacgtgagattttatcccagaatagctttgccgtcaatagcaagaagacccgcgtctttgactatagaaaaagacaggaagtcacagggctggtggtaaatgagtttgtaaacattaggagggcctacataaagaagattcgtgcaatcctttaccattgcaaacaggatgggatctatgaaaccgcaaaagaatatgtggagaagggcaattgcaaaaacagctcgatcattgagatgattaagaatgaaaccgaagagaacaaagaacgggttgccgaatggttcaaagaagtgcttaaggggaagattggatatattaagttcgttcgggggaagaacgattacgtgttcctgaaatacgctaaagagatcaatgagctctatggggaggaagtattctcaatcgagacggagttgaaactgatagacaagattgaaaagtccgtgttcgtgctggaatttgagagtgaggataattatgttcaagggtcagggtttatcgtgcgggatattggcctgctgacgaactatcatgtgactgataataacgagatttacacagttaacacgtataaaggcgagaaaaaatgctgcgtctctaacgagatgaacctaataaaaaacaacgagtccatcgactatgcctgttatctctacggcaagactagtgaggacgcgctcgaattgggcaactcagatgagctggacattggatctgaggtgcttgtcatcggctacccagactattacactggcaactcacctgaaattcaacacgtgaatataatctctcaacggccgtttatgggccagaagatctttacaatatcgggtagaatcgtgcatggcgccagcggaggagtggtcctcaacatgtcataccaggtggttggggtcatcaggtgcggaagtgtgactctgaaggaaaccgagagtaatagcttgcaaggctttatacccatcaatgaaattgtgaacgatttgatggcctga

SEQ ID NO: 7990 - RNA, 1695 nt, synthetic construct
  source 1..1695: mol_type = other RNA
atgataaacgccaggactgatattgagactgaaaaactgttttaccagatgcagagcagggaagatgtggccgacattcttcagatcgaagataaaagcctgcggtacttcttgtacgcaataaaacccgacaatatgtataccgaattcaaaatccccaagaagaacggagagtaccggaaaattagcgcaccaaataaaaagttgaggagtattcagaggaagctcgccgatatcttaaacattgcctacaaagtgaaaccagcaagttacggtttcgtcaaaaacaaatccatttaccagaacgctgataatcactgcaaaagaaagaacgtgctgaatatcgacctcaaagacttctttacccagatccattttggccgcgtgcggggtctatttatgaagcctccgtataatttaggagaagaggccgccatggtgattgcgcagatagcttgctatcgcggggttctgcctcaaggcgctcctacttcaccgattattaccaatatgatttgctcaccactggacacacagctgacacacctggctaagaagaaccaggttgtctatacaagatacgctgacgacataaccttttcgtgttacaagaacagttttccagaggcactcgtgtaccttgacaagggagatatccatatcggcaaagagctggaattcatcttgaagaagaataacttcgtggtcaacatgaataaagtgcgcctgatggacaacagaagacggcaggaagtaacaggcctggtagtgaataagtttaccaatctgaagcgcgaatatatcaaagaggttagggcgattttacattgctgtaagaataagggcatttatgactctgccaagatctacgttaacaaaggtaagtgcaataatcaccgaatcaaggcctatattcagaatgaggacaaggtggacagaaaggaggatgtctctaactggttcgagcaagtgctcaagggtaagatagggtacattaaactcattaagggcaacgataatcctacattcctgaaatacgccaaacaacttaatatcatctccaacaagaagatcttcaacatagatgagtatgacaagtttcacaatatgatcgacgacaatatctttattctgcaatgcaccagcaagaatgtcgcgcgtcaagggtccggcttcttgctgaagacttatggccttatgacctcctatcacgtgatccctgacgataacttctattccgtgaagaaaaacacgggcaaacaggtcggagtcatcacaaaatcatccaacctctataaggagtcctacgagatagattatgcatgttacatcaacatctgtaacaatttcgacaaaagtcagaacgggtttgagcttggagacagctctaatctaaaagccggagataaggtgattatcattgggtaccccaactatatggatggagatactccctatattcatacgtgttacatcacaaacaagacctcttactttggccaggagctgtacaccatcagcgggcgaattgctaagggtgcttcagggggcgttgtgctagatttgctccacgaggtagttggaataatcaaaggcggggtcacttctctcgaagaagatgacgaaagcaatgacccagagttcaaacacgggttcatccccatacacgatgtaatcgaacatatgcgtaactga

SEQ ID NO: 7991 - RNA, 981 nt, synthetic construct
  source 1..981: mol_type = other RNA
atggaaatctcggcactgaagcatgtgaaggacaaattttacaccttagagacaagacaagacgttagcgaactccttggtattgaagaccgatccctgagatattttctcttcaagagacggcctgagaacctgtattataaattccgaattccaaagggcatggatgggttccgtgaaatcaatgccccaaaggatgagctgaagacaattcagaggaaactggccaatatccttaatgaggtatacgaagcaaagatctgcgcctacggcttcattccagggaaggatataatacagaacgctagaagtcatgtcggacggaatctggtcctaaacattgacctcaaggattttttcatacagatccacttcgggagaattaggggcatgctgatgaaccctccctactccttaggccgtgaggccgctaccacaatcgcccagatcgcctgccttaacggcactcttccgcaaggagcccctacatctcccgtgttgagcaacatgatctgtgcccctttagacaattctctgatgaaactggctaagaaaacgaagtgcacgtacacccgatatgcggacgacctgactttttcaactcaccggaaggagatggataaagctttggtgtacttcgataataacaacgacgtggtgttgggagcaggtatactgtctctactgcggaagcacagctttaaagtcaatcccgataagatcgctttccgcaccaggtatgatcgccaggaggtcaccgggctgactgtgaatgtgtttcccaacgttcgccgctcctacattaaaaggctccgggcaatcctccacaaatgtaaaaaggacggagtatacggtaccgcaaaggagtatgctattaaaaggcagataaagaatcgcgtttggttcgtcaaccatgcggacagttcacagaagaaagaactcatcaactggtttaggcaagtgttgattggcaaaatctga

SEQ ID NO: 7992 - RNA, 1683 nt, synthetic construct
  source 1..1683: mol_type = other RNA
atgaatcgcgacgaagtgaagaaagcattcctggagttaaagactcgagaggatgttgccgaattgttgggaattaaggaacgtagcttgcgctacttcctcttcaaaagacggcccgaaaggctgtacaccacattcactattacaaagagaaacggaaagcctcgagaaatctctgttccttgccgcgaatggaaagagattcagcggaaacttgctgatgtgctttcctgcgtgtacgcacctaagatatgcgcctacgggttcatacccgggaagtctatcgtggataacgcgaggcaacataccaaaaggcaccttgtgctgaatattgacctgaaggacttctttacgcagatccactttggaagggttcggggcctgctcacttccccaccctatggtatcggggaggaggctgccaccacgatagcacagatagcctgtgtgaatggggtccttcctcagggcgcaccatgttctcccgtgctgaccaatatgatatgtgtcccactagacaattctatgatgaagtttgccaaagcaaccgactgcgtctacacacgttatgctgacgatatcagcctgtccacttttaaaagatcgttcgatccagaggttgtgtatctggatggcgagaaactctgcattgggtcgaagttacagcatatcttcgataagcactcattccagatcaacccagaaaaggtggcagttcggagaaacacagagcggcaggaggtgactggcttgacggtgaatgttttccctaatctgagaaggtcatatattcgcaatctgagagctattctggaccactgtcaacgcgacggcgttcaccaaaccgcgaagacttatatcgagaaggggttttgcaagaatccctctattctcgctacgtacaagtgcgacgaggcacggggttctgtcgaagattggtttatcagtgtcctaaagggcaagattgaatatatccgtaatgtcaaaggcgctgagtcactcacatacctgtcctttgcccaaaaactcaacgaaattgtaggggtggaaattctggacatcagtctgttgaacaggctcgagacaattgccgagaagaacacctttgtgcttgagtgtaaccagggggagagcttctatcagggcagcgctttttatgtgcctaatatcggtttaatcacttcctaccatgtcgtcgagagcggcgagtttttctatggctacacccatatggactacccgtcaaaacccgccatggtgataggattgtccctgaaccgagtcgcggataaccgcgaaatcgattatgccatatttagtcccccactcacagatctaggtgaatacgccctgaagattggagacagcaaaaagttaagagttggcaacaacgtcaccatcatcggataccctaaccaccaaatcggaaatacacccttcatccagaattgtgcgattacaagtgaaaagactttcatgtccgctccgtttttcaccgtaagcgggagcattgtacatggagcctcaggcggtctggtgctcaacaccggttttgaagtggtgggaatcataaaaggcgggattcagtccctggacgacgacgatgtgagtggaaaccagggcttcatcccaatccacctggtacttgaggacatggccgagaaaaggaaagatgtaaaatga

SEQ ID NO: 7993 - RNA, 1701 nt, synthetic construct
  source 1..1701: mol_type = other RNA
atggaatctaaagaaatcaagaccaaattcttccagcttaaaacccgaactgatgtcgcagatattttaggaatagacgagagatccctgagattctttctattcaaagtgcgccctgagaacatgtacataaggtttcagattgcgaagaggggtggagggttccgggaaatatgtgctccaaacaggaagctcaaaagtatccaaaggaaactcgccgatatccttgaaatcgtttatagggaaaaggcctgcgcctacggctttgtgcgtggaaagaacattgtgcagaacgcacgcaatcataccaaatcagaacttgtgctcaacatcgacctgaaagatttcttttcccagattcattttggccgggtaaggggcatgctgattaagcccccatacggtttgggggaagaggccgctacaacaatcgcccaaatcgcgtgcttggacgggaagctgcctcaaggggcaccgtgttcccccgttatcacaaacatgatctgtgccagcctggataaccagctgatgagactagccaaaaagactgggtgcatctacacccggtacgctgatgacatcaccttttcaactaataagaagcagttcgacgatgagatcatttttctgaacggcgggtcactggaactgggaaaaggcctgtccaacgttctcactaaaaacagttttattgtgaacccggacaagatcacgttaagagcgaagagctctcggcaggaggtgacaggcctggttgtcaatcaatttccaaacctgagaagagagtacgtcaagcagctacgggccataatctataattgctccaaaaatggggtctatcataccgcccagcagtatatcgaaaaagggttctgtaataacaccaaaattgctaccgtggtccacgaccctaatcaccgagaagaggtagagaattggtttcgccaggtcatagtcgggaaaattaattacatccgacagattaagggggcaggacacgccacatacaaaagcttcgctctgcgttacaatcggttagtaggcgaggattttttcgaagtgcctcaggatgatctcttggctgaactgatgcggtcggtctatgttttggagagcgaggagcgacagggcagtggttttgccgtaaagggtataggcctcttcacttccaatcacgtgactggcgacggagcaaagtatgaggtgtttctgcccgatggccagggcgatgtcgaaatcaaaggcatcataagcaacggtgataacctgatagactctgatgacacgattgacttcgccctctttgatgttcccttcgccaatgaaagcaatctcgagatcggtgactctgacgaggtgaagttcggatccgacgtgattattgcatcattcccagactatgcgaagggaaactctgtgaggatcgagcatcgcacagttgccggcgaggctcgcttgttcggatctaagatcattatcatcgacggggtgattttccacggagcaagcgggggcgtcgtggttaatgacaagaataaggtgattggtattgtgaaggctggcattcaggatgctgtgagtaaggacgaacttcttagtaatcagcgccatggatttgtacccatcaacctggtgatgcaacacataagagagcaccaacgtccagcatcagaggagaaccaccaggagacaatgacgtga

SEQ ID NO: 7994 - RNA, 1668 nt, synthetic construct
  source 1..1668: mol_type = other RNA
atgttcaaacgcagcgataacgaaataaaggagctcttctccatcgctaagactaggactgatattgccgacatgcttgagattgacgaaaaaagccttcggtactttcttttcgtgctccggccggaaaacatgtaccggtccttttttatctccaagaaaaatggcgggacccgccagatctttgcccctagtaaaaagctgcgaaatattcagcgaaagctcgcatatatactcaacctgatgtacaaaccaaaaatttgcgcgtatggctttatcaagaacaagacgatcttagggaatgctttgcagcatactaaaaaggccgaaatcctgaacatagacctgaaggattttttttcccagttccatttcggtcgcgttgtgggcctgttgtgttctaaaccctattcgatcggaaaggaagccgcaactaccatcgcacaaattgcgtgcttaaatggtattcttccgcagggagctccaacaagtcccgtgctaactaacatgctgtgcgtccccttggacaatcaactgatgcagtatgccaagaagtatggactggtatacaccaggtacgctgatgacattacattttcaagttacaaccgttgtatctctgataatatcatctccaaagtgggcgataagatcctcttggacgacagtctaaaaaaggtgctcgacaagaatagcctgatcgttaatgacgagaaaatcactttcaggaccaagaatctgagacaagaagtgacgggagtcattgtaaacaagtttcctaacgtgaaaagggaatactacaaaaacataagagctctgctgcacaactgcatacagaacggcatttacatcgaggcacttaaatacattgacaagggctactgtaagaatagaaacatcatctctttccggagcgaccccaagaagcaacctctgattgaggagtggtacaaatccgtcttgatcgggaagatacattttatcaagcagatcaagggggagcactctttcaccttctatagcctcgccctggaggccaacaaggtcttttccaagaacatatttgacctcacctatttcaatcagatgaacgagattatcaacaaaaacgttttcgtcctgcagtcgaccgatgaaatgaagcagggcagcggattctatgtgcccgggtatggactatttacctcataccacgtgacagaggataaggatttctattacctgtggcagaatgacgtgaaagccgtgatttctccaatttcagcggacataaatcaagtgtccgccgataagatcatcgactatgccttgtataacatatctatcgctaacgtagcaagtctcagcatgggaaattcatcaaatctgaagatcggtgatacagttgttatcgcaggattcccaaattacatcaaaggggatacgataactaaagaggagtgtaaaatcacaggcaagacaaaactttttggcgctcctttctacaaagtttccggtaaaattgtgcacggcgctagcggcgggattgtcttaaatacaaaccaccaggtcgtcgggattattaagggaggttgctctagtgaggatgaagacaatacctctattaagcagggcttcgtacctattgacctggtgattagcgatttaaaagccaaatcagtgctgtga

SEQ ID NO: 7995 - RNA, 1707 nt, synthetic construct
  source 1..1707: mol_type = other RNA
atggatggtaacctgccggaaaaaaaactgttctatgagttaaagacccagaaggacgtggccgccctgatcggctgtaaggaacgaagtttaaggtacttcctctacgctggaaactgtattgtgaaatacagaacctttaccctcaagaagaccgatggctctcagcgcattatatctgccccaattcctccccttaagaagatccaaagaaaactagccaatattctgaacgtggtgtacaagcccaaagcgtgcgtctatggatttgtcccgaaaaaaaacttcatcgaaaacgcaaagcaacatgtcggctgcaaatatatcttgaacatcgacctcaaaaacttcttcaatcaaatccactttgggcgtgttcggggagtcttaatggccaagccatatcagctttcacaagaggcagctggagctatagcacagctggcatgttttaacggcactctgcctcagggtgctccctcctctccaatcttaacaaacatggtgttcagaagctttgacaatgagctgatcaagtttgccgctaacaacggaatcaaatatactaggtacgcggacgatatgaccttttctagttaccggaataaaatccccgaggagctggctacggtcagcggcaacaatgtgcgccttggcaccttcctggaaaagctgctggagaagaataactttgagatcaatcccaacaagattcacctcttcctcaaaaatcagcaccaggaagtgactgggctgactgtgaatgcaatagtgaatatcaatcgacggtatctgggccttctgcgcgtgattctgtacaactgcgacaaaaagaacattgataatcccatctatgagtccgccaaaaggtatattaagctcggttactgcaagaacaacaatatcatcgagttggccaaaaacgataagaacaaggacaagatcgaaaagtggttcaagcaggtactgatagggaaggtgcgctttattaagcaagtaaaaggcgccgattcgtttagctactattatttcgctacacgttataacaaggtgttcaaagatacggtcttcgatctcagtctattcaactacgttaacatgaggattcagcagaatgtctttatcgtcgaagccggcactaatcaggggtctggcttctacctgaaaggctacggatttatcacctgttaccatgtggttgagaaaaataaggaggaaaagaaagagaatgagaaggagatatatgattccgtgtgtatttacagatgcgttgatcggtcaaaacagccatttaagagactaaggaaggaagagattattctgaaagacaagttccttgactatgccctgtaccggctcgacgagaacgaagtcgagagcgcttacaaaatcgggaatagtgaaaaagttgagttgggtgaacaggtgaccataatagggttccctaattacctggaacaggacacatttagcttgatcaagacacacattacttcaaagagcaatttcatgaatgcacctgccttcttggtggactccaaaatctttcacgggacatccggtggagcggtgctcaataaagactcggaaattataggactcgtagtagcagggagccaggatacagcctatgaactaaagaatgcgtttgttcctatccatgagattatggcttctctttcctcaaagaacattcatgagttgtga

SEQ ID NO: 7996 - RNA, 1650 nt, synthetic construct
  source 1..1650: mol_type = other RNA
atggaagataatgttaaacggaagttcaaacagcttaatagtcgcgaagacgtcgctaatattctggaaatcgaagacaaatctctgcggtatttcctgtattgcgtaaaacctgacaacatgtacaagaacttcgagattaacaaacggaatggagggaccaggattatctccgcccccaataagaagctgaaaaacatccagagaaagctgctgcaaatactcgaaaacgtctatacccccaaaatttgcgcttacggtttcattaacggcaagagtatctatgataacgcctcaatccacttaaaacgcagacagattctcaatctggacctgaaagactacttccttcagataaactttggacgtgtgcgcggcatgttgctgaagaaaccttacgagctgggggaagaagcagccactgtgattgctcaaatcgtgtgttacaaaggtaaattgccacagggcgccccgactagtcccatcatcgcaaatatgatctgcgccccgatggataaccattttatgaaactggctaaggccaacaatatgaaatataccaggtacgccgacgatctcacctttagcactaggacagagtttcctacctccattgtgcgcatcgaaaacgatacagtagtggtaggcaagaagatcctgcaaatcctaaagaaggacggctttttgctgaatgaggagaagatttatttgaggtcaaaggacaaaaggcaggaggtgaccggattagtggttaataagaaggttaatgtccgaagagattacgtccgggagctccgagcaatactgcacaactataaaaacatgggtgctgaggacgcgatcaagttatatgtgaagaaaaagaagtccacaaacatttcagctgtgaatatagacacgctaagcgacaagaaaagacaggaaaccatcaatcagttcaatgagattctaaaggggaagataaacttcatcaaagacatcaggggcgaggacgatttaatttacatcaaatacgccaatgagcttaacagaatttgcaacaaggagatcttcaatctcgacaaacagaaagcgtttatggaaaagttgaagaacagcattttcattctccagtcccgctacacttgtgtgcaaggaacaggctttctgcttaagggcatcggactgataactaattaccatgtaactgaggatgatgatttttacgacgtttgtatgtgtaacaagaacaagattgccgtcataagtaataagctcaacctcatcaaacgttctaaacgaattgattatgcatcctacaagattctcgatgcaaaagaggatcaattcttggattgcggcgacagcagcaatctgcagatcgggagcgaactgaagatgatctcttatccagagtataacgatgaggacacgcccaacatacagacaattgagatcacgggttcacgggagtacatgaagaataagatcatcaccatctctggaagagtgatccatgggtcgtctgggggtgttatccttgatcagaaacacaaagtcgtgggcgtggtgaattgtggaccagtctcccttgaagaaacagacgacacaattatacaggggtttatcccaattaacaccatactgaaggatattagcatgcctacttga

SEQ ID NO: 7997 - RNA, 1083 nt, synthetic construct
  source 1..1083: mol_type = other RNA
atgttgttcctgagacaggccgaggcgagtcctgtgatagattttggttgcgaccctcagcccgccacctgcctttttcctacttccgcctgccctgtcgctttgagacatgcaggctgcagcggaagagaggcggagtgcagaaggacctcagcactcccgctgttgcattcgcagccgcagccattcctgcgtgcttcagataacgagttgcggacaaaattccgggccctacgggcgcttgaggatgttgcagacctattagaaatccagcccaggagcctgcgttggtatctctacgtggacaaggtgcgatgtcaatataaggaacggtcactgccaaaatcccacggcggtaccagacgcatttgtgttccgccaattcccctccgcatattacaggacaagcttctgcgcatcctgacgttgatctatgccgctaaaccctgcgtgactggatttgtcctggggcgcagcgtcgcaaacaatgctaacccacatgtgtgtaagcaacacgtactgactatcgacctggataattttttcccctctatccactttgggcgagtacgaggaattctgcaatctccaccctacggcgttgcccctcctgctgcatcagtgctcgctcagctggcctgtcatgatgacggacaccttcctcagggggccccaaccagtcccatagtcgccaacatggtgtgcggtcctcttgactctgctatgctccagatggcaagcaacaataggctaacctacacacgctacgctgatgacatcaccctgagcactaatctgcggaccttcccatccgatattgtccgtcaggatgagcatgacacttgcgaggttggggtggttctgcgcgacctcctggccgaacacggattcacgatccgggaaggcaagacaaggctgagatccagattaaggcggcagacagtgacagggctggtggtgaacgaggttgtaaatgtcaggaggtcttatgtgaggcaactccgagccttgattcacagttgtagcacagtgggcctccttccctccggctactgccaggaactctgtattgaatgtgcatga

SEQ ID NO: 7998 - RNA, 1365 nt, synthetic construct
  source 1..1365: mol_type = other RNA
atggaaattgtgctgcgcaccaataaagaggagctgaagaaaaaattcggccggcttaaaagcagggctgatgtggccgatcttctggaggttagcgaccactttctctgcaagatcctgtatggtgtgaaggaacgcagaaaatataggatcttcgagatccagaagaagtcctccaaaactcggcagattagcgcacctcctaagaatatagcaatcctgcagtctaaactcaacaccattctaagtctggtatacgagcccaagccttgtgttcacggattcgctgagggaaggaatatcctatccaacgctcaacaccataccaaaagacgccacgtggttaacatagacctgaaggattttttcccgtctatttatttgggaagggtaaagggcgcgttaatgtctaaacccttttgcgtcggaagaattgccgctgaagtgatatctcagatttgctgtagagacgatgggatcctccctcaggggggtgcaacatcaccaatcatttccaacatcatatgtcgttctctggataacgatttaatgtccttcgcacgaaaaaatcgatgcaagtatacaaggtacgccgacgacattacactgtcaactagttccttcagacttccaactgccgtgggcaaagtcgagaatggtaacctcatcctgtcagacacactggtgctcatcgtagaaaaacacaagttcatcataaacccaaagaaggttcggtacaccccccctttcttacggcaggatgtgacaggcctcattgtgaatgagtttccaaacgtgagaaggtcatacgtgagggaggtccttggggctctccatgcctgggaaaaacatgggtatcgggctgccaataagcgctatatgtctcactttcgcctgcgagggcaagccgggctggatcttgagaacgtcttgagaggaaagatcagctttattcggatgattcttggagacaatagcccaatctttcgaaaactggcgcgtaagtacaacggattggcaagtaataagatcgcaattatccaaatcgaggagactgatccctaccccctacgcggggggaatacccgtatccagatgtggaatcggtggttcaacagatacaaagccgcgattttcttcatagaaaccacgaacagcaaaggcgacaagtcggccggtacagccttctatattggcaacaatctgtttgctacggccggtcataacctggaatacggcaagccgatcttttactttggagacagtcccaaggctgtcgacacctttaccgaatacaacaagaagagcactgacatcggcttgataaggaatatgggcgagattctcggctcggaattggattga

SEQ ID NO: 7999 - RNA, 1677 nt, synthetic construct
  source 1..1677: mol_type = other RNA
atgaactcaaggcaagatgtggctacttacctgggaattagcgatgccagactatgcgccattctgtatggctattgtgaccgccggcggtacacggagtttcaaatccccaaagcgtctggcggccaccgtaagatcttggcacccccgaaacgactcaagtggctgcagtccaccttacttcgccgcctcgaagggcagtacacgcctaaggtctgcgttcatggtttcgttaagaatcgctccatcgtaacaaatgcccgggttcactgtggtagacgactgactgcatcctttgatttggaagactttttcccaagtatacacattggcagggtcaaaggtatctttaagaatcccccttttagctttggtgaggatgcctccgaggtgctggctcagatttgctgctgtgatgacggcaaactgcctcaaggaggagtcatgtctccctatcttagtaatctggcctgcagatctctcgataacgacctgcttcgcctcagtcggcagcataggctgaggtactcacggtacgcagacgatcttacattctctagcaatgatcgctactttcctcacgaggtggtggaactggacgttgagcagcctcagccgggagagagattagtggaattgattacctccaatgacttcaggctgaatcattccaaaatggtcttcagaactagtacacgaagacaggaagtcaccggcttgaccgtcaatgcatttccaaatgtgtccaggaaattcgtgcgcggaatcgaggcagccctctcatcatggcgccgatttggctacgacgcggcccaagctcacttcctagagaagtaccacgaaggagggggcagcgagctctcttctgtcctccgagggcggatcgcctttctgtcgatggttagaggcaaggacgatttcatcgtgaggcggctgagccgggaattcaacgacttggggcagccatccataaacgtgaagccactgactaccgctaggccttcccccagacacaacagcagggctgagtggcaaacttggatcaggaagtatagtgagggcgtattacatttacttttcaccagtcctgaaggcgacccaagttgcggtactgcctttcacataggaaaagggaccttcgccacggcacgtcataacgtctttacagaatgtggtgcggtacatgacgacctccggctgaagcatgacgggaacgagttcgtcgcaaacgtgctcgctcctctagatgccgatgcgaacaccccagacgtagccctgctttcgtgtaacgccctgtctaaactggccagaatacccacacaggtacgactgcccgaacttggagaggagattgttgctattggattccctagcatcccacagcggaatgtgacacaagtggtgcacagcggtatcgttgaggccctgccggtgaactacagcgatcgtctacgttttatccaggtgtcattccagtccgggggcggcttatcagggggatcactcattgatgccgggggcaatttgctgggggtggtggtggagaacgtgttcatgcaggctgcagacgcaggcgggattacagctcccagcagaccctatggacaggctgtcccagttgaatatctggatgacctcttgaagtcttatgatagacagcagaggcccatccgctga

SEQ ID NO: 8000 - RNA, 1548 nt, synthetic construct
  source 1..1548: mol_type = other RNA
atgcgactcagagtccacttagcacagggtgccagggggaaggctcacctgagcaaacttcaattccatcttaacaagcctctcgaagaagctgccgcacagattgtgggcgctcagacggccgacgatattgctgaggtgctcgaggttccgaagggccaactgctccacatcctatattcatatcctgacgagaagaagtacatcagcttcgacatcaaaaagaagaatgggggatataggaacatcaaggctgcgaagggaggattgagagtgctgcagtctaaactggcccccctgttggcttcgcattatcggcttaaaaatcccgtgcatggcttcgttaaagagagaaacattgtgtccaatgccactcagcataaaagaaagagatatgtcttcaatgtggatctgagtgatttttacggtaccatcaacttcggaagggttcgggggcttttccgcgccaagccatttgaaatgggcgagaaagccgcaagcgtggtggcacaaatttgcatctttaaaaactctctgccccagggtgctgctacatcccccataatcagcaacttcatcgcctcagagctggatagaaaattatcaaggctggcacgacgttacaagctcacttacactagatacgccgacgacattacgttctctagcaataatcgcaattttccagagggcatagcattctacgacggtaataatccaattacaaacgactgtttcgtgggccaggtcttggaagagacagttagtggctgtggattttccatcaatcacgaaaagactcggctacaaattcggggggttaggcaggatgttaccggactgaccgtcaatgagttcccaaatgtgagaaggtcgtatatccgaaacattcgggccttgctgcacgcctggcgtaaatttggccctgatggggtagaggtgatatatcgaaggaagtacgctaaaaataagtcccgcctggtagataccgaacgccattactttaaggaggccctctacggaatgttggcatttctgaggatggtgcggggcgaagacgaactttatttaaaactatgcctccagaccgcggagttggacaaggcgcctcctgagctgatcaaacgtatgaaggagcagtacaagatgtacgatgtgttcatctcccacgcctctgaagataagattgacatagtacgccctatctacgacgcgtgcaagagtctcggcatatccgcctttcttgacgaagaagaaattgattggggcgacagcctgaccgaggtactgaaccacgctctcgggaagagcaaattatttctggccgtcctgtctaacaactctgtcggaaagaaatggccccggaaagaaattaacgccgcgttggctcgccagatggatgggaaacagaagtttcttccactggtggtcgggtcacccgatatggacattttcggtctaacaaatgacctgctctatgtgaactggaaaaacaacccggatgagatcgcagagaaactcaagtttatcctgagtaagtatgcatga

SEQ ID NO: 8001 - RNA, 912 nt, synthetic construct
  source 1..912: mol_type = other RNA
atgtcaaagctgcaataccagctcgtcaagtctctggatatagcagtaaagcagatcgttaaactacagacagctgaggacattgcccagcttctggaagtaccaaaaggccagttactccacatactctactcgtatcctgcggaaaaaaagtacatcctgttcgatatcgctaagaaaaacgggggattccggaacatcaaggcacccaagggcgggctgcgcatcctacagcagaaactggctccgatcctgtattcccactacaagaggagaaatcaggtgcatggattcgttaaggacaaatccattttgactaacgctaaaatccataagaggaaacggtacgtgtttaacattgaccttcatgatttctatgggagtattaacttcggtaggatcagaggcatcttcaaggcgaagcccttccaaatgggcgataaagcggcaaccgtgttggcccaaatctgtacatttgaaaatagcttaccacagggtgccagtacgagcccaattctgagcaatttcattgccagcagcctggatcagaagctctctcgtatatccaggcgctataaactcacctacactagatatgctgacgacattaccttcagttctaatgcacgagactttcctgaggcaatcgccttttttgatggtggcaaccccataacaggagactgctatgccggacggatcctggaggagacaatagtgtcctctggatttgctattaaccacgccaagacccgattgcagattaaaggcgtgcggcaagatgtgaccgggctgactgtcaatgaatttcctaatgttcgccgctcctacatcagaaacattagggcccttatccacgcctggaataagtacggggactcaggcgtcgaggacgtgtatcgttcacagtga

SEQ ID NO: 8002 - RNA, 1530 nt, synthetic construct
  source 1..1530: mol_type = other RNA
atgcctgaaaaactgaagcccgaattaaacaagaacctggatgagtcagtgagagccatctctcagctgtccagcgtgtcagacgtggcttcttattttgaaatacctgaaggccagctgttgtacatcctctacaagctgccagataacaagaagtaccgtttctttgagatcaaaaagagacgaggcggccatcgcctgattaaggcgcccataggagggaccgctatcctgcttaagaaattgaaaccagcgctgcaccaattgtacaaaacgaaatcgtgcgtgcatggttttgtcaatgggaagtcaattgtcagcaatgcgaaacagcacaagaaaaagagatacgtgctgaatgtggatctcgccaatttctacgacaatattaactttggacgtatcaggggcttattcatgtccaaaccgttcaacatggcaccgaacgcagctaccctgatggcccaactatgtactcatgacaattctttgccacaaggtagccccgtaagccccgtgttgtcaaactttatcgcctcaaatctggataagcgccttaccctcttagcaaagaagtatggactgcaatacagtaggtatgccgacgacattacattctctacatccaagaaagatttcccaaagtcttttggctattacgaggggaataaccctataacggggaatatggtcatcggcaagctcctggaagatcagattttggctagcggtttcgtcatcaattatgacaaggtgcgcttacagtatcacggagttaggcaggaggtcacaggtcttaccgtcaacgagtttcctaatgtggagcggtccttcgtgaggaagatccgggctatgattcacgcatggaagaagtttggactgattgaggccgagaaaacttacattagctgctacgcgaagcctactctggacatctcaagcgataacctgaacggagcctattacaagagtgtggtttacggacgattggcattccttaaaatggttagggacgaagaagatgaggtctatatgaaactgtgtctgaaagtagccgagatcgattccaatgctcctcggaagatcctggaaaccaaagagatgttcaacaagttcgatattttcatctcccatgccagtgaagacaaagacgacgtggctcttcccatttatgaggcctgcaaaaaaatcggcgttaacgcttttctcgatgttaagtatatcagatggggcgacagtctcactgagaaaatcaaccacgcactcgggcagtcgaagtttgtactggctattctttccgaaaatagcgtggggaaaacctggccaagcaaagaaatcaacgcagcactcgcccgcgagattgaagggaaacagaagatacttcccctaattgtaggctccccagatctgagttctgtgagtctactagtggacaagctccattttccctgggagaaggacgcctctaaagttgcccaccggataaaagagctcacatacgagaagtatcagatatccaattgtaagtga

SEQ ID NO: 8003 - RNA, 1515 nt, synthetic construct
  source 1..1515: mol_type = other RNA
atgctgaatgtcaaacttaagagcaccataggcaacacggtgaagatcttcttgtctagccaaaacaccgaagacgtcgccaacgtcctcgaaatcccaactagacagttactctatctgatctacaccctaacagacgaagaacggtatagcacattctttctgcctaaaaaacgcggcggacagagagagatttccgccccgcgcaaagggatttctatcctgcagaagaagctgttgactatcatcgattcaatctggcaccccaagccctgggtgcagggttttactaacagccgcagtatcctcacaaacgctagacaccacaagaaaaaatcctacgtcttgaacatcgatcttaaggacttttatggctcaatcaatttcggacgcgtgcggggtctattcatgtcctacccttttaagctggggcacaaggctgcaactatcatcgctcaactggtaacatttaataatctcctgccccaaggggccagcacttcacccataataagcaacatgattgcttttaagctcgataacatgctggtgaaaatcgcaaggagatatcatctcacttacacacggtatgcggacgatattacgttttctaccacaaaatccaactttcctaaagaaattgcagagatcgaggggacgaacccatcgaccggcaatattaagctgggacatatcttggaaaaagctattaaggaatctggattctctgttaactacaaaaaggtgcgattgcagatccctttcgtaaggcaagaggttacagggctgaccgttaatgagtttccaaatgtggagaggaggttcattcgtaatgtccgtgctatggtgtatgcctggcggaaacatggcctcattgaagctgaacgagagtacataaacaaatacgcatcacggaagctggagataccatctgggaagctgaagggaagttactacaagaatgtgctctacggcaagcttgcgtacattaagatgataaggggtgaggacgatcagattttcatcaagtattgcctgcagttggccgaactggacagcgatccccccaaacagattcagaaggccaaagaaatgcatgaacagtatgacgtgttcctttgtcacgcctcggaggataaagaggacattgccaagccgattttcgaagatctaagtaatgccggtatcatcgtttttctggacgacaagtacattaaatggggcgattccttcgtggagaagataaatcacgcattaggcaaagctaaatatgtcattgccatcctttcttccaacagtgtgaccaaagcatggcctgttaaggagataaacgcctccatcgcgagagagatagtaggcaaacaaaagttcctgccacttatggtcggggacggaaaagagatccagagctttcaggatgagatgcccttaatcagtgacaagaagtatctgatctggaagaatgacacctcagagattgtggataaaattaagtccctcatgtcaagcaagtga

SEQ ID NO: 8004 - RNA, 1587 nt, synthetic construct
  source 1..1587: mol_type = other RNA
atgagatatcccaaaattgcgaagccaaccacagagctcgtccgtcccacagaggatagcgttaaattgtttaaagccgctcatacctttggggacgttgccgaacttctcgaagtccaccctggacatctcaagaggtggctgtataagtatccgggacactccgggtacaaggacttcgaaataccgaagaagaatggcaagcccagacaaatcagcgcgccccccaagaacatcagcattctgcagcagaagttcaagaccatcctcgatgctgtgtaccagcctaaagactgtgtcttcggcttcgtcaataaacgctccgtagtcggaggcgcgaacattcacaagaaacagtctcgctgggtgctgaatatcgacctggaagacttttatacctcaattcactttggacgcgtgcggggactgtttatgtcgtttggggctggggagaacgcaagcaccactctggcccacctggtgacaaaggatggcgtgcttccacagggcgcctgcacatctcctgtgatttccaatatgattgcctttaagctcgacagaaaactgatcaacatcgccaacaagtacaatctgaaatattcccgttacgcagatgacataacttttagttaccggtactgtacattcccaaagcatatcgcgatcctggataaatactccggggatgatcaggaacagcataaagagggacaatacaagtctggcctggaacccgaaaatatcaccttgggtcctctgctggtgcatgccatcacgaaaagcggatttaccatcaacaccaataagaaccggttattctcaaagcgacagaggcaggaggtaacaggtctaacagttaacgaattcacgaacgtgaataggaaattcattaggcagatcagagcaatgatccacgctattcggaaattcgggcccgagttggcaggcatcgagtatatagagaagtatcgcgctccttacaagaattgcgaagttaacaaccacgcagagtactttcttaacgtcctatacggcaagttgtcattcctgcggatggtgcgaggtaaaactgacgtatgttatctcgatttttgcctctctatgagcaagattgatccagagccaccaactttcatcaaagaagccgtcaagatgcgacagaaattcgacctatttatcattcatgccagtgaggataagaatgaaatcgccactcctcttcacgagcacctgactaagatcggcctgaatgtgttcatcgacgagaagtatattaaaatcggcgacagtttcatagagaaaattaatcatgcccttggtcagtcaaagcacataatcgctatactgtcatctcattccgttgaaaaaagttggcctaagcatgagcttcaagccgtgttagctagacacattgcatctgatggtaacgggaaaatcattccaattatggctggaaacaagtatgagatacaaacgatcttggacaaatggccgttactcagcgacaaaaggtaccacaagtgggaaggggatcccgacgcagcagcccaagagattgctgactccattggcaccgtgataagttga

SEQ ID NO: 8005 - RNA, 1602 nt, synthetic construct
  source 1..1602: mol_type = other RNA
atgaagggacaaaagattaacatcaagctgaaaaaacccttcaaagagagcatgacactatttgaaaacttgcagacacaggaggacgttgccaattttttcgaggtcgagcaccgatacttaatgtacctcgcctataaggacaaacgccctcactataaggagttggtgattccaaagaagactgggggcacaaggaagattagcaaacctgtcaaaagcatcgatatcctccaaaaaaagctgctaccattcctgcaggaaaagtataagatcaagaagccagtccatggattcgtaaaaggcaagtccatcctgaccaactcccagcagcatctgaagaagaaattcatcctgaatatcgacctcaaagatttttacgacagcattcacttcggtcgcataaaagggttgtttatgtcagagacatttaagatgggggagaatgccgcaaccctcgttgctcacctatgttgcaataatactaagatcccgcaaggtgcgtgcacctccccgatcctgtctaattttattgtgagtcagctcgacaagaagctgatggaatttgcgaagaccagccactgcacatatactcgatatgcagatgatattaccctgtcctcaagcaagaatatcagcaacactgtcattaaagatgagaatagtagtttccccatcaatggattcgagctgagctctgagttggagaaacttattcacttctgcaacttcaccattaactataagaaagtacggctggagtccaaatacataaggcaggaagtcactggcatcactgtgaacgattttcctaacgttaagaggacattcataagacagatccgcgctatgctgcatagttgggaaaaggatggccttgacatcgcctctcagaaacacctatcctttaaaaaacgggagtacagtatttcatcacccgagaaattctttaagaacgtgattatcggcaaattagcttacttgaaaatgattaggggggaggaagacattatcctgcgtaaactgtgtctcaagtttacggcactggtgtcaaatgatgaagtgctgccaaagttcattcgcaatatcaagatgaagtacgaggaatttcaggtgtttatctgtcatgcaagcgaagataaagaaaagatcgccagacccctctacgacgagttagtaaagcttgggataaagtccttccttgacgaaaaatatatcgaatggggagactctctcaccgaaaaaataaatcatgcccttggacaatctagatatgtgatagccattctttcagacaactcgattgaaaaaaagtggcctaaaaaagagatcaactccacgctgagcagagagatatctggtgataaggtgttgcttcccattctggccggcgacgagcggaaaatctttaaggtgttccctctgctccacgataagctctacaaactgtggaataacgatgctaagttcatggctaatgaaatcaagaacttactgtccagtacagaagactacgaaattaaccatgaggttaacacctctgagtcgtctatattggagaaaatcaaggacttcctcacgaagataaagattctgaaatga

SEQ ID NO: 8006 - RNA, 1512 nt, synthetic construct
  source 1..1512: mol_type = other RNA
atgaccaagaagctgcatatcaagttacaaaagacctttgaggaaagcttagaactgtttaataacctcactacagcttcagatgttgcttccttcctggagattccactgcaaaccctaatctatatactctacaaagacaccaagctgcactacaaggagttcaagattaaaaagaagagtgggaaagaccgcatcattaacaaaccaattggcagcattagcatcctgcagaaaaagctgctgccatttttgcagttcaagtacaagatcaagaaacccgtgcacggcttcgtaaataaaaagagcgtactctcaaatgctgagcagcatctgaagaagaaattcatcctcaatatcgatctgaaggactttttctcctcgatcaattttggaagagtcagaggtttgttcatctcctatccttttaatatgggcaatgacgccgccaccctgatcgcccagatctgttgccataagaacgggcttcctcaaggcacatgtaccagcccgatcctctcaaattttatagcctctagattagacgtcgagctcatcaagtacgctaacgccactcatacgacctatactaggtacgcagatgatataacattctcaagcacaaagaagctgtcgtccaagatgataatttacgacatggattctaaccctgtgattaacggttttatcctgagtgactctcttaaggaactgattaaattcatggggttcgatattaactacgataaagtccgccttgagacgaagaatatacgtcaggaggtgaccggaattactgttaacgacttccccaacgtgaagcggaactttatcaaacagattcgagcgatcctacactcttgggaaaatcttgggctggaagaagccgagaaaaaacacctggaaacaaagaaactaaagatggacatcagttccattaaaaatgacggcaagtatctgaaaaacgtcgtgattggaaaattggcatacctcaagatgatacggggcgagaatgacattgtcttcattaagctcgcactcaagctggcttctctttcatccgacaacctcccgaaattcatcaaggagattaaactgaaatccgaggagtttgatgtgtttatatgccacgcaagcgaggacaaagagaaagtggccaggcccctttatcgagaactgactgaattgggaattaatgccttcctcgatgaggagtacattgaatggggcgatagtcttacagcgaaaatcaatcacgctcttggacggagtaagtatgtgatcgctatcctatctaatagctcaattaacaaggagtggcctctgaaagaaataaactccacactggccagggaaatcagcggggacaagaaattgctgtctatattggtgggtgatgaacaggagatctttaaagttttgcccttattggccgataagttatataaaccatggaacaacaacgcgaagacgctcgcaatcgagattaagactatgctgatccccaaatga

SEQ ID NO: 8007 - RNA, 1536 nt, synthetic construct
  source 1..1536: mol_type = other RNA
atgctcataactcactcaaaactacttcctaagatcaagaaggacattactgaacaggaatccttattctctaaacttcagacaaccaaggacgtggcagatttgctggaggtgccctacaaacaattactgtacatcctctacaagcaggacgactctaagaaatatgagacattttctatccccaagaagatgggtggtatgcggatcatcagtaaaccgaaagggtccatcagtatactccagagtaaactattgcctctcattacctccaaatatactgccaagtcgtgtgtccacggatttgtgaaaggaaaaagcatcctcacaaatgccggtgcccataaaatcacgcagcacaccaagatcctgaacatcgacatcaaggacttttacgattccataaatttcgggagggtgcggggcctgatgatgtcccatccctttaacatgggaaacaaagcggccactgtggttgcacagatactgtgttggaagaataagcttccccaaggcgcttgcaccagccctgtcatctccaatatgattttgcacaggctagattcaaagctgaccaaactctgcgaagatctgaagtccgtgtactataccagatatgccgatgatattacaatttctagcaactgccctgtgtttcctgagactatcgccacctgggaccccaagaccaaagaagttcgattgaatcaagacttcgagaacatattcaagtcagagaacttcaacattaactatagcaaagtgcgactcaagtcaaataaagagcgccaggaaattacaggactgaccgtgaacgagttcccaaacgtccgtcgagtttttatccggcagattaaagccatgattcacgcatggaacaagtttgggcttgaggccgcagccaaggagtatatcgaaaaatacgacaggaaaaagttcaacgctgaaaatagcaacgttgtggactatttcaaaaacgttgtgtacgggaaattggcctacctgtacatggtgagaggcaaagagggagctgatcgcatttgtcagagatttgcagaacgcatactgaatatagatgacgaggtgccaaactttatcaagaatatgaaggagtccaagtacgatatattcctgagtcatgcttcagaagacaaatgcattgccgaaagaatctacaaagaatgtacgagcaacaacattaatgcgttctttgacaaggaatgcattaaggtaggcgactcgatcccggagagaattaatgatgctctgcgcacttctaagatcttcgtaattatcgctagctacatgtatagcgaaaagaagtggacatgtgaggagctgtggagtgctgtcaataaaacgatagagacaggggaaattaggatctatccaattgtcatcggcgatattaacgagttcaagcggaattatccacttctgggccataggaaggcaatgcggtgggaaaacaatgaatctgagatcgtaaaggatctggagaattttttacgtgtccaagagaatgaggtcaagtga

SEQ ID NO: 8008 - RNA, 1776 nt, synthetic construct
  source 1..1776: mol_type = other RNA
atgaaaaaaaaggaggaactggctcccgaataccttgaacgctttctgcaactcaactctattaaggagctttctacctttcttaacctgcggatttcagccctggaatatttcttgttttatgcgccagacgaaaagaagtatcgcattttcaagatacagaaaaggaacggaaatctgcgttctatttcaactccaaccgaaagactgaaagagatccagcaaatcctccagattattttccagtacttatacgccggcaagcctagcgtgcatgggttcgtccagaataagtcgatcattaccaatgctaagctacacattaacaagaagatcctcgttaatatcgatctctctgacttttttagctctatcagttttgggcggattaagggtatattcttaaaccaccccttcaatttcaatgaagaggtcagtaacgctttgacacgcatttgctgtcatgatgggagcttgcctcagggtgcccccacctcacccattctttctaactttgtttgtaggcagctggataaccagtttatgaagctcagcaaaacgagtaaggtgctgtattcgcgttatgctgatgatattactatcagcacaaacctcaagtcactcccgcaaagtatcggcatcatcgagactgataagctcgaactatccaatgagatcaagaagattctgcataaaaacggcttcaagatcaactacaataaggtgcgcttcgcgctgaagacaaataggcaggaggtgaccggcctcatcgtgaacaaattcatcaacatcaaacgcgactatttgcggcaggtaaagtccatgctgaatgcgtgggagaaatacgggctgtacttagccgcattcgagcacttctccaagtttaatcccaagacttatatgccgggcgacattgaactcgcatatacaaaagagttagccgggaaaataaattacatcggaatagtacgaggaagggacgacgggatatacgagaaactgtacacaagaatcaaagtcttggctcctagcgtaatgctgtcaatcatccggagacaaattcagagtagcaaggatcctatcctgttcaccgagggtaagtctgatattaaacatatcgaggcagccttttcccactttcgatcccagggactgtatcataacttgtcacttcatttccaccattacaaagaagaagacaaaatgtctaacggcgagctgcttaaattctgcgagacattcagcaagtcacacgagacgggctccattgtgatttgcttgtttgatagggacgatgaaaactttcttgccaatgtggccagcaccaaaaatactttcaaagaatggggcaataaggtgttctccatggtcctcccaataccagatcaccggaaatttacagacatctgtatcgagcacttttacactgataaggaaataaccaccaaggacaagaatggaaggcgaatctacctgtccaatgagttcaacaaagagactggccagcacgcaaaagaaaaactgaccataaagcacgttaacaaactgcaggctagaagagttcaaattattgacagcggtgtcattaataccgaaaacatcaactttgccctaagtaagaaccaatttgcagagaacatcttcaataaagtggacggatttgacagtttcaacttcgaggctttcaagctaatatttgacaatatccagacggtgatcgactatgccaacgatgaggcaaagaagtccaataaaatagagatgtccattctgtga

SEQ ID NO: 8009 - RNA, 1731 nt, synthetic construct
  source 1..1731: mol_type = other RNA
atgacccctgaggagattaaagaattaaccgaccgctttctcgccatcaagactccacgccagttagcaaaggtcttagacgttgagttcaagatactgacatactatttgtacaaggtgcccgaactgaagaagtacaacgaatttgacattcggaagcggaatggcaatgctcgccgaatcatagcaccaattggaggcatcaagagaatccagaggagtctgaatttcattctccagacactgtacccaacaaagaaagcagtgcacgggttcactctgggtaaatccatcaagacgaacgcgctagcccacgtcaagaaaaacctcatcataaacatcgacatcaaagactttttccctagtatccattttggcagagtaatggggctgatgatggctagaccgtttaacttcaatgaacctttagcgcgggtcatcgctcaaatctgttgtcataaggctagtcttccccagggagctcccacgtctcccattatctccaattttatctgcaggaagatcgataatgcgtttttgaggctgacatcatacaaccggtgcacttattctagatatgccgacgatataacgatttcaactaaccagaagaagtggcccaccgagattgctcgcatagagaacggtaaagtgctcctgtctaatatcatacagggcattttccactccaatggtttcctgatcaatgaagataaaactcgacatgcaaccagagtcaaccggcaagaagtgacaggcttggtggtcaatgagtcgatcaatattaatcggaagtactatcagcatgtgagagccatgatccacgccgtagagaaatatggcattacacttgccgccaacgagcactttctcaaatacaatataaagtccaaggagcccgataatattgagctgagcttccagaacgaactcgttggcaaacttggatttattggattcattaaggggaaagagaactccacctacaaaaaactggccgctcgtattaacactgcagaacctgggatccgactgaaaatagtgcagaatgagatcgacgaggcagccaaccctattatttttggagaaggcaagaccgactggagacacctaagtaaggccctcacaaaactgaaaaaggaagggatgtttaaaagcctgtttctgcgattcaacaggtacgaaaaccttgaaattaacaacgagcagcttttggatatttgcaaatcactgccaaagggagagccatctaagaagatcgttatatgcctatttgatcgggataccaagaaaattaacaatgctgttgttgagaacggtaaggactttaaatcatggggtaataatgtcttcagcctgttgatgccgatccccgtacataggaagttcgacgagatttgtatcgaacactattatctggacaccgagctcaagcgtacagaccatgatggcaggcgcatcttcacctctgacgaattcgataaagtgaccgggatccataaacaagagaatcttcaatacccatacattggctatctccagccaaacttccctaggattattgacagccacgtgcgcaatgatatcgggcagaatgtggccctgagcaagaacaacttttccaacaacatactcaatgatgtgcccttgttcgatgacttcacctttagccacttcaaaataatcttcgatcgtatcgaagagatcatcactagccaccctgtgggatga

SEQ ID NO: 8010 - RNA, 1740 nt, synthetic construct
  source 1..1740: mol_type = other RNA
atggaagaagatttcgacaaggacatcctcaattcatttttggaggttgaaactgaccgtcaattagcctcagtcctggacatcccctacaagaaccttatctacaacatctacaaactgccagacgaaaaaaagtacgagatctttgagataagcaaacgaaacaaatctaagcgtcaaatttgtgcacctattagcggaattaagaacatacagaagaaactctcgattatcctgaataatctgcattctcccaaatattgcgctcacggctacgtcaaagataaatccatcaagaccaacgctcagatccatgtaaagaaaaggattctgatcaatatcgacctgaaagacttctttacatccataaatttcggcagaattcgaggcttgttcaaatcctatcctttcaatttcaacgataaggtggccacaatcctggcccaggtctgttgttacaacgggtgtttaccccagggcgccccctcaagtcccatcctatccaattacatatgtagaaggcttgacaatcaaatcctcgatctgagtcagaaatgcaaggttgactacacccggtacgcagacgacctgacgttttcaaccaatcttaaagagctgccaaaagagattggggtgattcgggataacgaactgttccttagcaatgaactgatttctatcattgagtccaatggatttgttatcaatcgccagaagataaggttcgctctcaaaaataaccggcaggaggtcactggactcatagtgaacaacaggatcaacattaacagaaagtttgtgcggcatgtgagagccatgttacacgcttgggagaagtatggactggagaatgcagccatagagcacttcgaaaagtacaattacaagaacaagaaggtggaaaactatatcttctccttccttaaggagatcagcggtaaaatcggctatattggttacatcaagggcaaaaacaacagcgtatataggaacttgtttcggcgcattaaggaacttaacccagagattaagctaccggtgccaaaggatattatcgagtctaatacagccatcgtgttttgcgaggggaaaacggacgcgatacatattgagacagctttgaaatacctcaaaagcaagggagattttatagacctcaacattggattccatccttacgagggtaaagagatcagtaattcaaccctgtatgatatctgcaagaactggagcattactaagaaaagtgatcgcgttgatatattcctcttcgatggggacgatcgccgctataaccgtaagaacatctgtcagtatcctaacttttacaaacactggggggataaagtgtatagcgtgatgctgcccattcctccacaccgagactttgaggaaatttgcatcgaacactattataccgacgatgaaatcaaaacaaagggtaacaaggaaagaagattgtacttaagtaccgagtttgatccgaacacctgctttcacaaggaagaaaatgtcaatttcgctaataggaagacaattcggtcttcgtatcctaagatcatcgatggcaatgaccgcgttctgaatgaattcggcgtaaacgtggccctgactaagatggcatttgcagagaatattgcgaataaaactggggaattcaagaagatttccctggagaacttcaaggtcctatttgatgtgctcctgaagatattggaggactctaaagacgagaattga

SEQ ID NO: 8011 - RNA, 1713 nt, synthetic construct
  source 1..1713: mol_type = other RNA
atggaggagttgagcaaggataatttcctagcaagcactaacaagcgggaactagcagcttccctcggaatcaagtattccaccttggcctatctcctgtaccacctgacagacgaaaggaggtatagcgagttcgaaattaaaaagaagaacgggaaatcacggatgattgctgcccctacggtggggatcaagcacgttcagtccaacctggcctacatccttctggacatataccctagtaagaaaaatgtgcatgcttacctgaagaagcgaaacattaaatcgaatgcatcacaccacctgcataagaagcttttaatcaacatcgatctcaaggacttctttccgtcaatcaactttggtagagtgagggggttattcatgtcacacccttttaagttcaacgaagaagttgcgactatcttggccaagatatgttgttacaagaatactctgccacaaggagcacccacaagccccattctgtcgaatttcatttgccgcaaactcgacaatcaacttgttgatctggctcagaaaggtcgcttctcctacacgaggtatgctgatgacattacctttagcacgaatcttagtcccctatctcaggtgttgggcaccatatccgataataagattgtgctgtctgaggagcttacctctatcattaccagcaatggctttacagtcaatcaggacaagacaagatatgccaccaatgccaaccatcaagaagtaactggcctggtcgtaaatgagtttcctaacgtcaagcgacaatacgttcgccacatacgtgctatgcttcatgcttgggaacagtatggcctgaccctcgccgcccaggagcacttttccaagtacaatacaaagcacaagataatctcaaacccagagattagctacaagaatgaaattgcagggaagataggttttgtgggctccattaaaggaaaagacgacgatatttaccggaaaatgtgcatccgattgcgcgaactcgatccagatatcaagcttgccgtggcgtttagcaatttccataacgagaacaagcccgtgatttatggcgaaggcaaaacagactggaaacacctcaaagctgcactgcggtactttcagcataaaggggaatttctggacctcaatattcatatcaccgagtactctgaacaggtaaaaatcaataacgcggagttactggcaatgtgcaaaagtaaagccctcgatgccaacaaacacaagctgatattcctgttcgacagagataaccaccagatcaattctgaagctagtttgaacgagtccaactataaatactgggggaacaatgtgtacagtgtcctgttgccaaagcctgaccatagagattttaacgagatctgtatcgagttcctgtatgaagatgaaatcatacagaggaaagacaataatggatatcggttattcatcaacaacgagttctctaaagacaccggaaggcacttaatcaatgagaaactgcaactctctaacctgggtattatccgttgcccctacccacggattattgagcatgatgtgatggacatcgaaaccggcaagaacaaagccctgcctaagaacaacttcgcgacttatattctggagcagcagccgccctttgacaatgtcagcttcgagcacttcagaggaatctttgagctcctaacaactatcgccactgagtga

SEQ ID NO: 8012 - RNA, 1734 nt, synthetic construct
  source 1..1734: mol_type = other RNA
atgcagaccgagatgcccgacatccagagcaccttccaggcagtgacgactaagcgggagttagcagagaggctggggtctagtctcaagatgttggcctactacctgtataagctcccgccagaacagcagtataaaaagtatgatatccccaagcgggctggaggaacgagagaaatctacgctcctatatctggaattaagcagatccaaaagcgattgagccacatactgcagaattatcagcctgcaaaattttgtgtccatggctacgtcaaggaaagaagcattaaaacaaatgcttacatccacagaaggaagcgcatagtgatcaacttagacctgaaggactttttccctagcattaactttggtcgggttcgcgggctctttaaatcggccccattcggattcaacgatgaggtcgccaccaccctggcacagatctgctgtcatgatggaaagcttccccagggtgcaccaacatccccagtgatatctaactacatctgccgaagactagacaatgagttgattgccttcgcgagaaagcacaagattaactactcacggtacgctgatgatataacattttcaaccaacctccaatttctgcctacagccgtggggcatattaaagagcacaagatcgttttatccaatacgctgcagaagatttttcaggacaacggattcacaattaatgaggagaaaaccagatacgccctgcgcaccaaccggcaggaagtcactggcctgattgtcaatgcaggtattaatgtgccccgcaaatatatcatgagaatccgcgccatgttgcatgcttgggagaaatatgggctggaagccgctgccaaggagcactttgaaaaattcaactacaagcacaaacacccagactacccagagattgcttttaaaaacgagctgactggcatgctgaactacgtgggccagatgaagggtattggcaacagagtgtacattgccctctactatcgaatcaagcgtctagactcaaatatcaaactgtctatccccgaatatatcccggctcccgaaggaactaccgtagtgttctgcgaaggcaagacagatccgctccatttggagactgccctgtcatggtttcaccagcaaggcgagtttagtgaccttgatctgcatttcttcaaatggaggtccgatcttgacattaataacgacaccctcttgcagatgtgtcaaactaggccacaggcaaagcgcgataatcgaatcgagatctatctttttgaccgtgacgtgcccaggtatatacaaaaggccgcggagaaagataaaagctataaacactgggaagccaatgtgtatagtgctttactgcctgtacccgaacatcgggatttcaatgagatctgtatagagcacttctaccctgatgaagacctccttaaagaggataaggacggcaggcggctgtataccactcgtgaatttgaccctgagtccgggtgccatctcaagctcaaagaggtttattacgcgggcacaagggcgcaactacgctgcaagtaccctaagattctggactccaatgttaggaaaaccgggtctgatgaaaatattgccctgagcaagaacaacttcgccaagaacatctttcacaaaacagggtccttcaaagaagtaagtttcagctacttcaaagtgatcttcgagctttttgaagagatcatggctcaggcaaagtga

SEQ ID NO: 8013 - RNA, 1728 nt, synthetic construct
  source 1..1728: mol_type = other RNA
atggatggttttgacagcaacatgatcgagttctgtgaaatcgattcacgacgggatctcgctgcatatcttggttgccagtacaaggatttgatctataaccttttcgtgctccccgacgacaagcgttataaaaagattcagatcccgaaacggaacggggacacacgcgacattctggccccaagctctggaataaagagagcacagagaatgctggcaacaattttaagcgacttgtacaaaaggaagtcatgcgttcacggttacgtcaaaaaacactcaatactgactaatgcctccgtgcacaagaacaaacgaatcgtgatcaatattgacctgaaggactttttcccatcgataaatttcggcagggtgcgggggcttttcctgaatcccccttttagctgttgtgaggaggtggccactttcatggcacagatctgctgttttgacggcgtccttcctcagggcgctccaacatctccaattatcagtaattacatctgcagatccctcgacaacgaattgctgaagtttgcgcgaaaatatcgtctcgactacacacgctacgctgatgacattacgttctcaactaatttacgcgaaatccccagtaggttgggagtaatccaggagaacaagttagtcctgtcggaatacttcacctccatcatagaagaaaatggcttcaagattaacccgagtaaggttcggtattcttatcatactggacaccaggaggtgaccggcctcgttgtcaataagatagtgaatgtacatcgtaagtacgtgaaaagaatccgcgccatgatccatgcttgggagaagtacggcctcaccgcaacagcaaatgagcacttcgagaagtacaactataaacacaggctacccgaatccccagattacgcgtttaagctagagctgcaaggtatgatgggctttctcgccgcggttaaaggcaaaaacaaccaagtgtatgccaggctgtacgagaggctgattctcctggataagcatacaatcttgcagcctcctctgcggattaccgcccccagagactccgtggtcatttacggggaaggcaaaaccgacgtggttcacttagctgccgcatatcgccattttcaacagcaaggagaattcctggggctaaagctgcatttccatcgctggggtaaccatgatgtaaacaacgagtttgtgtacaatatgtgtagaaccaggagtgaatccaaagagaatgataacctggagatttatatcttcgaccgagacgttgctagatacgtcaaagataccacggagaacgggaagggatttaaaagatggagcgaccgggtatattccgccgtccttcccattcctcctcaccgcgattttaatgatatctgcatcgaacacttctactccgatcaggatctggcccggcgagataagtctggaagacgcatatacaccagctttgattttaatccgcagtctggaaatctgaaggacagcaacgacatctattacccatataggcaggagctgaagaggacttatcccaaaattatcgacgataaagtgatgcgtataagctctggcgaaaacattgccctctcaaagaacaacttcgctttgtatatctctcgggggattggggaattcgctgatgtggactttgagaattttaggcctatcttcaaacttattgaggagatagtgcacaatagtatgcggtga

SEQ ID NO: 8014 - RNA, 1713 nt, synthetic construct
  source 1..1713: mol_type = other RNA
atgaaaaacaaggaataccgcgatttcttgttacttggaacccgagaagatgtggctaaatttctaggcggaagcctcaagaacctgagctttctgctctatattctgcctaaagagaaacagtatcacgacttcagcattcccaaaaaaaatgggggcaaaagacagatttcctctcccatctcctctattaagcgttaccagagggagctggctgatattctctcagaatattaccacgttaagtctacggtgcatgggtatgtcaagggaaagaatataaagacgaatgcgataatgcattgcaataagaagtggatcgttaatatcgacctgaaggacttcttttcgtctatccacttcgggagagtcctgggggtattcaaaagcaagccatttgaatttaacgacaaggtggcaactcttctggctcagatctgttgctttgatgggaagttgccccagggagccccaactagtccgatcatatcaaattacgtgtgccgaaatctcgataataacctcattaactacgccaagaaaaacaagctaacatactctcgctatgccgatgatatcaccttctccactaatatgagttcactcccagagaacctaggtaaaatttccgaggaccacgaactccggctgtctgacgaactgttgggcatcatcacaaacaataattttgccgtgaactcaaccaaagtccattacgcaaacagaaataataggcaggaagttaccggtctgatcgtgaataagaaggtgaatatcaagcgaacatacatcagaaggataagggctatgctacacgcatggcaaaaattcggcctgtctaacgccgctatcgaacactttaacaaatacagcatcaagacccaaatccctgacttccctgacttggcctttaagaaacgtatcacgggacagataggctttatcggtcacataaagggcagcaatgacaacatatacaggaacctttacaaacggatcaaggaactggaccctatgactaaacttacacttccgaacattatttccagcccagagagctgcaatgccataattctgtgtgagggcaaaaccgatagtatacatcttgagacagctctgaaatatttcatcgaaaggggcgaattcgtaaatctcaagattcacttctacaaataccccgacgaggcaaagatcaacaactcctacctctataagttatgcgaggctcgggatctgatcctgcatgacgtccggattgtgtgcctctttgactgtgatgatgcgaaatatgttaaacactgttgtgagggaaagaaattgtataagaactggggcaataacctgtattcatgtttattgccacaacccatgcatcgggacttcaaagagatttgcattgagcacttctacactgatgacatcctgctgaagaccaacaacaaagggagacgcatttacctgtccaacgagtttgtgtatgagacagggtttcataagaccgagaatattcagatccgcaagagagacgatgccaagagtccctatcctaagattattgacagcggagtcttcaagtcaaatggcgaaaatatcgcgatgagtaagaacgactttgccaatagtattgccgcaggtgaaaaacctttcgataacatatcgttcgagacttttcgcccaattttcgatttaatctccgatatcgtgaacgagtga

SEQ ID NO: 8015 - RNA, 1725 nt, synthetic construct
  source 1..1725: mol_type = other RNA
atggaggagaacaaaaactacgaagacttcttacaagtcacgaccaggtctgatgtcgccacttacttgggtggcagccttaagaacttatcctacaacttttacgtgctgccaaaggagaagcagtatactaagttcgcaatccaaaaaaagggagggggcgaacgacatatctgtgcaccggccagtagcattaaactctaccagagacgcctggccaccatcctgagcccttactactccactaagcccacggtgcacgggtatgccttaaataagtcaatcaagacaaacgccaaggtccattgcaggcgaagatggattgtcaatattgacctcaaggacttttttcagagcatgcactttggtcgggtgagaggagtatttctgtccaacccattcgctttcaatgaccaggttgccaccaccctgacacagatttgttgcttcgaaggcgtcctgcctcagggggcaccaacttcgcccattatatccaatttcatctgcagacgcttggataatgagttgctagaatttgcaaagaggcacaaactatcctatagtcgatatgctgacgatattactttcagcactaacttggctgcgattcccgctgaactcggcactattagagaagataatatcttaacgctcagcaaggaactgcgggatattattgagaacaaccagttcatcgttaacgagagtaagatccgattcgccggtcggaacaaccgtcaagaggtgacagggctgatcgtgaatgaaaagataaacgtaaagaggacctacattcggaggatccgcagtatgctgcatgcgtgggagaagttcggcatagctaatgctgctaaagaatacttcgagaagtatgccacaaacaacaaaatgcccgactatccggacgttgtgtttaagcggattctggtcggcaggatcgcatttatcaaacagataaaaggcattgacgacaaagtgtatcgcaatctgttcgggaagattaaagcgttggatcctactatcaggttgaccctccccacactcatcacatctcccgatacctgcagagccgtggtactgtgtgagggcaagaccgatggaatacacctacacgcggccctccagtacttcatagagcgcggagagtttgtggacctgaacgtgtacttctataagtacccgaccgaagcagacctctccaatagctacctttacaagtattgcgagtcatcaaatctgagacagcagaaaaagcgtacaatctgcctgtttgattgcgatgattcacggttcgtcgccaagtgtcaagaagaggggaaactttacaagtattggggtaacaacctgtactcttgtatccttccaaaacctgcccatcgaggatttgacgagatctgcatagaacacttttatacagatgaggttctttgtagagagtctaataaacatcggcggatttatctctctaacgagtttgatcctatcaccggcaaacaccgtaccgaggacctgatcatgagaaaacgcacagacgctaagagctcttatccaaaaataatcgactcaggagtttttaaaccaaatggggaaaatgtggcactcagtaaaaacgatttcgccaatctgatcgcaacgcgcaatgccccttttcacgacatttcgttcgaggaattcaggcccatctttgagctgctttccaggattgtgaatgctgcttccgaatga

SEQ ID NO: 8016 - RNA, 1761 nt, synthetic construct
  source 1..1761: mol_type = other RNA
atggacaccggtaacggaaatatcctgaacgggtttacggacctcaaaagtaaggccgaagtggctgaatacctgggaggatcgctgaagaacctgtcttatgtcttctacgtgcttcctaaagagaagcagtacaagaccttttccattactaagcgcaacggaaaaaagcgcaccattaatgctcccgtatcctcaatcaggctgtaccagaagcggttagctgagattctgtcaggtttttacaaacgaaaaccatgtgtccatggttatgccaaggggtgctccattaagagtaacgccaaaatacactgccgtaagaagtgggtggttaatattgacttgaaagatttcttccccagcatccacttcggtagagtgcggggcatgttcttgtcccagccctttgaatttaatggcaccgtcgcgaccaccctggcccaaatctgctgctttgagggcgcactgccacaaggagccgccacttcacctattatcagcaactttatttgccgccgtttagacaatgatctcattagtttcgcaaagaagcaccgccttacgtacagccggtacgcggatgatataacattctctacgaacctgcccgctctcccggaatccgtaggcaccattgccagcgacggctccttagaactcagcgacgatctgagaagactgattgaaaagaactcattcaacatcaatgagtctaaaatcaggtattccgatcggcataatcggcaggaagtgactgggttaacagtgaatgagaaaaccaatgttcgaaggacttatgtgcggcgagtgagagccatgttgcatgcctggcaacagtatggccttaaggacgctgcgagagaacactttgagaaatattctgacaaagtcatgcccgagtacccagaactgacatttagtcggattgccactgggaggatccgctttataagacagattaaggggcccgatgaccatgtgtaccggaacatgttccgtcagatcaaggcattggatgcaagcataaaactcgatctgccagcattcttcaatacaccggacgggtgtaatgccgtcgtactgtgtgagggcaagaccgatggactacacctccaagcagctctccgctatttcataggaaaaggagagtttacaggccttaagatctactttcacagatatcctgataagatggacatcaacaactcgattttgtacaagtgttgcgagacatccgtgacaaggcagtctaatattttgcgcatctgtctatttgaccgagacgaccgaacatttatgaaaaaatgcagagagggcgatagtctgtataaagattggggtaataggctctatagttgtgttctgcctcagcctgaacatcgggacttcagtgaggtgtgtatcgaacacttttacagcgacgaagtcctaagaactaagtctccaaagggccgccgtatctatctgtcaaacgagttcgatccagggaccggcaaacatctctctgaggaccttacctgtagaaaaaggactgatgctagctgctgctaccctaagatcatagactcaggggttttcaaacccaacggagacaatgttgcactctctaagaacgacttcgctaatctgatctttaacagggagggggacttcgccgatatctccttcgagcactttaggcccgtgttcgaacttctgagcgagatcatagagaaggatggcgcgctaaaggagaaactgagggcctccagctcagcttga

SEQ ID NO: 8017 - RNA, 1713 nt, synthetic construct
  source 1..1713: mol_type = other RNA
atgacggggggctgtttttacatgtcaatcgagaatagagacattctgttttacaatgctgctacgaaggaaatgctggccgccgcactaggaacccgactgaaccggctcgtttattacctctacgtcgtgcccgactcagaacgttatacaaaaaagtgcatactgaagaagagcgggaaagtgcggaacgttgccgccccaagaagcggtttgaaattcatccagaggaatctggcgagcatcttaaacaccagtgttcctcagaaaagttgcgttcatgggttcgtacctaagaagtccattataagcaacgcatccgtccacctgaaacgcaattttgtgattaacctcgacctgaaagacttctttccctcgattaacttcggccgggtactgggactgtttaagtcggcacctttcaacttcaatgacgaggtcgcagttactttggctcagatatgttgtttcgagggctctttgcctcaaggcgctccttcatctccgattatctcaaatctcatctgccggagcttggataatgacctgatgcgcttagccaagagtctgaaacttagttactccaggtacgctgacgacatcacattctccactaatctgaaagagttgcccaagggcctcggcgaagaggtggaaggcaaatttattccatctgaagcgttggttgacatcatcggccgtaacggtttcgagcttaatttcaacaaactaagatgcagacgcaagtgtcagcgccaagaaatcaccgggatagtgagcaacgagaaacttaacgtgccccgaaattacgtccgccgagtgagggccatgatccacgcttgggaagtatatggtttagagaaggctgcctacgagcactttggtaagtactccaggcgtaggttcctctatcctgaggcatcttttcgcaagagagtggcaggaatggtgggatatatagggatgattaagggggtcgattcccccgtctacttaaagttatacgagaagttgaagtccctcgacgatagtattaagctgaaaattccggaatacagcggctcagccgatatggtagtgtactgcgagggcccaacagatccgatgcatcttaaggcggcgctgtaccactttcggtcaaagggaatgttcaactcccttaaggtggatttccatatgtatcgggacgatatgaccgtcggtcacggggagctgtataattatatggtgcggaagcacctgatgaaaaaggataatgtgatcgaggtgtatcttttcgataatgacctgaagcaatacgtgcagaaactcgacgggaaaccttttatcactgttggacaccccaaaatttatatggcactgctgccaaaaccagaacatagggatttttttgaagtgtgtatcgagcacttctataaggatgaagacctgtgcaggaaggatgcaaacggaagaagactgtattttgcccgcgaattcgataaggacactggcgcccatgtgacagaggatgtcaggtctgtcaaactacatccactcaagcagcccggatacaccatcattgacaacagaattctggataaagacgatcgaagtgtagctctcagcaagaaagactttgcccttgccataatgcatcggaagaaatctcacagcgacgtcgatttctctgcctttaaagctatcttcgagatgctacagatgctcgtgtga

SEQ ID NO: 8018 - RNA, 1713 nt, synthetic construct
  source 1..1713: mol_type = other RNA
atgggcgccttcttcatggactacgacgagaggtatatgcgtttctatgaagctgacacaagagagctcctcgccgtggcactgggcacaaagccaaataggttaagctactacttatacgtgctaccagagtcagaacggtacaagaagaagtccatcctgaaaaaaagcggtaaggtgcggaatgtagcagcgcctactggaggcttgaagttcatacaaagaaatcttgccgatatcctaactggatctctagcccagaaaagttgcgttcatgggttcgcgccagatcggtctatcgtcaccaacgccaaggttcacctgcgacgaaaccttgtcatcaatctggatttaaaggacttctttccgagcattaacttcgggcgagtgtacgggctgttcaaaagccacccctttaattttaacgagctggttgcagccaccctggctcagatttgctgtttcgaaggcagcctgccccaaggaagcccctgtagccctgtgatcagtaatctgatttgcaggtctttggataaccagcttatgcatctggcaaagtccctcaaaatgagttattccaggtatgccgacgacattaccttctctacgaatttgaaggaaatccctgaggaaatcggtagtattgtggacggccgctttgtcccatccgagaagctgaccgggattatagagaggaacggtttctcactcaacgtaaacaagactagatgtcgcaatagaaaccagaggcaggaggtgacgggtattgtaaccaatcaaatccccaacgtgccgcgaaactacgtccggagaatcagagctatgctgcacgcatgggaagcctacggccttcagaaagctgctgaggagcatttttctcggtactccaggaagcattgtgtgtatcctgaagccagcttcaagaagcgcttggccggcatgattggctacgtcgggatggtgaaaggacgtgattcatccgtgtacataagtctcttcgagaaacttaaagccattgatgaaaccatccggttgcgcctcccggaatactcgggcgatgccaagatggttgtgtattgcgaaggaattacagacccaatgcacttgaaagctgccctgcgccattttcgtagtaaaggcctgtttggtggcctgaagatcgattttcacatgtacagggacgatgtcccagtcgggcacggggagttgtataagataatggaggggcgacacctcgttaagaaagacgatgtgatcgaggtctacttatttgacaacgaccagaaagattatgttaccaagcttaacgggaaggcttttatgacttaccgccaccctaaagtgttcatggcactgcttccccagcccgctcacagagacttctatgaagtgtgcatcgagcatttttattcagattccgacctgatgcggaaagacgcaaaaggacggcgcatctattttgtccatgagtttgacaagtctacaggctttcacaaaactgaatcagtgagatgtctcaagctctcgcctctaaagcagaaagagtatacacccattgtagatggaatactcaatgaaaaggatcagtctgttgccctgtccaaaaaggatttcgctctggcggtactgaatggaaagcaatcccatgcagacgtggacctggatgcgtttaaaagcattttcgagatgttcgagaatatatacatctcatga

SEQ ID NO: 8019 - RNA, 1686 nt, synthetic construct
  source 1..1686: mol_type = other RNA
atggagctttctaaggcagaatcacgggaggatgtgctcctggccctgtgttctagctggaagaacttggcttattatatatacaggctaggtgatcgacggtacgaaaagatggagatagtaaaaaagagtggcaagttacggaacattgcaagtccagtgcgtggcctgaaatatatccagcggaacttatcggccgccctatcatatggctataggcagaaagggtgcgttcatgggttcgtcccccagagaagtattctcacaaacgcatccgttcacgtcaataggaggtatgtaatcaatctggacctcaaggactttttcccttctattcacttcgggcgggtcgtcggcatgtttgttggaccaccttttggatttaatcacgaggtggctgtgactcttgcccagatctgttgctttgaaagagtactcccacaaggcgctccaagctcacctgtgattagtaacatagtatgccggaagctcgacaatgaactcctggggctcgctaaagaatgtaggttaaactactcccgctacgccgatgatattacattctctactaacctgtgcgagatcccggaacggctgggaagagttgaaggtgagcgtttcattatatctgacgggctccgccgcatcatcgcggataatggatttgaattgaacgatgagaaagtgagatggagctctgagtattacagacaggatgtaactggtcttgtggtgaatgagaaagtgaacgtgccccggacttacatccgtagaatcagaagcatgttgcatgcttggcagaagtttggtcttcaggccgcagcgaaagagcattactccagattcagctttaagaaaactaacaattgcgaagaatcctatcgacgccgcgtcaccgggatgattgggtatgtcggcatggtcaaaggccgcgactccaaggtgtacttgtcgctggtgagcaaactatacgacctggacaagggtatgtccctggccgttcccgatctgaaggacaagacaggcatggtcgtgtactgcgagggaaagacagatcctatccatcttaaagccgccctctcagcttttcgcaagcgaggactgtaccacgaattagacgtgtgtttccatatgtacaagccggacaagtcaatttccaacagtaccctgtacgagatctacgctaaaagggatgtcgtgaaggaagggaatcagatagaagtgtacctcctggattcagacgacaaaagatacacagataaagtgaaggccgacggaaagtgttacaccaaaggcggccaaaatatttatctagcagtcctgcctaagcccgagcatcggaatttcgataccgtttgcatcgagcacttctataccgacgacgacctgcgtcgatgtgacaaaaacaataggcgcatttatctgtctggcgagttcgataagaacacgggactgcacttggtggagtccggcctgaggacgaccaaattgtcacccctggccaagtctgactatgccatcatcagcgagggggtccttgattgtcatgatgtgaaccacgccctgagtaagaatgagtttgcacgagcggtgtcctgcagggcagctagccacaaagatgttgagttcagccacttcagcgttatttttgacatgcttatggacatccaaaaggacgctttgtga

SEQ ID NO: 8020 - RNA, 1701 nt, synthetic construct
  source 1..1701: mol_type = other RNA
atgaacctgctcaacatcaagtctaaggaggatcttttggattatattgggattgaagaagcccagctgaatcacctgctgtatcggttgcctaacgcctacaagtatcatacctttgaggtgaaaaaaaagaacggctcatctcgtattatcaactcacccaatcctgagttaaaggtcatccagaccaagctcaaagacgaccttgtggagtttttcggcaaaaagaactgtgttcatggctttgttaaggacaagaacatcttatctaacgcgagcagccatctcaaaaaacagatcctcattaacatcgatctgaaagacttctttagcactattcattttggtcgcgtaagagggatgttcctctccagcccctttagcttcccagaaaggatagcaaccctgctcgcacaaatatgttgttttaatgggctacttccgcagggcgctccaacgagccctatcattagtaactttatctgccggaagcttgataacagcttcattcagttctcaaaaaagaattccttcttctacacacgatatgctgatgacattaccttctcctccaatatccgaagtctgtcttcggagctcggaattttcaacaaggaccagttcgagattagtaaatcaattctgaatcagatccacaacaatggttttacgatcaacgagtcaaaggtcaggatggcctcccgatttaacaatcaaactgtgaccggaatcaaagtaaacgtaaaacccaatgtgtccaggttttatatcaagcagattagggcaatccttcacgcctgcgagaaacatggcgtcgaaaagactgccattgtgcacttccagaagaacgaaatcgatttgaacaggctcaagtccccaattgacttcttcattaagagactagtcggtaaaatcagtttcataggtttcgttagaggaaaggatgacttcctattcaagaagctgtatgaccgggttaaggtcatcgtgcccaacgcccggctgagcattatttacaagaagatagacgaatccaagaacacactgatcttgacagaagggaaaacggactggaaacatatcaaagctgcgctgataaaactgcaggcccaaggcgcttataacaacctcaatttgacctttgctgactatctggacgagcacaaggtgtcgaattctgagttattcaagatctgtgaatccataccgaaattaggaatgcagaaaaataagaccatctgcatctttgatcgtgacgataagaacttcatacccaaagtgacaagtataaacgacttttacaaggattggacaaataatgtgtactcaatggttctgcccgtgccaaaacaccggaatttcgagaatatttgcatcgaacattactacacagatgacgatctgttcacttacgatcacaacaatagaagaattttcgtgagcagcgagttcgagaataatggcaatcacaagcttgagaagtatcgctacaaagggaatctggagaagttgaaaaaccgctttcctactatctttgatagtcaagtagtggattcttctggagcttctatagcactgtccaagaatgattttgcagactacgtctacaacaacaatccacgctataattcatttgacgtcgaagcctttaaagagatctttaaccacatctacgtgattgaaaataccactcctaaatga

SEQ ID NO: 8021 - RNA, 1620 nt, synthetic construct
  source 1..1620: mol_type = other RNA
atgcgctcgcaagaatttctgaaaatcaaaacagaggccgaccttgcgaattttttgaatatctctgaaggcacgcttaagtactactctaatccaatcacaccatccaaggcttacactaccaccattctgaaaaagaagaatggtgaagatagaatcgtgtgtgcacccgtacggatcctgaaatatatccagcggcagattagtgacgtcctgtatgaactgtacaagccttccaggtgcgtgacaggatacgtgcggaagaaatccatttgtgacaatgcaagacctcacacttcaaaacgcatgataatatgcctcgatctcaaggatttcttcaccagtatacactttggccgcgttcgtggcatgttcctcaatcagccctttaatttcaataccacaatcagtactgtgctggccaaccttacatgtcgaaacggatgtttgccacagggcgccccttcgagccctatcattagcaattacatctgccgacggttcgacggggactttatgaagttgtgcgccaaatacaaactagtgtacacgagatactgtgacgatatcaccattagcacaaaggcctactccttcccacattctattatctattttagcaccacttggtccctgggagatgacatccgtgagctgattcaaaagcacaacttcatccttaacgaatcaaaatttcgcgttgtgaccaacaaaacacgccaaatggttaccggactggtcacaaaccagaaggtaaatattcccaagaacaaataccgtaagctacgagcagaattgtattataccctaaaaaacggactcgatgaagccgcgaagcacgatgggtacattcataacaagatcgtggacaagaatgccttcctgaaccatctgcggggaggggttaactttttcaaaagcgtgctcgctgtggacaaccctagatacaagtggttagctaatgagttcaacaaaattgtaggcgagaattactttttcgtgccatctagttgggacgagcttaagaacaaagctatattcgtcctgatgaacaataaggagacgagccaggggactgcattttacgtcaccgacatcggtttaattacctgcctgcacactgtgtgcgcgatatctgggaggcccagcaagtcagacgtcgagactgcactcaacgattattacgcctttctcccgaacactgagtataaccacattaagctgtcttattgttggcatagcaatgatcttgatttgctggtgctgaaattcgtggattacacgatcagaatcgggtatgagatcgagaaaaatattgtcctgagtgatggcataaatcatctgaaggccctcggctatcccgagtatggtttgggttgttcctgctgcttcatacaggacatgtccatcacatctaacagggtactctgtggtttaaaactctacgtggtggacaagaccttttatactggagctagcggggggccggtttttaactccgcaaacaaggtcgttggctatattgataggggaaatgagattggctcagacgaagaaaggtataatgctttctgctcaatcgcccccttactggacgagttcaacaagggcacactgtga

SEQ ID NO: 8022 - RNA, 1665 nt, synthetic construct
  source 1..1665: mol_type = other RNA
atgtataatgaatttgggaggatccaacactttaagaacattgaaacaaaggacgacctgctctacgtgctgaatatcagtagtcggaagtataactacctagtataccagaagaaaaacctctacacctccttctatattaacaaaaaacagggcggttttcgcaaaatcctttcaccctgttatgatctgaagaagatacagaaggaactcaacattattatgagcaacaactacgagtttaacaatgagacagttcacggctttgttaaagagcactctattaaaaccaacgccacagtccataaagacgctaattacatcgtcaacatcgacctgaagaatttcttcgacaatattcacttcggccgcgtgcgggggatgtttatgaagcctcccttcaatttcagcgactatatcgccacaaatctcgcaaaactcacttgttatgagaaaaaacttccacagggggccccaaccagtccgaccattagcaatataatttgctataggatggaccgggaactgagctacctgtgcaataagtataattgcagatatacccgttacgccgacgatataaccatttccacgaaaatgctctatctgccgaaagagatcgccaaattcagagatggacaggttattctgagcagcaatataacagacactattaagaacgaggggttcaccattaatattgacaagctgaaaatctctcccaatactgatcgccaggaggtgactgggctcattgtgaacaagaaggttaacgtgcagaaggtgtatatcaagaagctgcgggcattgctcaataacgtatctaagtatggcttctacttggaaggatgcaaatactttgagaagacattgaacgattgttctaataaggactatgtggaacatagattcatcaacgtcttgaaaggtaaaatcgagttcctaaaaatgatccgaggcatcgatgactacgtgtacataaaatatgcgagcctgtttaacgagctgatcgggtatgagtacttcgataccgactacggtctgacaatgaaggagttcatcgaaaaaagggtgtaccctcttatctcatacgatgaaatggttcaaggaacttgctttatggctgacgagattggcatgataacttccacacatgtgctaatatcacctcaatcctttatcaccgagaacaaatataaagagatcgagttaaaggacaagtttaatttctgtactgtcggttcaaagccattctatatcctggatcactacaacagaaagtatatcattaaccctgaaatcacccgtgagcagattaactccgacatccttttttacaaatgcatccccagtaagaagcgatttaagataaacatgacgtacgagcccaagatcggcgaaacggtgtatcttgctggctacggagaattcaaagatttcaagacctccacgattaattacataaagtcgaatgtgaccggatacacagaatttttaggaaggaaagtcgcatgtatcaactctaagatataccatgggatgtctggcggtccagtattgaattccaatagggaagtcattggaattatctacgctggcttaaacctggaggatgatgataacggggtcatcagcaagactaatggattcgtgctgtttcagtga

SEQ ID NO: 8023 - RNA, 1551 nt, synthetic construct
  source 1..1551: mol_type = other RNA
atgaactttatcgatattaagtccactcaagatctggcagactactttgagctggattacaatatcctggctagaattacttatggaccttctcggagcaacctgtacaaggttttcgagattccgaagaaatccggtggctcccgcatcatccacagtccggagaaaaccctcagagtaattcagcgcaagctggccgatgaacttaagcagcactatcgcagacacgacgccgccttcggctttgtggacaaatattcgatcaccgataacgccagtaagcacataaaccaggattggattctgaacttggaccttgctgatttttttccctctattcacttcggacggatcaggggtttgtttcagaaaaccccattcgcctttcctgacaaggtcgcccagtggatcgcacagctggctacatttaatggcaccttaccacagggtgctccctccagccctatcttgaccaacatgatctgcttacgcttagataaagatcttaaaaagctggcacgacggcatgatctgtcttacacaaggtacgcggatgacattacgctcagttccaaaaagtatttccccaaggaaattgccaagatggagaaatcagacaacgaatcactcgcgactctgggggccgacgttgtctctataatagagaagaacggattcaaggtgaatcccagtaagacaaggttggtgagcaaatctggaaggcaggaggtcacgggtatagtggtaaatgagaagagcaacctaccacgacactatatcaacactatccgcggggagatagggcaacttaggtaccttgatggcgaagccaaagatgccctccaactgagagttttgggtcgtctcggacatctgaaaaaagtagtcggcgaatatgaccctcgttacattaagctcaaggctaaactacatggcattaagctatcatgttcccccaacgaaacaatgtacagggctgtgaactggatcgtcgagaacgacgatggcgtgtatgggacagccttccatgtcgaccatcttggatggattaccgcatgccatgtgataaccaaaccagcagctatcctgaatttcaagctcttccatccagacgactcccaaaataagtacgcaatccagctgaagagcaacttcttcgatgctgacatcgactacgtgatcttcaatgcacctatcaaaccaatcataagcgccagaatcgctccgaagcagatagagaatggggaggcctgtgtgctgtcgggatatcccaatcacaatcacaagaacaatagcgtgagcattattgaagcgaaaattacctctacacagacgatctttaaggcccctcggtttgtgatcgacgcaaacatttttcatggcatgtccgggggaagtgtttttaacaaagagaatcagctggtgggcctggtgacccacggcaatgaagacggggggaccactgttctccagtcagcgttcacttcaatccacctcgtcatgaatgacattactaataaatctccccaacgaatcattcggacagaatga

SEQ ID NO: 8024 - RNA, 1734 nt, synthetic construct
  source 1..1734: mol_type = other RNA
atgtcccacctcgccaagctcaaatccgccacgtctaggaaggagctggcacttatactggggtacaagccaaaaagcatgaccgcaatcgtatataagacccctaccgcagataaatacgccacatttgatattgacaagaaatctggtggaaagcgcactatcaaggcccccgctcctaagctgaagaacttgcagagtcacctgtctcacgtcctctatcagtgcctagctgagatagatcgggcgcgggacgcaaagcctattagctttggattcagacaagatagatccattactgaaaacgccagtaggcacaagcgtcgccgctgggtcttaaatctggacctggaggatttttttccttccttcaacttcggccgggtcaggggattcttcctgaaagacaaagcctttgatctgcatccagaagtagccaccacgatcgcccaaattgcttgcgacggcactgcccttccccaagggagtccctgttcaccagtgatctctgagctcatcgcacagatcctcgacatgcggctggtccgactcgcgaaaaagcacggtgtgacctacacaaggtatgctgatgacattactttctccacaagccagaaggacttccctgccgggcttgcccaggttgacgagagcgatccctccgtttggcatctcagcgatgaattgaccagaaaaatagtaacctccggtttcgctatcaacaacgctaaaacaaggatgaactttcgaggctctaggcagattgtgacgggtcttgtggttaacgagaaagtgaatatccggagtgactattatcgacgtgcgagggcgatgtgcgatacattattccagacagggcaatactataaggctgtgattaagcccgatgatgctgacgaggaaccgaagccggaagtgacttcaaacctgaacccactacagggtatcttggggcacatctacgccgtcactcagagtgccgaacggcgtgaggtgtcggagcagagacaaaatcctcgagccattaggaaattgttccggcgctttctgttctacaagtattgtattgtgttgaacgaaccactgatagtgacagaggggaaaaccgatccagtatatctcagagaggcagtcaagtcaagagtgaagttccagccaatgctaggggcccatggcaaagacggctttaaacacgcagtccgctactttaattatggcggcctggctcatgaggtgatggacctgggaggcggcacgggagacttgaaatctatacctctggactacttaagaaacctgaaacccagtaaaggcactcataaaccttttgcttacaagccaatgaagtaccccgttatcatcgttttagacaatgacgatggactggctgccgtcgcgagcacagtgaagaagaacttcggaaccgagatcgataagaaaagcacacaggatttttacaatgtcatcgacaatctctacattgttaaaacccccgaagacggctccaagaatacctgtatagaagacatgttcccgaaagaatggagagaatacaagatcaatggaaagaagctgaatactgcatcgaaaattgatccctcaaaggacctgtcaaaagaggcctttgcaaaaagcgtggtgaaggcaaatgccgacaaaattgatttttctgggttcgatcctcttcttgagcgcatctgcaaggcagtgcagcactatgccgctaagagctga

SEQ ID NO: 8025 - RNA, 1098 nt, synthetic construct
  source 1..1098: mol_type = other RNA
atgaccgccatcgtctacaagactccgctcgccctgaagtacaccacatttgagattgataaaaagagcggcggaaagagaaccataaaagcaccagcaccaaagttaaagaaactgcaagcccacctgtcccatgtcctgtatcagtgcctggcagagatagagcgcggtagtgatgctaagcctatatcatttgggttccgtagggaccgctctattagtgaaaatgctctgagacacaaaaggcgaagatgggtactgaacctggaccttgaagatttcttccccagctttaactttggccgcgtgcgaggcttttttctcaaggataaggctttcggcttgcaccctgaggtggcaacaactatcgcgcaaatcgcttgtgacggagccgcccttccacagggttctccctgtagtcccgtgatttcggagctcattgcccagatcttagacatgcgcctggtacggttggcgaagaagtatggggtgacttatacccggtacgccgacgacatcactttcagcacctctcagaaagattttccgacaggcctggggtccgtcgatcccaacgacccagccgtatggcatctttcagaggaactggtggggaaaattgtgacttcagggttcgccattaatgatgccaagaccaggatgcatttcagaagcagccgacagacagtcacaggtctagtggtcaacgagaaagtgaatattcggtcagactactaccgtagggctagagccatgtgtgatacgcttttccagaccggacagtattacaaggttgttatccaacccgacgaagacgaagagcccaaaccagatgttacgagcaacttgtctcctctccagggtcctctcatccccttcgctcaaggccacaccatttcccgggaagaaacttgcggcatcgtctgttgcctactcatgctgttaaaagacgtggcagtgtggtgcagaacaatcgctactcagaaaataaggttcggagctgtgtgccggccaatccctcgcgagtgtaatcctcggtccaccggaaagtgtgatgcattttgcaccgcgacgaatacagggttggttaggtcctga

SEQ ID NO: 8026 - RNA, 969 nt, synthetic construct
  source 1..969: mol_type = other RNA
atgtcttatcttcacaagctgaaaagcgccacctcccgcaaaggtttggccgagatcctgggatatcgccctaaggccctgactagtatagtctatatgaccccactggaccagaagtataccatcttcgaaatcgataagaactcgggtggtaaaagaacaattaaggcaccagtgcccaagctgaagaagctccagagtcacctgtcccatgtcctcaatggctgcctggctgagatcgaaagagaacgttctgctaagcccattagtttcgggtttcggaagggcaggtctattgctgagaacgctagaaggcacaagcggaagcattgggtgctgaacctggatctggaggattttttcccgtcctttaatttcggaagggttagggggttctttctcaaagataaagcattcggcctgcatcctgaggtcgccactacaatagcgcagattgcgtgtgatggggctgctctaccgcaaggctctccttgttcacccgtaatcagcgaactaatcgcacagattctggatatgcaccttgttcgcttggcaaaaaagtactcagtgacctacactaggtacgccgacgacataactttcagcacttcacagcgtgaattcccaacaggattagcaaccgttgatactaacgaccctcctgtgtggcacctctccgacgagctcgtcgacaaaattgtgacaagcggctttacggtgaacgccgccaaaacacggatgcattttcaggacagccggcaaatggtgaccggactcgtggtcaatgagaaagtgaatatccgctccgattactatagacgagcccgagccatgtgcgacgtactttttcagacgggccagtactacaaggttatgacccaacccgacgacgataacgaggggcccaaaccagaccttacctcaaatttgaatccattgcaggcgagcttagccatcttcacacaatga

SEQ ID NO: 8027 - RNA, 1740 nt, synthetic construct
  source 1..1740: mol_type = other RNA
atgaacgtaacccatctgaagaagttgcgggccgcatcaagccgcaaagagcttgcggttatcctcggatacaaacccaaaactctcacagctatcatttatcagacccctccagcgctgaagtacactactttcgagattgacaagaagtccggtggcaaacgcacaatcaaagccccggaaccccgtcttaaaaaactccagacccacctgagtcatgcattatatcagtgtctggccgagatcgagaaggatagaggcgctaagcccataagcttcggattcagaaaggaccgttcaatcgcagaaaatgcttcacggcataagagacggcgatgggttctgaacattgacctggaggatttctttccctctttcaacttcggcagagtcaggggcttctttctgaaggacaaggcctttgcgctgaaccccgaagtggcgacgactattgcccagatcgcctgcgatgggacagcattgccacagggctctcccagctctccagtgattagtgagctaatcgcacaaattctagacatgaggctcgtccggttcgcaaagaagtacggcgtcacttatacccgatatgccgatgatataaccttttcaaccagccagaagaattttcctaatggcctcgccacagtcgatcctaatgaccctaccgtgtggcatttgtctgaagagttggttggcaagatagtgtcctctgggtttaccataaataacgccaagacacgtatgcattttcggggatccagacagatggtgacggggctggtggttaacgagaaagtgaatatccgaagtgattactaccgcagagctagggctatgtgcgatatgttgtttcagacagggcaatactataaagtggtaatccagccagatgaggaggacgaagaaccaaagccagatctcacatcaaatctgaaccctctccaaggaatccttggccacatttactccgtgactcagaccgaggagcgcagagaaataagtgagcaaaggcagaagcctagggccatcaggaaactgttcagacggttcttattctacaagtactgtatggcacttaaggaacccttgattatcaccgagggcaaaaccgacccagtgtatctgagggaagccgtgaaaagccgcactaagtttcaccctgctctaggtgctcctggaaaggacggattcgagcacgctgttcgctatttcaactatggtggcctcgcccacgaggtcatggatctgggagggggtacaggagacttaaaaagtatccctctggactacctgcggaatttaaagccatccaaagggtcgcacaagccgttcgcccataagcccatgatgcacccggtaattattgtgctcgacaatgatgaaggcctggccgctgtgggtagcaccgtaaagaagaactttggagttgccatcgatattaaaagcacggacgactattacaacgtgacagagaatctgtacatcgtcaaaactcccgagaacgggacaaagaacacttgcatcgaagacatgtttccaaagaagtggagggaccataagattaaagggaaaaagcttaacacggccagcaaaatagaccctaccaaagatctttccaaagaagctttcgctaaatccgtcgtgaaggccaatgcggacaaaattgatttttctgggtttgaccccctgctggaacgaatcgataaagcaatccagcaccacgcagcaaaaccgtga

SEQ ID NO: 8028 - RNA, 1734 nt, synthetic construct
  source 1..1734: mol_type = other RNA
atgtcacatctcaagaagctgaaggctgccaccagccgaaaagaactggctgccgtgttggggtacgctccagcctccatgaccgcgattgtctataaaatgcccaaggatagaaagtacactaccttcgagattgataaaaaatctggcggaaaacggaccatcaaggccccggtggctaaactaaaaaagctgcagagccacttgagtcacgtgttgtaccagtgcctttccgagatcgagaaggatcggggtgcgaaaccaatctcattcggcttccggagggatcgtagtatcgctgaaaacgcgtctcggcacaagcgccggagatgggtgcttaatctggacctggaggacttcttcccgtcgtttaattttgggcgcgtccgtggctttttcctgaaagataaggcttttcacttacatccagaggtagcaacaaccattgcccagattgcatgcgatggtaccgcacttccccaagggagcccctgctctccagtgatatcagagctcatcgctcagatactggacatgcgactggttagattggctaagaagtacagcgtgacgtatactaggtacgccgacgatatcacattcagcacaagccaaaaagagtttcctaaggggctggcccatgttgatgccaatgatccttccatctggcacctgtctgacgaactggtgggcgagatcactggctctggctttgtgatcaataacacaaagattcgcatgcacttcagggggagccggcaaatggtgacaggcctagttgttaacgagaaggtgaacattaggagcgactattatagacgcgccagagcgatgtgtgactccttgtttcagacgggaaaatattttactgtcactcagcccccagcaggggaaggagaggaacccgtgccagaacttatcgattcattgagtcccttagagggcatactcggccatatatacaccgtcacacaatccgaggaaagacggtcagtccaggagcagagacagcagcccagagccatcaggaagctttatcgcaggtttctcttctataagtatttcatggcacttaaagcaccactgatcgtaacagagggaaagaccgaccctatttacctgcgggaagctattcagtctcgcgccgacagtcaccccgtgttaggagtactcggagaggacgggtttaatcatgcagtccgatactttaactacgaagggctcgcccatgaaattatggacttaggtggaggtacgggtgatctgaagtctatccctctggactacctgcgtaatctgcgaccttccaaagaggctcacaaaccgctgctccataagccaatggaacaccctgtaattatagtcctcgacaatgatgaggggctggccagtgttgcctccaccgtgaagaagaacttcggcgtcagtataaacttgaagtcaacttcggacttctacaacgtcactgacaatctctatattgtgaagacccctgaaaacggcagcaacggaacatgtatcgaagatctgttccccaaagagtggcgcaattataaggtgaatggcaaaaagctcaacaccgcatcaaaaattgatcccctgaaggacctatccaaggaggccttcgcaaaatccgttgtgaggcctaacgccgactctatcgactttagcaaattcgattccctacttggaaggatcagtaaagcaattgaacactacgccgctaaaccttga

SEQ ID NO: 8029 - RNA, 1719 nt, synthetic construct
  source 1..1719: mol_type = other RNA
atgtctaggaaggatctggctggcatcctgggatacaatccttcctccttgaccgctattatttataaaacacctaacgcctccaagtatactactttcgagatcgacaagaagagcggcgggaaacggacaattaaggcgccatcaccaaaacttaagaaattacaatcccacctctctcatgtcctctatcagtgcattagcgagatcgaaaaaaatcgggaatgcaagttgaaaccgatatcattcggtttccgtaaggaccgaagcatctttgaaaacgcagccaggcacaaacgacgccgctgggtgctcaatatcgacccagagaacttctttccttctttcaactttggccgcgttcgtgggttttttctgaaggaccgggccttcgcgttgaaccctgaagtagcgacaacaatcgcccagatcgcctgtgatggtgcagcccttcctcagggaagtccatgctctccagtgatttctgagcttattgctcagatcctcgatatgagactggtcaggcttgccaagaagttcggagtcacttacacgcgttacgcggatgacatcacctttagtaccagtcagaaggagtttcctaccgggttggctcgccctgacggcactaatcccacaatttggcatttatctgacgacctggtgggaaaaatcaccaattccgggttcaccatcaactctaataagactagaatgcactttcgcggctcgcggcagatggttactggattggtcgtgaacgagaaagtgaacatacgtagcgactattacagaagagcccgggccatgtgtcaccacctgttccgcaacggccagtatttcaagtccatgctccctcaggagaaagacggtgaagagccgaagcccgagcttaccggaaatctgaatccactagaaggcatcctaagttacgtgtatgcagttacacagagggaagagaggaggaacgaccaggaccaacggcaaaaaccccgagctataagaaagttatatcgccggttcctgttctacaaatatttcatagccctcaaggcccccctgatcgttaccgagggtaaaaccgatccaattcatttaagggaagccgtgaagtccagaaccaaattccatcccgcactcgggaagccgggtaaggacaggtttgatcacgctgtacgatactttaaccacgggggtctggcttcagagatcttggatctggcaggagggggcacgagcaatctccggtcgattcccattgattacaaacggaatctacacgctaataaaaaggaacaaaaggcaatagcccgctgtcccatgagattccctgtcattctggtgctggacaacgatgatggcctgaagacaatcagctctactatcaaagagatgtttaaggtggaatttgtagtgagttccgacgccgatttttaccatgtaacagataatctgtacgtcgtgaagacgccagagaacgggaataaaaacaccagcattgaggacctcttccccgataagtggcgaaacatggaactgagaggcaaaaaattcagctcagcaaataagattgacagtagcaaagagtacggcaaggaggtgtttgctaaatcagtcgttaagcccaacgcctgccagatagatttttcagctttcgatccccttctggaaagactgtgtaaggtgatcgaacatcactccggagcaagggcaagctga

SEQ ID NO: 8030 - RNA, 1707 nt, synthetic construct
  source 1..1707: mol_type = other RNA
atggcagagatactcgggtaccctccatctagcctgactgctattatatacaaaaccccgacagcatctaaatatactacgttcacagtggacaagaagagtggagggcagagaataatcagtgcccccatacctaagcttaaaaagctgcagagccacctgagccatgtgctgtatgagtgcctcgacgagatagagaagggccgggccgcatcaccaatatcgttcgggtttagggcaggacgctccattgccgaaaacgctgcaaagcacaagaggcgcagatgggtgctgaacatagatcttgaggacttttttccaagtttcaactttggccgagttaggggtttctttcttaaggaccagagcttctccctgcaccccgaagtggctacaactatcgctcagattgcctgcgacggtgtggcattgccgcaaggctcgccatgttccccgattatctccgaactgatctcacagatcctcgactccagattgttacggctagccaaaaaatacggcgtcacttacactagatacgcggacgatatcactttttccaccagcaagaaagagttcccagcgggacttgctacgcaagatgcgacagaccctaccctatggaatctgtccgatgagctcagcggaaagattacctcctcagggttcgtcgtaaataatagcaagaccaggatgcaatttcggggaagtcgtcagatggtgacaggactggtagtgaacgacaaggttaacattaggagtgattactacagacgggcaagggccatgtgtgactctttattcgaaaccggaaaatacttttcctctatggtccctcccgccaaggttggcgacgatgccgtgccaaaccgcaccgacaatctgaaccctttggagggtatcttgtcacacatctatcacattactcaagccgaggaacgcagagatgtgcaggaacagcggcagacgccacgagccatccgcaagttgtaccgcaggttcctgttctataagtattttatcgccctcaaggagccccttattgttacagagggcaaaaccgaccctgtctatcttcgagaagccgtgcgtagactgccccagtttcatcccgcattagggacacctggggctaagggattcaaacatgtgccgcggtactttggttatggaggtctggtcagcgaattgctcgatctcggcggtggcggcacctcaaatctgaagtcaattcctctcgattatcggcgtaatctgaatccaacgaaaaaagagcccaaggcttttgggtttagacctatgagcttccccgtcatcctggttctggataacgacgacggcctctctcctatcgcagggaccatcaagaagaccttcaacatccaaattagtcagtctagcacagaggacttctaccacatcatcggcaacttttacgtagtgaaaacacccgaaattctagccactggcaatccacctcagtcaacatatattgaacagttcttcccccagaaatggcgagattaccccctgaatggcaaaaagttttccaccaaaaacgagattgatatcaaccgcgagtatagtaaagaggtgtttgctaagtctgtcattaaaccaaatgctgcggccatcgatttctctgggttcattcccctgttaaagaggatcgaaaaagtaatgaagcatcatgctgcccagacttga

SEQ ID NO: 8031 - RNA, 1749 nt, synthetic construct
  source 1..1749: mol_type = other RNA
atgagccacctgaagaagctgaaggccgccacttcacgaaaggagttagctcaattcctcggttacaaaccttccagcctgactgccgttgtgtataagattgccaacgacgacaagtacaagatcttcgagatcgacaaaaagaccggaggtaagcggataatcaaggcacccataccaaaactcaagaagctccagagccatctgtccaacatgttgtatcagtgcctggaggaaattgagaaagacagacagctgaaaccaattagttttggtttccgtaaagaccggtcaattgcagacaacgccagcaagcataagcgacggaggtgggtgctgaacctcgacctggctgacttttttcccacttttaatttcggaagagtgaggggatttttcttaaaggaccatgcatttgagctgcatccagaagtagcgaccaccatcgctcagatcgcttgtgacgggacagccctgccgcaagggagtccatgcagccctgtgatatctgagctgatctgtcagattctcgacatgaggatgctaaggctagcaaagaaatatggcgttacctacagtcgctatgcagatgatattaccttcagcacaaaccagaaagagttccccaccggcttggcatctcaggacacaggggacttcaccatttggcacctgtccgaggaactcgtcggaaagattgagaatgcgggctttactgttaatgatgagaagacgaggatgcacttccggggttctaggcagactgtgacaggccttgtggtgaatgaaaaagtgcaagtcccatccgattaccatcgccgagccagggctatgtgccacgcgttgttcgagactgggaaatattacagatctgaagtggaatcagaagacgaggataaagaaggcgagcttgaaccagaactgattgacaatcttaaccctttagaaggcatactgtcgttcatctatagtgtagctaaacacggcgaccaccgccctatcgaagagcaacgaaagcaccccacggccatcgcccgtctttaccgcagattcctgttttacaagtacttcgtggccccaaagaagcctctcatcctgaccgaggggaagacagatccggtctatctgcgtgaggcagttaagcggcgggacagctttcacccaggactaggtaagccggaaaaggacgggtttaagcatgctgtccgctacttcaactatggaggattggctcatgatattatggggctgggcggtggcggaacatcaaatttgaagagtgttcctctcgattatgcccgcaatctttaccccaaaagaggaaagcccagagctataaaacacaggcccatgaaattccccgtggtcgtagtgctcgataatgacgatggcttgggacccctggcatccacaatcaaggataccttcggcgtgcggattactcagaaatctacagatgatttctaccacgtaaccgataacctgtatgtcgtcaaaacccctgaagatgccgacaaaaaaactttcatcgaggggctctttcctgagaaatggcttaaaaaggagctgaacggcaagtcatttaacgcggaaaacaagatcgatcccgacaaggaatacagcaaagaggtttttgccaaatctgtgatcaaaccaaatgctaaggatatcgacttttccgggtttgatcctctattagagagaattcagaaagccatacttgattaccagacgaaattgggctcctga

SEQ ID NO: 8032 - RNA, 1716 nt, synthetic construct
  source 1..1716: mol_type = other RNA
atgtctcagttggaaaaactgaaggctgccaaagatcgaaaggagttagccactgtgctgggctacaaaccatccgcactcacagcaatcatttatcaccctccagcaaaggaccgctacacaaactttgaaatcgacaaaaagagcgggggaaagcgcaccataaaagctcctgatgcaaagctcaagaagctccaaagccatctctcccacttattgtatgcatgtctggatgagatcgaaaaggagcgagatgctaagccactgagctttggcttcagacgggatagatggattgccgacaacgccaccaggcataaacgccgaaagtgggtgctaaaccttgacttagccgactatttcccttcattcaacttcggacgggtcagagggttctttctcaaagacaatagcttcgctctacagccagaagtcgctactaccatagcgcagattgcttgcgacgggactgctctgccgcaagggagtccctgctcacccatcatcgccgaactcattggccaagttctggatatgaggcttgtgcggctggccaagaaatacggtgtgacatactctcgctacgcggacgacataactttctccaccagtcagaaagactttcccgctggactggcctcccaggacccaacagatgcgaccatttggcacctatcagacgagttactgggcaaaattactgctagtgggttcgctgtcaatcccgccaaaacaagagtgcagtttcgggggtctaggcaaaccgtgacgggcctggtggtaaacgagaaggtgaacatacctagcgagtactatcgcaacgcaagggcaatgtgcgatgccctctttagcagcggccagtacttcacctccatgaaagcctctgcacccgagccagaccttacgagcaaccttaatcccctggaaggcgtgctcggccacatttatgcagttacccagacagaggaccggcgggacgtacgagagcagagaatcaaaccaagagccatcaggtcgctttaccgccgcttcctattctacaagtattttgtcgcgctgcaggcacctctgatcgtcactgaaggtaaaacggatcctgtgtatcttagggaggccgtcaaggcacgtacagcgttccaccccgtgctcggagccaagacagctggacgttttgaacatgctgttaggtacttcaactacggtggacttgcccatgagattctggatctgtcaggcgggggttccggaaatctcagatccatcccgctggactatcgtcggaattttcagcctagtaaaaatgatccgcgggccatagcacacacacccttggcgcacccagttatcttggtactggataacgatgacgggttggcttcggttgcctccacgatctgggataatttcaaagtgaagatcgatgtgaagactaccgcccatttttatcacattatccagaacttgtacgtggtcaaaacccctgaggccggaggtaagtctgctattgagtctctctttcctgacgtgtggctgaatattgagctgaacggcaagaagtttaattgtagcaacaccatcaaccccgaaactgagtatagtaaagaagttttcgcaaattctgtcgtaaagcccaatgccggtaatatagacttctcaggctttgatttgctgctggagagaattgtggccgctatcgaacatcacagggccaagtga

SEQ ID NO: 8033 - RNA, 1278 nt, synthetic construct
  source 1..1278: mol_type = other RNA
atgagccagttagaaaagttaaaagccacaacgtatcgaaaagaactcgctgcccttctgggctttaaaccccaggcactcaccagtatcgtgtacaaaacgcccctgagtgaacgatataccacttttgagatcgataagaagacaggaggcaagaggacgatcaaggcgccgtcaccaaagctcaagaagctgcaaacccatttaagccacctgctataccaatgcttggacgaaattgagaagcaacgcggagaacagccccttgctttcggctttcgcaggaagctttggatcgcagataacgcagctcggcacaaagggaggcggtgggtgctgaatttggacctcaaggacttctttccttcctttaatttcggccgcgtgcgtggattctttctcaaggataaatccttcgagctgaagcctgaagtggcaaccaccattgcccagatagcctgcgatggggtagctctgccacagggttctccctgcagccctgtgatatctgaaatgattactcggattcttgacatgcgtatggtcggcctggccaaaaaatacaaagtgacctactctagatacgccgatgacattaccttttccacaaaccataaaaacttcccggtggggatcgccgttccagatggggaggacgcgactaattggaacctctctaacgagctgctgggaaaaattacatcctgtggcttcgaggtcaactcagaaaagactcggatgcagttcgatggatccagacagatcgtcaccggcctgatcgtgaacgagaaagtgaatgtcgcaagtgaatattatcggcgcgccagggctatgtgtgattcactattctcaacaggcagctattttcgcagtatgaaggagcctaaggaagataatgacgagccaactccagacctgatcaatgggctaaatcctttgaacgggatattgggtcatatctacgctgttacagagactgaggagagaagagcgatctccgagcagcgcattaaacccagggcaattaggaagctttacaggcggtttctgttctacaagtacttcgtggcccttgaggtaccactcatcgttacagagggtaagaccgaccccgtctatctgagatcggctgtccgaagaagacccgactttcaccctgtgctggggaaaatgaagggagattctttcatacacgccgtgagctactttaactatggcggactggcccacgaagtactggacctcggtggcgggggagttggtaatttgaaaagctga

SEQ ID NO: 8034 - RNA, 1722 nt, synthetic construct
  source 1..1722: mol_type = other RNA
atgagctacctgagcaagctgaaggccgctcagtctaggaaggagcttgccgagattctcggttactcagcgcagtcattaaccgctatcgtctatcagacacctgataccagcaaatataccaccttcgagattcccaagcggtcaggcggcacacggactattaaagcccccattcccaagctgaaaaaactacagactcatttatcccacgcactgtatcaatcccttgatgaaatagagaacgggagagaggcacgacctctcagttttggcttccgcaaaggtcgctcgatttccgagaacgctagctgtcataaacggagacgttgggtgcttaacctggatctcgaagacttttttccctcattcaatttcggcagggttcgtggcttcttcttaaaagactcttcttttggcttgcacccagaggttgcaacaactatcgcccagattgcatgtgacggggtgagtcttccgcaaggtagtccctgcagtcctatcatatctgagctaatcggacacgtacttgacatgaggttagttcgcctggccaagaaatacaaggtcacctactctcgatacgccgacgacattactttctctacaagccagaaggacttccctgccggaatcgcactcccggatcctgcgaatagcgcaaattggatgctgtccgaagagttgctgtcaaaaatctctaattccgggttttccgtcaatcagtccaagactagaatgcattttcggggaagcaggcaaagtgtgacaggcctggtagttaatgaaaaagtgaatatccggtcggaatactatcggaacgctcgatccatgtgcttctccctgttcgccaacggcgtgtattataaaaagaacgcagccactggagaaagagagcctaccgacaaccccaatcccctggaggggatgctgagtcatatatactacgtcacccagtctagcgagaaaagagagattcaggagcaacgcattaatcccagagcctcgaggaaactgtaccggaggttcctgttttataaatacttcttgaggctcgacagaccgctcatcgtgaccgaaggaaaaacagatccaatatatctgaaggaagcgatcgagcggctagatgccttccacccagccttgggtcagaaacgcaacggccagttccaccacacggctcgctattttaattacaaggggaccgctcacgaaatcctcgacctcggtggaggaggaacagcaaatctcaagtccattccaatcgattatcgaaggaacctgatgccctacaagaaagaacctcgcgctataagccatcgaccaatgctgcaccctgtgattttgctcgtggataatgatgacggcctgggggctctggcttctactgtgaaggaaatgttcgggacaaacatcagtttgaagactacaaactcatactaccatattgtggagaatctctttcttgttaagaccccagagaacaacgaaaagaagacgtgcatcgaggatatgtttccactgagcgtattgaagagagagcttaatgggaagaagtttaaccctagcaaccagatcgatatcaccaaagaatactccaaggacatcttcgcgaaccatgtggtcaaagccgaagccgatacgattgactttagcggttttacgccactgctagaccgtatcaagaaggtcatagaggactataagatctcacacggctga

SEQ ID NO: 8035 - RNA, 1734 nt, synthetic construct
  source 1..1734: mol_type = other RNA
atgtcctatctggaaaagttgaaaaacgcaaagaaccgtaaagacctcgctcgccttctgggctttaagcccagcgccctgaccgcgattatttatatgatccccgtggaggaaaaatatactacctttgagatacccaagaaaagcggcggaacccggacaatcaaagcacccgcacctaaattgaaaaaactgcaaactcacctcgctcactggctgtacgagtgcttagccgaaatagaggaagggcgagactccacaccagtcgcctatgggtttaggaggaagggtactatcgccgccaatgcccacaaccataagcgcagacggtatgtcctcaacctggacctagaggacttcttcccaagcttcaacttcggtagggttcaggggttctttctgaaagacaaggccttcgagttaaacaaggaggtggctacaactattgcacagattgcttgtgatggcacagcattgccacagggctcgccatgtagtccagtaatctctgagttgattggacagatcttggatcttaggctgttaagattttcgaagaaacacggagtgcgttacagcagatacgctgacgacatcactttctccacaaaccagaaaaattttccagtggccctggctattcaggactctctcgatctctctaagtggacgctgggcgaagctttgatcaatgagatcgagcaagcaggttttaagatcaacgccaacaaaacccgaatgcattgccgaggctccagacaaatggtaacggggctcgttgtgaatgagaaggttaatatccgatcagattactaccgcaaggcaagggcaatgtgtgacagtcttttccagacgggaaaatactttaaaacactgaaggtgtctgacgatcccaaagaggagccccagcctgatttcaccagcaaccttaatccgctagagggtatcctgagccatatttatgacattacccagaaggaagatcggaggggtgtgtcagagcagagaaaggagccgcgggctattcgggctctctaccggagattcctcttttataagtattgcgtggcacctaaggccccacttatcgtgaccgagggcaaaactgacccagtgtacctacgcgaagcgatcaagtaccgtgactccttccatcctcgcctggggaagcccggcaagaatggctttgaattcgcggtcaagttcttcaattatggaggtcaggcccacgaagtaatggatctgggggggggaggatctggaaatctaaagtctatccctctggattatctcaggaacttagatgctacaaaaaaggggcggaaagctttcaagagcaagcctatggcctaccccgttattctcgtcctggataatgatgacggcctgagagacatagccggaactctgaagaccaacttcagcattagtataaaaaccaataccagctccgatttttaccacataaccgagaacctgtatcttattaagacacctgaaacttcaggccaatcatgcatagaagacatgtttcccgagaaatggaaagaaaagcctctgaagggcaaaaagtttaacccaaactccaaaatcgatcctcagaaggagtacggcaaagaagtttttgcgaattccgtcgtcaagccgaatgccaatgaaattgattttagtgggttcgaccccttgctttctcgcatcgtgagtgtgctggatgactacaaagccgcctcatga

SEQ ID NO: 8036 - RNA, 1728 nt, synthetic construct
  source 1..1728: mol_type = other RNA
atgagctatctgaagaagctgaagagcgctaaaaatcgcaaagccctggcctcaatacttggcttcacccccagcgcgcttacctcaatcgtgtatcaaaccccgctcgaaaagaagtatacgaccttcaagatcccgaaaaagtccggaggtgacaggatcattaaggctcctaaccctaagttgaagaagcttcaaacacacctcgcgcattgtctgtactcatgcttgtcggagatagaggaaggtcgcaatgccactccagtagcatacggatttagaaaagggggtaccatagccgccaatgcaaagaatcataaacggaggcgctacgtgctgaatctagacctggaggacttctttccgtccttcaatttcggccgggtcaggggcttccttctgaaagacaaagctttcaagctggaagaagaagtcgcaactacaattgctcaaattgcctgcgatggcgaagctttaccacaagggtccccatgttctcccgtgatttctgagctgatcgggcaggtcttagatctcagactcctacgatttgccaagaaacatggcgtgcgttactcccgatacgctgatgatctcacatttagtacgaaccagaaagatttccccccagatttcgctcagcaggacgcctctgatctttctaagtggaccctcggaaatgagttagtgcagaagatagagggagccggctttaaaatcaatgcagggaaaacccgcatgcagtgcaggggaagcagacagatggtgacgggtctggtcgttaacgagaaggctaacattaagtcagagtactatagaaatgccagagccatgtgcgatagcctgttccagactgggcagtactttaagactgtcatcagccccgacatccctaacgacaaacctatgcccgatcttactgacaacattaataggttggaagggattctcagtcacatctacgatgttacacaatctgaggaacggcggcctatcgcggatcagcgtaaggaaccccgagcaatcagactgctgtatcggcggttcatgttctacaaatactgcgtcgcaccaaaggttccccttatcatcaccgagggtaagacagacccagtctacttgagggaagccattagacaccgtaacagctatcatcctaggttgggcaacccgggcaaggacggctttgagttcgccgtacgcttttttaactacgtggggcaggcgcacgaaattatggacctggggggaggcaccggtgacctgaaatcgctgcccttggactatctgcgcaatctggacccaaatcggaaaggaaggaaacctttcaaacacaagcccatggcttgtccagtaatcttagtgctggataacgacgatggcctatccggagtggctggcacaatcaagaaaaacttcgatgtgacagttagtattaagactaccgatgacttttatcacattactgagaacctctacttgatcaaaacacctgaggccaagaagaagtcctgtattgaggatctgttcccccagcagctgaaggggactctcctcaacggcaaaaagttttccgcaaaggcaaaaattgacccacagaccgagtattctaaagagatctttgcaaatagcgtgatcaaacctaacgcctcaaaaatagactttagtggatttgaccctctgctcgaccgaatagtgtccgttctagatcattatagtccccagtga

SEQ ID NO: 8037 - RNA, 1737 nt, synthetic construct
  source 1..1737: mol_type = other RNA
atgaattatcgcgacaagcttaaagccgcaaaggacaggaaagacctggcacggctgctggggtacaagccatcagctcttacctcaatcatatatgtgactcctcctgagaggaagtacacaacatttgaaatcgccaaaaagtcaggggggatccggaccattaaggcacctaatccccagctgaaaaagcttcagtcccacctggctcattatctctatggctgcttagctgagatcgaggaagaaagacaggcacgtccggtgtcttacggcttccgcaaaactcgaactattgccagcaacgccaagaatcacaaacgccgtcgctacgtgctcaacattgacattgaggattttttcccatcctttaactttgggagagtgagaggattcttcctcaaagacaaagcttttgcccttaaagaacaagtggccaccactatcgctcagattgcctgtgatggggaagccttgccacaaggttctccctgtagccccgtgatttccgagctgataggccagatcctggatctacgacttctcaggatcgccaaaaagcatggcgttagatattctaggtatgctgacgacatcacatttagtacatcccagagggacttccctgaagccctcgccgtgcaagattcagagtctttatttggctgggcacccggcgcagaacttgtccacgagattcgaagggcgggcttcaaaattaaccccagcaaaacacggatgcattgtagaggtagtcgccaaatggtgaccggactggtagttaatgaaaaagtaaacattcggtccgagtactatcggaaggcgcgtgccatgtgcgattctttgttccagtcaggaacttactttcgcagctttaccccgccagtctccccgggagttgatccacagccagacctcacggtgaatttgaatccgttggaaggtatcctgtctcatatatacgccgtgacacagagcgaggacaggaggggcatcaaagaccagaggctcaagcctcgggcgatccgcacgctgtacagaaggttcttattctacaagtactgcatagcacttgatgctcctctcattattacagagggcaaaactgaccctatctatctgcgggaagcgattcggttcagagaaatctttcatcctcagttgggcgagcccggagagtcgggttttaaattcgccatccgtttcttcaattacacgggtcaggctcacgagatcatagatctgggaggggggaccggagacttaaaatcaattcccctggactacctgcggaatttcgatgctcgaaaacgaaagccatttcagcacgtcccaatggcctacccagtcatcctcgtgctggataatgataacggtttggagagtatcggaagtaccgtcagaaagaatttcggcattagcattacagttgacagtaccgacgatttctatcacataaccaagaacctgtatctcatcaagacccccgaaactaaggagcagtcgtgcatcgaggatctgttccctgcagagtggaagaacaagagactgaacgaaaagaagttcaacccctccgggagcattgatactcagaccgaatacggaaaaaagatgtttgcaaagtacgtcgtgcgccccaactcccacaagatcgactttagcggctttgatcctctactggagagaatagtagccgttctagaccactatagcgctgaggggaagcaatctctgtga

SEQ ID NO: 8038 - RNA, 1743 nt, synthetic construct
  source 1..1743: mol_type = other RNA
atgagccagttagaaaacctgcgaagtgcaaagaacagaaaagagctagcatctttactcggctttcagccatccgcccttacatcaataatctataaaactcccctggccgacaggtactcaaccttcgaaataccaaaaaagtccggggggactagaaccatcaaggcccctaatgataagctgaaaaagctccagaggcacttggcacacctgctatacaattgcctcgcggaaatcgaagacgagctgtccatcgcctccgtcagctacggattcaggcagaatggctcaataattgccaatgccaagaaccataagagaaggcgctacgtgctgaacatcgatatagagaactttttcccttcgtttcatttcggtcgcgtccgaggtttcttcctgaaaaacaaattctttgctcttgaggacgaggtggcaactacgatcgcccagatagcctgcgacggcgaagcattgccacaaggatcaccatgttcccccgtgatctccgagcttattgcaaatattctcgacttgcggctgctgcgtctggcgaaagagcacggggttagatacagtagatatgctgacgatcttaccttttctactaactccaagaagttccccgacgcgatcgccagcgaaggtgctttaggcaactggactctgggaaatgaacttgtcgaggagattgatgacgcgtggtttacaatcaaccacgcgaagacgcggatgcattgccgtgggaaccgccagcttgtcaccggcttagtggtgaatgagaaggccaatatcaaatctgagtattaccggaatgctcgagctatgtgtgattcactgttcacccaaggccggtattataaaagcaagacctctcccgaggacgctgatgccgtacctcagcccatctggacaagtaacctgaatcctctcgaggggatcctgagccatatttacgatgtgacccagagtgaggaacgcaggccagtccctgaacaacggaatgccccacgcgccatcagagctctttaccggagattcctcttctataaaaaatgtgtggctctgacggcacccttgatcattactgaaggcaagacagatcccatctatttgagagaggctattcgccacaggaacgtcttccagccggtgctgggcagtatgggcgatgaggcatttgagttcgccgtgaacttttttaactacgaaggatcctcacatgaactcatggacttggggggaggtagcggtgacttgaggtctattccactggactaccgccggaatctggctcccgccaaagaaaagaaacgtaaacctatgatccacacccccatgtcttatccagtaatactggtgctcgataatgatgacggactcagtgcagtcaccggaacaattaagaagaactttggggttcagattgataagacaacaaccgacgatttctaccaggtgatccaaaacctctatgtggttaaggttcctgaaaccacaagcgacgcacagattgagagcctattccctgactcagtacaatctattaagctgaatggcaaggcttttagcactaaagacaagatcgatcccgagaaagagtatagcaaggcaattttcgctaaatctgtagttaggcctaatgccgataagatcgatttttccgggtttgatccgctgctacaccgaatagtggccgctattgaccactacgacgccaacggaccgaaagccttttcgtga

SEQ ID NO: 8039 - RNA, 1719 nt, synthetic construct
  source 1..1719: mol_type = other RNA
atgtcatacctgaagaagctaaaagcagctaaagaccggaaagagctggccaaactgcttggctatgagccatctagtctgacagctattatttacatgacacctttgcctgccaagtacagcacatttgacatcccaaaaaagaatggcggggtcagaaccatcaaggctcccgaaccaaaacttaagaaactacaaacacacctcgctcacctcctccaggcctgcctggtcgagattgaggccgataagttgtcgaggcccgtgtccttcggtttccgcaagaagggtcggatcacagacaacgcgaaggttcacaaaggcagacgatatgtgctgaatatcgatttagccgacttcttccctagctttcattttgggcgcgtgcggggcttttttctcaaggacaaaaacttcgagttaagcgatcaggtagcaaccactattgcgcagatagcctgcgatggagctgccctccctcagggatcaccatgttcaccagtgatttcggaactgattggacatgtgctggacgtgcgactgttgcgcctgagtaagaaacatcacgttacatactctaggtacgcagacgatatcacattcagcaccaataacaaagccttccccacggcactagccagccaagacccagcggatcccgccaagtgggtgttgggagacgaacttatcaataaggttcaaaattccggtttccagatcaaccccgctaaaaccaggatgagttgtagagggtccagacagatggtgactggcctggtgataaattccaaggtcaacatcaagagtgagtattacagaaacgcacgcgcaatgtgtgattcactgtttcagaaggggtggtacttccgtgacagtacgccacctgtagaggacggagatccccccactcctaattatatcattagcctcagcccactggaagggattctgtcttttgcctacaatatcacacagtctgaagaccgcagagagatcgcggaacagcgaaagaagccccgtgcaattagagagttataccgtaggttcctcttttataagtactgcgtcgcaccatctcagccccttctcatcaccgaaggcaagaccgatcctatatacctgcgggaggctattatcaggaggacggcttatcatcctactctgggcacttttgggcccaccgggttcaagtttgccattcgatttttcaattacgagggacaggtgcatgagatcatggaccttgggggcgggactggcgatttaaaatccgttccgatggactatctgcgcaacttcaagccctatcggaaacggaaaccctttaagcacaaaccaatgcagcaccccgttataatcgtgcttgacaacgataaaggcctccaaggagtcgcctccttcctcaaggaaaatttcgataccattatttctctgaccaccaaaaataacttctatcacatcatcgagaacttgtacgtcattaagaccccggaatcatcccctatgacttgcatcgagagcatgttcccgaaaatatggctgaagcatagcctgaacggcaaaacttttaacccggataaaccagacatcaccaaggaatttggcaaagaaatattcgccaagtccgtggtcaagcctaatgctggttccatagatttttctggtttcgatcctttcttggacaggattatcgctgtatttaaccacttttatggatga

SEQ ID NO: 8040 - RNA, 1734 nt, synthetic construct
  source 1..1734: mol_type = other RNA
atgtcctatctagcaaagctgaaggccactaaagataggaaagatttggctcgcctgctgggatttactccctccgccatgaccagtattgtgtaccagacgatgcccgccgcaaagtataccgagttcgaaattccgaagaagtcagggggaaagagagttataaaggcgcccttccctaaactgaaaaagctgcagacccacctcgctcatgtgctctatggctgtttagcagaaatcgagcagaattttgatgcgaaaagcgtgagctacggctttcgaaagggacgtggaattgagggtaacgccaaaatccacaaaagaaagcggtttgtattgaacttggacctcgccgacttctttccaacttttaattttggccgggtcagaggatttttcctgaaggacaccagctttgccctcactaatgaagtcgccaccaccatcgcccagatcgcatgtgacggcgtggcgcttccacagggctcaccatgctctccagttatcagtgagctgatttgccacatactagatgtgaggctgcttcgtttggccaggacgtatggcctccgctacagtcggtacgccgatgacattaccttcagcactaatcgccgggagttcccagcggacattgctagggtcaaccagaccgacccttctacttgggtcattgggaaggagttggcaagtcggatcgatgactgtggctttgcaattaactttaccaaaactcgaatgcactgcagaggctcaagacagatggtaacaggtttgattgtgaacgaaaaggtaaacatccggtccgaatattatcgaaacgcccgagccatgtgcgactctgtgttcaggcagggtgcctatttccatagccaccaaacacccactgtggctgggggaacccccataccagaaatgacagataatctcgcccctctggaaggcatactcaatcacatttactctgtgacacagaccgaggagagacgctccgtgcaagaccaacgatccgcaccccgcgctattcgctccctgtaccggaggttcctgttctacaaaaggttcattgctctcgaggctcctcttattgtgacagaggggaaaacggatcccgtatacctaagagaggccatcaggcatctgccttcctggcagcctagattaggggagcctacagtcaatgggttcaagttttccctgtctttcttcaactacggagggaagagtcacgagatcatggacctgggtggtggaactggcgatctgaaatctataccccttgattatttacgcaatctcgattcgtctaagagcgaccggaaaccaatgcaacataagccaatgaaatttcctgtgatcatggttctggacaacgatgatggccttggggacgtggcaggtacaatcaagaaaaacttcaatgtggggatgtcggtcacctcaacacaggacttttaccacgtgtgtgaaaacctgtacgtcgttaagacacctgaagcaggcggaaaatcctctatggaaagtatgttcccaaagtcatggaccaccatcgttcttaacggaaagaagttcaatccgagcaacaagatagacatcacgaaggaatacgggaaagaggtcttcgctacatcagtcgttaaagctaatgctgctaagatcgactttagcggctttaatcccctgttagatcgtatcgtgaaagtgatcgatcattatgcccccccggcgagctga

SEQ ID NO: 8041 - RNA, 2025 nt, synthetic construct
  source 1..2025: mol_type = other RNA
atgtccattctccataccttgcggacagccaagacccgttatgacgtggccgcactactcggctataagccctctgccttgagctatatcgtttttcagatcccgacggccgaaaagtacaaaacgttcgagattaagaagaaaggcggcggaaaacgacggattgacgctcctatcccaatgctgaagggattgcagaggaggctcgctgacgtcctgtacgagtgcctccgcgaattagaggaaccagagaagaggaaaaataagctgtctcacgctttccggaaagactatagtatcatcacaaacgccaaggcacacaaatcacggcggtacgtcttgaaccttgacctgcaaaactttttcccatctctgaacttcggtagagtccgcggtttcttcctgaagaacaaccagtttaagctggcagaacccgtagccaccattttagctcagatcgcctgtaatgatggggtgcttccccaaggaagtccttgttcaccaatactgtcggagctgcttactcattttctggatattagactggtcaagttagctgcaaagaatcagtgcagctacactcgatatgccgatgatatcacgttttccaccaatcagaaggaatttccagttgctcttgcagtagcagttggcgagggctggatcctgggagacgaagtaaagtcccggatcgagggggccgggtttaccattaatgacactaagactcgaatgcaagtgcgtggctcccgccagacagttactggtttgacagttaacgagaaggtgaacgtcccccaacgctactgtaaactcgcccgcgccatgacacattcgttccttgccaccggagcctataagagagacggcgtagatgattctagcgtgcctcgcctcgaaggggtgctggatcacatctaccatatcaaagagcgacagatagacattgcgatcgacgccgagaaaaataaagagaagcggcacaagctgcatgctgataggaccaaacacaaaaacgaatacccctcagctataaggctgatctacttccagcttgtgttcttcaaacacttcattgatccatctaaacccttgattatctgtgagggacctacagactctatctatcttaaatcagccattcgcaaactggcggctctccatccaaaactggcgagtaccaaggacggaaaactatccctagacattcacttcttcaaatactcaaagcagtctaaagacctgctgcagctgagaggaggtagcccggatttgaagtttttcctggaggcgtggcgcgacaagctcgcaaagtttaagcacaggcccatgaagcaccctgtcatcgtgctgattgataacgatgatggcgctacccagatctttaagcttgcccagtccaagaaattcggtgtgacaattggccacgctaccgacctgccgttttaccacctcggcggacatttatatctggtgaaaacccccataaaggggcctgataataagtcttgcccagaagactttagcacgaggccttgctggcagcctagaagcactgcccgtcctctgataccgacccggtctaccacacggcttgcgtcgagcgaacgtagttccctacagtccgtgtcatgcgggaggagaagggccgccagcacatcacaagccctcattcccttctctctggcactcactccctacagtatgataactcccaacgcaggcttaagggctcaacggccccgccaccgtagacgaagccaaaggtgccggcatcggcagcgcaggagtgctagacgacagccaccaccctggcctcgccctaatgtcgggtgtgcaagccagtcaatcgatctcgggagaaacagagcaggcggtggagctgcggggagagtgaatcctgtgcaggactccagcagagaagccagtatgttgtttccaaatctcaatacagcattgatggagagcaaaatgaaacgagcctccgcttttagtaaaaagactctatcctgggcaagactgtga

SEQ ID NO: 8042 - RNA, 1824 nt, synthetic construct
  source 1..1824: mol_type = other RNA
atgtccatactccaatccttaagggcggccaagacaagatacgatctggccgcactgctgggttattctccatccggcctgtcctttatagtgtatcagatccccaaggctgccaagtacaccacctttgacgtgaagaagaaagatggcggacagcgacgcatagacgctcctattccaatgcttaaggcgctgcagaaacgactggccgggatcctgtacgagtgtctacgagagcttgaagagtcagacaagcgccgaaataacttatcacatgcatttcgcaagaaccgttctattattacaaacgccatggcgcatcggagcagaagatatgtgctaaacctggacttgcagaactttttcccgtcactgaattttggtcgcgtgcgcggcttcttccttaataacaaccagtttaagcttgccgaacctgtcgctactactctcgctcagatcgcctgcaatgatggagtgctgcctcaggggtcaccatgttccccaattctcagtgagctgctcacacacttcctggacatgcggatggtgaagctggcaactaaaagcaggtgcagttatacccggtacgcggatgacatcacctttagcacgaatttgaaagcattccccgctagtctggctgtagctgtggggtccggctgggcattgggagatgaactgaagagcagaatagagagtgccggttttacaatcaacgaggcaaagacgcggatgcaggtccgtggctctcgacagacggtcactgggttaaccgttaatgagaaagttaacattccacagagctactataagctggccagagcgatgaccaatagccttctcacaaccggcacgtacaagcgggatggcgttaatgacagttctgtccagagattagagggggtactcaaccatatctaccatatcaaagaaaggcagatcgacctggccatcgatgccgaaaagaataaggaaaaaagacacgctctccacgccgaaaggacaacccaaaagaatgagtacccctctgccattaggctcatttacttccagctggtcttctttaaacatttcattgacctggcgaaaccactgatcttatgcgaggggcctacagactcagtgtatctgaagagcgccattcggaaacaggctgctcttcaccccaaactcatatcgaccaaagacggtaagactagccttaacgtacacttctttaagtattccaaacaatccaaggatctcctccagttgcgcggtggctctccggatctgaaatttttcctagaagcctggaaggaaacattggttaagtttaaacacagacctatgaagcatcccgttattgtccttatcgataacgatgatggggccacccaaatattcaagctgttgcagtcgaagaagttcggcgtcactatcggactggccactgacctccccttctaccacctaggcgagaacctgtacctagtgaaaaccccgattcggggccccgacaataaatcatgtccagaggacttcttcgatccagccgtgctgagtactaaaattgacggaaaaacctttaaccccaataaagaacacgacgccccaggagagttcggcaaagtggtgttcgctgagcgcatcgtacgtccccaagccgggacaatcgattttagcgggtttgatcctttgttggccaggatcgacgccgtgctcgacgattatgctaagaggacagctcctggacctgccgctgctccttctcctcccgcagcaggagcagcaccgaaaatgaagaagaggccacgggcagcaactgctgccgcacaaccctga

SEQ ID NO: 8043 - RNA, 1734 nt, synthetic construct
  source 1..1734: mol_type = other RNA
atgagcgccctacaggccttgcggagtgccagaaaccgttacgatgtcgccgcaatcctagggtacaagcccagtgctttaagctatattgtcttccaaattccaaccgcgaataagtacaccgtattcgaaatagacaaaaagggcggaggtcaacgcagaatcgacgcgcccatcgagaagctgaaaggactccaacggaggctggccgacaccctgtatgagtgtttaagggaactggagagcaccgacaaggtgaagaacaagctgtctcatgctttccgcgaagatttttctattattaccaacgctaaggcccacagagctagaaggttcgtgttgaacctggacctgtccgacttttttccctcgctgaactttggccgcgtgcgcggtttcttcatgcgtaatcgatccttccgcttggctgaacctgtcgctaccatcattgcccagatcgcatgtaataatggagttctgccacagggctcccctgcaagccccatcatttccgagttgatgacacacttcctggacattcgccttgtaaggcttgcagccagaaatcggtgctcatacactcgatacgcagacgatatcactttttccactaatctggaggagtttccggcagcgcttgcgacggctgagggtcaatcatggaaactgtctgacgaactgcggtctaggattagagatgccggctttgagattaatgatgcgaaaacgagaatgcaggtccggggctctcggcaaaccgttacaggcctgactgtgaatgagaaggttaacgtccagcagtactattacaagtcggcaagggcgatgactcacgcttttatcaccaccggaaagtatattcgtaacggcgacgaagagacgagtgtgcagagactcgaaggaatactcaaccatatctatcacatcaaggaacgcctgatcgacatcgggatagaggctcaggaaaacgatgaaaagcgccataaactccatgccgatcgcacaaaacagaagaatgagtatccttccgccatccggttgctctactatcagctggtgttcttcaaacactttgtggatcccagcaggcccctcatcgtgtgtgaggggccaacagacccagtctaccttaaatgcgcccttcggtcactggctacttcccatcctaaattggcaaccgccgtggatggcaaaattagcctcgccgtgaacttcttcaagtactcagatcagtcaagagatctgctgcagttacggggaggcgcccctgacctcaaatttttccttcagacatggaaagataagctcgcaaagtataagcacaggccaatgaaacacccggtgataattttaatcgacaatgacgacggcgccacagagatttttaaactcttgcagagtaggaagaaattcgggatcgatatttcccatgccaccgatctgccgttctatcacctagggaaccatctatacctgataaagacaccaatcaacggtcccaacaataagagctgcccagaagactttttcgagacatctgtaagggaaactccaatagatgggaaaagatttaaccctgataaggagcacgaggcacctggggagtatggaaaggtggtgtttgctgagcgagtcgttcgaccccaggccgctaatatcgactttagtcgattcgaccctatccttgcacgtatagaagctgttattgatgactacgccgcccggaaaagctga

SEQ ID NO: 8044 - RNA, 1806 nt, synthetic construct
  source 1..1806: mol_type = other RNA
atgagtagcctccacgctttacgtgcagcgactacccgcaatgacctggctgtccttctggggtacaaaccctccgccctgtcctttattgtatacttaacacctcctacggccaagtacaccaccttcgatatcgccaaaaagggcggaggcacacgcaggattgatgccccaacccccaggctcaagggccttcagaagaggctggcagatctgctgtatgaatgcctgcgtgagatagaggaaagtgaaccaaggaaaaacaagctgtctcatgcttaccggaaacaattttcaatcatcactaacgccaagagccataaatcacgacggtatgtcctgaatctcgatctcgagggattctttccgagccttaacttcgggcgggttcgcgggttctttctgaccaacaatcactttaagctcgcccgccctattgcgaccctaattgcacaaattgcctgtaacaatggtacactcccccagggctccccttgctcccctatcatttcagagctgcttacgcacttcttagacatgagattggtgagattggccggccgtaacaaatgttcttacacacggtacgctgacgatattacttttagcaccaaccagaaagagttcccagaggctctggctgtggctgtagcggagggatggagcctgggagacgaactaaggtcgcggatcgaagatgccgggttttcaatcaacgaatcaaagactagaatgcaggtccgcggatcttgtcagacagtcacgggcctcacagtcaatgagaaagtcaatgtgccacagcgctactacaaactggccagagctatgacccactctttgctgtccacaggttcttatctaagagacgggatctctgaaaccagtgtccaaaggttggagggaattctggactacatatataacatacgcgagcggcagatcgatatagccttgtccgccgagaaggacgctgctaaaaggaagaaactgctgagcgatcgggtagaacacactaacgagtacccttccgcaatccgaaaaatctattatcgactcgtgttcttcaagcacttcgtagaccccaccaaacccttgatcatctgcgagggtccaactgaccccgtgtacctgaaatcggcgatccgacgactggccagcgcacatcccaagttaaccagcgtgagagggagtgacatccttctgaatgtggcttttttcaagtactccaagcagtctcgggatctgctccaaatgcgggggggaagtggcgacttgaagtattttttggagggctggaaagaggaattagccagacataagcatcgcccaatgaagcacccgattattgttctgatcgataatgacgatggcgcgaagtcaatttttggaattctcaggggcaagttcggtcagtccatcgggctcgccactgatcttcctttttatcatctggatggcccactctaccttgttaagaccccgacgaggggtgcagaccacaagagttgccctgaggactttttcgaaagccatgtgctagcaaccaaggttgacggcaaaatctttaatccagacaaggagcacgacgcacccggggaatatggaaaggtgattttcgctgaaaaagtgatcagacccctggcaggtagcattgatttctctggcttcgagccgctcctggctagaatagaggccgtgatagaagattattccaaaagaactgccacacgtccacccccacctcttgcagccgttcgccctacagcatcacgggctaagagggccgtggtggccgcaaaaccctga

SEQ ID NO: 8045 - RNA, 1731 nt, synthetic construct
  source 1..1731: mol_type = other RNA
atggctgctttactctcctactcaccgtccgcggtgtcatatatcatccatatcactaggcctgccactcgatatatgacatttgatattcctaagcgcagcggtggggtgcgcacaattgacgcccccaatgaccgactgaaaggcttgcaacggagcctatcgaaactgttgtttaaatgccttcgggagatagaagctaaggatcctcgtagaaataaactgtcacacgcctttaggcctggagcctctattatctctaacgccaaaacccaccacagacggcggtacgttctgaatctcgatctcaaggacttcttcccggcttttaattttggcagagtacgcggcttttttctcaagaatgagcactttagattggcagagccggtcgctaccttgctcgcccagatcgcctgcaaggacggtaagctgccacagggctccccatgcagcccaattataaccgaactgatgacccactttttggatattagattggtgaagctagccgccaggcataaatgtacttatacgagatacgctgacgatatcacaatcagtactaaccaaagggagttcccgtcagccttagccgagctggatggcactcagtggaaactcggggaggaactggtcagccgcattcacgacgctggcttcgaagtgaatgatgcaaagacgaggatgcagttacgtggctctcgtcagatggtgaccggattaaccgttaacgagaaagttaatgtcgcccaagcttattacaaacgggtgcgcgccaccgctcatcggttcttgaccacaggcgcctatgaactagatggagccacatgtaactctgtgcctcggctggaaggtatgatcaaccacatataccatgtccgggagcgacagattgatatagcaatcgcgaacgaaggcaacaaggagaagcaacacaaactgcatgccgaacgcacgaagaccaagaacgagcgcccttctgctattagggtggtttattacgaactgatcttcttcaagaactttatcaatcccccccagccactcataatctgtgagggcccaacagatccagtgtacctcaaaagtgctatcagaagactggctgcagcacatcccctgctggccagtgtcgtaggggggaaacccgagcttaaagtcaattttttcaagtactccgaccaggcaagggatttcctgcagcttcggggaggtagtggggaccttctgtccttcctgattagctggaaagaggcgttcaatagatacaatttccgccccgcggaacaccccgtgatagtcctcattgacaatgacgatggagcgggggacatctttaactacctcaagaacaagaagaactatggactggacattgcccttgaaaagcatgaccctttttttcaccttcacggaagcttatacctggtgaagacacccgccctgggcgcaaaccataaaagctgccctgaagactttttcgaccctgccctacttgccgaaaagctcgacgggaagtccttcaataaagagaacaagatcaatccagcaactgagtatgggaaagcggtgttcgctaccagggtagtgcgtcccaaggccggtgccatcaacttcgctggattcactcccctgctggagcgaattgaggcagtaattagggattatgctgcacgaaaagcagctgccgccgcaccagttccagcagctgctgcacctacaccctga

SEQ ID NO: 8046 - RNA, 1707 nt, synthetic construct
  source 1..1707: mol_type = other RNA
atggcccatctgctgggctatcaacccagtgggctgagctacctgttatacaagctgccggtaggggctaaatacacgacattcacaatccctaagaagagtggtggagtacggcaaattgacgcacctgcaccccgaatcaagcgcttgcaaagggagctggcgaagattttgtataaatgtatcgccgaaatcgaagctcagcccggtagaaagaataccttgtctcacgcctttcgatatggacacagcatcctgacaaatgcgaaagcccataggaaaagacgctacgtgttaaacttagatctgcaggatttttttcctaccctaaacttcggtcgggtccgtggttacttcctgaaaaatagagacttcctcctgtccgaaaaggccggaacgctcattgctcagattgcatgccacgagcaaaccctaccccaggggtcgccatgcagtccagtgatctccgaactgctggcccacttcctggatatcagactggccacccttgccaagaaacatcggtgtacatataccaggtatgcggatgatttgaccttttcaacaaaccagaaagacttcccagctgcgcttgcagtggagacagaggctggctggatcctcggagatggcatagtccagaagatccagagcgcccacttcacaatccacccttccaagacccggatgcagctacgggctcgtaggcaaaccgtcacaggactggtggtgaatgaaaaaacgaacgtcagatcagattattacaaaactgctagggccatggttgacagcctgttccggactggaacttacgtgattgacggggctcccgaaactgccttggcccctattgaggggattcttaaccatatttaccacgttagggaatcggtgatcgatgcagccatcgaggccgagctcgatcccgaacgtaagaaaaagagaaagagcgaacgagcgaaggccaaacgggagactccaagcgctattagagttctgtatcaccgcctgttattctataaacacttcatagccccctctcagccggtgcttttaggcgagggtcctactgactccatctacatcaagaccgctatccgccgcttgccagcttatcacgccgcactgacagagcttaagcagggcaagcaggtccagaggctcgacttttttcgatactccaagcaggctaaagaaatcctgcagctcggaggggggacgggggatttcaaatatctcttgaccgcctacaagaagttcgccccacagtacaagcacgcccctatggctcatcctgtaatactcctcattgataacgactctggctccaatccagtgttctctgtgatggcatcactgtttcatgtaacagcctctataaagactgaccttccattttacaagcttgcatctaacctatatgtggtgaagagtccccctgtggagctcgatggctcctcatacattgagcagttctttgacccggcactcctgaccactaccatcgacggcaaaaccttcaatcccaataaggagcatgaggcagcaggcgagtacggcaaagtctggtttgctgagaaagttatacgccccaacgaagcgaatattgactttactaactttggcccaattttggcaaggatagctgcagtcctggaagaccatgccgctagcaaagcggcagttctcccgcaagccgcccagtga

SEQ ID NO: 8047 - RNA, 1788 nt, synthetic construct
  source 1..1788: mol_type = other RNA
atgtcgaaactatccttgttgaagtccgccagctccttatcagatgtggcagacctcttgggtttttccccctccgggctgagtttcgtgctctacaagcagtccgcgctcgcaaagtacaagaaattcgagattcacaagaaaacagggggaacacgcgatatttgcgctcccataggagccatgaaagccatccagagggagctggccactgtgctcaacgcctgtagagctgaaatcctcgaagcaactccccggaggcccctctcccatggtttcagagagtctttgagcatcatcacaaatgctcagaaccacaccgcccgacggcacgttctgaatgtggatctggcggacttctttccgacgtttaattttggacgcgtacggggctttttcctgaaggacaaagacttctttcttaacgaaaaggccgccactgtgctagctcagatagcatgttttgagaatacgcttccccagggctcaccatgtagtcctgtgattgccgacatgatcgcccacgtgctggatgtgcgattggtgggcttggcaaaaaagaaccgcgtgacctatagtaggtatgctgatgatttgactttcagcaccaatcagaaggactttccggaagaccttgcaaagcctggagccggccctgccgatccatggatcgtcggagatgaactcctgaaaaagatcgagggagctgccttcaaagtgaaccctactaagaccagaatgcaatttagagggagccgtcaggtggttactggactcacagtgaacacaaaggtgaatattagtcagcgctattggcgttctatccggagcatgtgtcacgcactattccaaaaaggggagtaccaccaccccgccccaaaagcaggaactcccccagggtcagctctggtcatgatcaatagcctggaaccactggctggcatgttgtctcatgcatatcacgttaaaagaaagtctctgcggtttccggacgagaaaaaggaggacgttgtcttcggtcaaacagaccatcgtcgattctggttttacaaagcttttgtagcccctacaaggcccctgatcgtgtgcgaagggcccactgacaacatttaccttagaaacgcaattcggaggctgacagcctatcatcctaagctggggaacatgaccccgcatgggttcaaatatggagttgcactattctcgtacaccaatcaaatacacaaaattctgggcatctctggtggaatcggccccctgctcaccctcgttcatgggtataagaagcagctgaaggagtacaaattccgcccaatggcgcacccagtaatcgtactggtcgataatgacaccgcactgggccagaaagtctgcaattcactgaagaaacactttggtgtcgatgtcacgcaccatagcccttcatcttttttccacctgaccgacaatttatacctggtaaaaactccattagtcgggatactggccatgacctgcatagaagacttatttgacgccgctacaaaagccatgcctttagatggcaagacctttcatacggagaaggcaggcttcgaccctaccaagcacattggcaaggcgccattcgctactaaggttgtgtctcccaacgccgccgctattagctggaacggcttcgtccctctgcttgataggattgtggctgtgcagaacgattactccgcgaagcttggcaccacacctctcgccgctctccctcataccccaacacttgcgccccttagtcccgctgccggtcatccatga

SEQ ID NO: 8048 - RNA, 1665 nt, synthetic construct
  source 1..1665: mol_type = other RNA
atgtcctttgtcctgtataagcagcatcctgccctcaagtacgccaagttcgaaatccccaaaaaagatggggggacccgggaaatttgtgcaccgctgggaccattaaaagccatacagcgcgagctggctaccctccttaacgagtgtagggccgagattctggaagcgacaaagcgtgcgcctctcagccatggattccgagaagacctaagtatcgtcacaaacgcccataatcacaccgctagacgatacgttctcaatgttgatctcgcggacttcttccccacatttaattttggcagagtgcggggtttttttttgaaggataaggacttcgagttgcatgagaaagtggcaaccgtgcttgcccagatcgcatgcttcgaaaacagtctaccacagggatctccctgctctccggtcatagcggatatgattgcccatgtgctggacgctcgactggtaggtctagctaaaaaggcgaaagtaacttactctagatacgccgacgacctgtcatttagcacaaaccagaaatccttccccgagggactggcaaaacccagcgcagttggcagtggtgtgtgggtcgcaggggacgaccttgttaagaaaatcgaagcctcagggtttaagttgaatccagccaagaccaggatgcagttccggggcagcaggcaagtggtgactgggctgactgttaatgccaaagttaatgtctcgcagaagtactggagaggaataaggtctatgtgccgggccttgtataccactggagcataccacctacctagccctaaagccggcgctcctgctggtgatcctcctgaaaaaattgcttccctgcgtgtgctcgccggcatgttgtcgcacgtgtatcacgttaagagagagtccggattcgctccagatggcgagaaagaagagattgtgttcggccatacagatcatgaaagattttggttcttcaggagctttgtggccttagacaggcccctgattctgtgtgaaggcgtcactgacaacgtctatctgcggaatgccatgcgccaaaaggcagctgcgtttccacaactggccgcgaagacaccggaggggtataagttcgccgtggccctgttctcttacgacaatctcattcacaagatccttggaatcacgggcggcattggccccgtgctcaagctgatccacggctaccgtcgccgcctgaaagcttttaagtatcgcccattcttacacccagtgatcgtcgtggtagacaacgataccgccctgaacgcaaagacatgtaacgctcttaagaaacattttggagtcgatataacacacggctcagccgatgactttttttatctcaccaacaatctctacctggtgaaaactccccttgtcggtaccaaggcaatgacttgcatcgaggatttgttcgatgatgccactttgaaaaaggacctggacggtaaggtgttccacaccgagaaagaggggtttgacgcttccaagcacattgggaaaaagctcttcgccaccaaggtgatcgcacccgaggctgctacgatcagctgggacgggtttgaacctctgttagcacgggtagctgcagtacttaacgcatacgccgccaaagtggcagctgatgcttcatccagtacaacgtga

SEQ ID NO: 8049 - RNA, 1650 nt, synthetic construct
  source 1..1650: mol_type = other RNA
atggcaggattgctggatgtcgaacctcggcagctgtcatttgcactgtacaagctaactcctcagcagaagtatgacacatttgagatccccaaaaaagggggcggagtgagaaccatccacgctcctcgcggggtgctgaaggacatccaggcgcgactcgcggcactgctgtacgactgtgtggacgaaatccaggttgcgaagccgcgtagaccagtcagtcatgggttccgccggtcgctgtctatcataacaaatgccgccaggcataccaacaggcggtatgtatttaacctagatctcgaggacttcttccctacatttaattttgggcgagtgcggggcttcttcctgaaggaccaggattttcttctgtctgagaaagccgccactttgattgctcagatcgcctgcagggacggagcacttccacagggctccccatgctctccaatcattgcagatctcatagcccacatcttggatgtgaggctcttgtccctcgccaagacttccaaagtcacctattcccggtatgccgacgacttgaccttttcgacaaaccagaagatttttcccccagccattgctactggtggggctggccccgaagatgcatgggttattggatcaccccttgcccgtgttattgaaagagcggggttttctataaacacacgcaagacccgaatgcaagaacgggcttcccgtcagctcgtgaccggccttaccgtgaatagcaaggtcaacgttactcaaagctattggagaagcatcagaagtatgtgccattctctgttccagaccggtgcctactatcgaccgatccggactggggagcctccaacactgttaatgtccctcagcccgcttgcgggaatgctgagccatgtgcaccatgtgaagagggaatcaggagttcgacctgatcgcccgggcaaggactttcaattcggtcacaaagaacaggaggatttctggttttatgcaacctttatcgcccttacacaaccactgatcgtcaccgagggaaaaactgacggcgtctaccttcggaatgccataagaaatttgcccgccttccacccagctttaggtcacattaccccagagggtttcagctttggcgttcgcatcttcaattatgagaaccaaacgcaccagagactgcgcatcacgggcgggataggccctctcagtaccttcatgatccactacggcgcaaggttgaaaagatacgggcacaggcctctagccgctcccgtcatagtactgattgacaacgacaccgcactcacaaaggagctacgcgctgcactggatcggaattacggtgtgaaggtggacctgttaacgcctgcatcattttaccacctgacagacaacctctacctggtgaaaacgcccgagttaggagcctccggcgtgagctgtattgaagacttcttcgataccgcaacaagaaagctgcccctcgatgggaagactttccatgccgatggcaaaggctttgatcctacaaggcacattggaaagagtcccttcgctaaaaaaattgtggctccccgcgccgccactattgattggactggattcgcccccctgctgtctaggatcgctgctgtagtagctcattacaaacattga

SEQ ID NO: 8050 - RNA, 1719 nt, synthetic construct
  source 1..1719: mol_type = other RNA
atgaccattctgaagaagctccaagatgccaaggatcttgaagacctggccaagattctcggtttcagccctaagggaatctcatacatcatttacaaactcgaggagaattccaagtacaaaaagttcaagatcaagaagagccacgggggggagagggagatttgtgcccctatagagccattgaagactctgcagcgccggctggcaaacgttttgtacgcaagcgtagattccattgaagccgaaaaggggatcaactccacatcccatgggtttagacgcggccattccatcatctcaaatgccagaaagcacaaacgtaggagatatgtactaaatctggatctgaaggacttttttccaactttcaattttgggcgggtgcgaggcttttttatcagtgacaatcgatttggctttcacgagaatgtggcgacgttgatttctcagattgcttgccacgaaaacagtttgccccagggtagcccttgcagtcccatcatcgctgatctgatagcgaacattttggatgctcggctcgtgaggttagccaaagaccacaaagtcacatactcgcgatatgctgatgacatcaccttttctacctccctaaaaaaattcccagcggcacttgctcagcccgttgctggcgaaggtcctgattggaagctcgcagacccgctgaccaaagctatcgagggagctggcttcaaaataaacccagacaagactagaatgcagtttcgtgacggcagacaactggtgacaggcctgaccgtcaatgacaaagttaacattaggcctgaatactatcggtacgcgcggtctatgtgccaccaggccttcaaatcaggaaagtattacaggccatctaaagtctctgtggtgggagagaaagagcctgagatgatagaaagtcttaacccgctagaagggatcttgtcacatattcaccatgtgaaagatacaatcgatgtccgcattgagcccgaaaagcggaggcatggaactgccgcccgccaactgtatcgccgcttccttatcttcaagaagttcgtttgcctcgatcagcctctggtgatatgtgaggggaagactgactctatttatctgaagtgcgcactgaggaaattaaccccatccttccccgagttagccaaaataaaggacgagaagtttacaagcaaaatctcattcttcaactacacgggcagagtacactctgtgctcgaacttggtggcgggaccgaggatctgaagtttttcttcattaagactcggtaccacgaaattattaatcgtttcggccacaagcccctgcaacatcccgtgatcgtgctcatcgataacgacgatggcgccaaaggactcttcaaaaccataaagcagaatttcggaatcaccatcgatctacagagcgacgacaagttttaccatattacagacaacctgtatctggtaaagacaatcgagaaaggcgagtccggtaagagttgtatcgaagattgtttcgaaccatcgttacttgagacgaaagtcaaaggaaaaaaattcaacagcctgaagtatgggggagcaagcggtggatatggcaagtttgtttttgccgagcaggtcgtccgaccgaatgctgacaaaatcgactttaacgggtttaagcctctgctcgaaaggattactgccgcaatagtggactacaaaagcagagtgccctga

SEQ ID NO: 8051 - RNA, 1692 nt, synthetic construct
  source 1..1692: mol_type = other RNA
atggcttatatattgtacaagatacctgacagtgccaaataccagaaatttactatccctaagtccggaggcggagagcgcgaaatttgcgcccccgttgaacggttgaaaacactgcaaagacacctggctaacgctttgtatgcttgccgggatgagattgatagggaatctggacttcgccctctttctcatgcatttaggcgtaccgtcatcgttaccaacgaccgaaggcataagctttcaatcatcacaaacgcgagaagacacaaacgacagcggtatgtgctaaatctggacctccaggatttttttcccactttcaatttcggcagggtaagaggctttttcattcacaataacgacttcaagcttaacgacaaagtcgccacgatcattgctcaaattgcttgctttgagaatgcgctacctcaggggtcaccatgtagcccaattgtggcagacttaatagcccatctgctggacgtcaggttggcgcagctcgctaaaaagcatcagctcacctactcacgatatgctgacgatctgacattctcaacctccagaagagactttccgccttcgatcgcagcgccagttacacccgagagccctgagtgggctcctggacgtgaactcgccaaggtgatcgataaaagtggcttcgtgataaatcccaccaaaacccgcatgcagttcaggatgtctcggcaactggtgactggcctcacagtgaatgccaaggtgaacattaggccggagtattatcggcgggccagagccatgtgccactccctttttgaaacaggccagtactaccgtcctctcagtgtaccggaaaccgaggccgaagatggggaggatgtcaaacttgaacccgtgacaagcctgaatccactgcaaggaatcctgagtcacatccaccacgtgaaggacgcaattgatgatcgccccgagccagagaaacgcatggatgcaactgccgctcggaagctgtatgcccgcttcctgaagtacagatacttcgtgcgcctggacagaccactgatcgtctgtgagggtaagaccgacaacatatatttaaaacacgcaatacggcagctgactgactttcaccccaagttaggtgaatgggaggataatagcttcaagtctgctatcaggttttttaactacacgggccaggcccataaactgctcgagttgggcggaggcgcctccgatttgaagtacttcttcatcaagaatcgctatgccgaagacgtcagggggttcaagcatcgaccactggcacatccagttgttattctcattgacaacgacgacggtgcagacgggaagaaagggctattaagcaccatcaaaactaacttcaacattaacatcgacctcaagtctaatgacagcttctttcacatcacggataatctatacttggtcaaaacccccgggaaaggtaaaaaggtgaaatcctgtatcgaggatttcttcgatccgaagctgctgaagacaaagcttaatgggaagaagctgaacctgaaaaaggaccatggagccgatggtgaatacggcaagtatctgtttgcggagaaagtggtacgacccaacgccgataagatcgacttttccgactttaagcccctcctcgagcggattactgcagtgattgatcactacaaacctccagattga

SEQ ID NO: 8052 - RNA, 1719 nt, synthetic construct
  source 1..1719: mol_type = other RNA
atggccgccctcctgggatataaacctaaaagtctggcctacatcctgtacaagatccctgatggggctaagtacacaacttttacaattcccaagaaaactggaggagagagagagatctgtgcccccatcgcccagctgaaattgctccagcggagactggctaacattctatatgcttgtcgcgacgaaattgataagagcagcaagctcgggtctttaagccatggtttcaggaggggacacagcatagtgagcaatgccaaacctcatcggaggagacgatacgtgctgaatctggatctgaaggatttttttccatcctttaactttggaagagttcgaggcttttttatcaagtctaaagccttcgaattgaacgagaaagtggcgaccctgatcgctcaaattgcatgccacaacaacgcattgccacagggctcaccctgctctcccgtcatctccgatttgcttgcccacctgctcgatgccaggctcgctaaaatggcaaaagcccagggtgtgacatacagccgctacgccgacgacttaactttttccacatccaagaaggagttcccggccgccctggcaaccagtaaggaaggcgaaacaaatgtatgggagttgggggaggaactcgttagtagaattgttgacgctgggttcgccatcaacccagacaaaacacgcatgcaatgccacgcgagccgacagctggtgacctctctgaccgtcaacgccaaagtgaatatccggcaggagtattaccggcgtacacgcgcgatgtgtgacgcactgttcaagactggacaatacgctgacgtcccctttaataaaagtcttgcccgtcgccaggattcagttacggctaatgaaggtggagctaccggttctggaccctgggctccagctaaggctggaataaaatccctcggtccgttaggcggcagacttgcgcacatccactatgtgaaggatactattgatacacgggaggagatagataagaggaagcatatgactgcatttcgcatgctgtattatcggttcctcttctacaagaacttcgtcgccctggacaagcctttagtgctcactgaggggaagaccgacaacgtgtacctatcactggctgtcaggcatttacctaagttccatcccaaattggggcagccatcggccaaaggcttccaatccgccctgcgatatttcaatcatgtgaacaaaacgagcaaggtaatggaactggacggcgggtccggcaacttcaaattcttcgtcttgcgttatgcagatctgatcgcaaagttcggccacaagcctcagctgcatccggttattatgcttcttgacaatgatgacggcgcaaaagacatactcgccgttatcaagaagaattacgggattgagattaagccctcatctaccaacagtttctttcacattaccgacaatctctatgtagtgacgactccccatgtgggcaagaaggtaaaaacctgcatcgaagactttttcgaaccttcactactgaaggaggagttgaatggcaaaacacttaatctcggtacccctaacccagcgaccgaatacgggaaacacatatttgcagaaaaggtggtgaggccaaacgcatcgacgctaaaatgggatggctttgagccacttctgcagagactgtccgatgtccttgaccactatgagccccctacctga

SEQ ID NO: 8053 - RNA, 1764 nt, synthetic construct
  source 1..1764: mol_type = other RNA
atgtcaatccttaaatctctgaaggccgctgaagatgtggacgatcttgcggtcctccttggatataagccaaagagtctcacttacatcctgtataaattgccagacgcagctaagtatacgacatttaagatcccaaagaaaacagggggcgagagggaaatatgtgcacccacggaccagttgagacttctgcagcgccggctggcgaacatcctgtacacttgcagggacgagatcgatcacgaaagtggaaaaggatctctgagccatggctttagacgtggtcacagcatcgtgaccaatgccaagccccaccaccgccgacgatttgtcctcaacctcgatctcaaagattttttcccgtctttcaattttggacgtgtccgcggcttcttcataaagtccaaggcatttgaactgaacgaaaaggtggctaccctcatcgcccaaattgcttgccatcagaacgcgctgccacaggggtcgccttgtagtcctatcatttccgacttactggcccacctgttggatactcggcttgcaaagatggctaaaaaggagggcgtgacatatagtcggtatgctgacgatctaacgttctcaaccaacaaaagagtgtttcccaccgcattagcaatccagaatggcgataacgccaaactgtgggaactaggtgaagagttaacctcccgcattgcagatacaggctttactataaacccggataagacaaggatgcagtgcagaatgtctagacaactggtgacatctctgactgtcaatgccaaggtaaacgttagaatggagtactataagcggacaagggccatgtgtgacaccctattcaaaaccggattgtactccgacattccctttaataagtctctcgcacgccggcgagataatgccctggctgtagccggatcggagaaagacaaagatggtgtgaaagccgctaagaccagcatcaccagcttagggcccttgtccggcaggttggcccatatccatcacgtgaaagaccgcattgatacgcgagaggaatgggaaaaacgtaaacacaagacaacattcaggatgctgtactgcaggttcctgttctaccggaatttcgccgctcttgataaaccccttatcctgactgaaggtaagaccgacaatgtctacctcagcctggccgttaaaaattccccaaagttccaccccaagttgggccagctgacagccaaggggtttcagagcaacctccggtatttcaaccacctcaacgagacacataagattatggagctcgacggagggagcggcaacttcaagtttttcataatacggtacaaggagattatggactccttcaagcacaagccaatgctccaccctgtggtactggttgttgacaacgacggtggggccaaggatatttttgctaccatcaagaccaattacgggatttcaatcaatcatgacggcaaacatggattttaccatgtgactcataatctatacctggtcaaaactcctcacgtggggaagaaacaacaaacctgtattgaagatatgttcgagccggcactgttaaaggaggagttggggggaaagaaactaaacctgggcaagctggaccccgcgaaagagtatggtaagcatttgtttgccgagaaagtggttagacctaaagcttcaactctgaaatgggacggcttcgagcctcttctccagagggtagtggaagtcctggaccactataaaccacctacctga

SEQ ID NO: 8054 - RNA, 1680 nt, synthetic construct
  source 1..1680: mol_type = other RNA
atgagtgtgttgggcgatttaaaggcagcaacctctcttagcgacctcgctaagttgattgggtacaagcccagcgctctgtcttttctgattcatcacgcacctgctacttcgaagtatacttccttcagtgtcccaaagaagagcgggggggtacggctgattaacgcgccctccccgaaactgaaaaccctgcagcagcacctagtgaccctcttgacaaaatgtagaaaagagatcgacgaagctagtaacctcaaaccactatcccatggcttccggaaagggcaatccattataacaaatgccaatccccacattcgccgccggtacgtgctcaacctggacttagaagacttctttccttcaataaacttcggccgagttcgcgggtacttcataaagaacaacgatttcaagctacataaggacgttgccactgtgatagcccagattgcctgtcacgcaaattccttgccccagggagcaccaacgagtccaatcattagtgatctggtggcacatttgttagatgtgcgtttagtgaggctcgccaaaaagaataattgcacctacaccagatacgcggatgacctgaccttttcaacgaatgtcaaagtctttcccacgagccttgctctgcagactagcccaagcgattgggagctggggaagcctctctccgacgtgatcacagatgtgggcttcaaggtaaatcccctcaagacacgcatgcagttgaggggcagcaggcaaaccgtgactgggctcactgtcaatcagaaagtcaatatccaagctggttattaccgaagggtccgctctatgtgctacgagcttttcaaaaccggactttattttcagcagggttccgcaccagtaagcgctctgcctgtcgtggagggccaactgaaccactgcttcagagtaaaacatgaggtggcctattctcggaaggtggacattcagaacgataaacgggacagaggcgtgcgaaagctgtatcgcagatttctattctacaagcattttgtccagctgactaaacctcttctcatctgtgagggcaagacagatgttatctacctgaaacttgcactccgttccctggccgcctcttttccttccctcgttacaaccactgccgcgggcgaggtcaggaacgtaggttttttcaatcacaccgatatcgctgacaacctgctgaagctgggaggtggcagcggaggaatgcagctcctgattaaggattatgcctctgtgctgaaatattttaggagtaaaccactggcccacccggtgatacttgtgatcgataacgacgatggggcggacgacatcttcgcagccatctataacgtgacaaaaaccaaggtttcaagaacatcaaccgccgacttttaccacatcgtcaataacctttttttggtgaagacgccagaatctggtattcacggcacttcaagaatcgaagacttgtttaaaccttcggtgctgaaaacagttgttgacggaaagattttcaatcctgccaagaagatcgatccgacaaaggaatatggaaagattgttttcgctgaaaaggtcgtgcggcccaatgccaacaagatagacttctcagcctttaacaaattcctgggaaggatcgaggctatcttaaaacattacaaacccccctga

SEQ ID NO: 8055 - RNA, 1782 nt, synthetic construct
  source 1..1782: mol_type = other RNA
atgctgcttgagctgagacaggccgacactctagaaaggtttgccgcactgctcaactacacaccctctggcttgtcttttattctgtacaaaatggacgccgcaagtaaatatacaacttttgaggtgacgaaggcaagcgggggagtgaggatgatacacgctcctcatattaagctgaaacgcttgcagaaagctcttgccaatatcctactcgcctgtaacgttgagatagagactgccactcccagacgtcccttatctcatgggttcgagaaaaagcgttccatctttacaaacgcttgggaacacaagaatcgccggtacgttctgaatctggacattgaggatttttttcctaccatcaactttggacgcgttagaggctttttcatcaaatcccacgatttcacgttgcctgagaagaccgcaactttaattgctcagattgcatgccgcgacggcaaactgccacagggtagcccctgctcaccgataatagctaatttggttgcccacctacttgatgtgcgactggtaggactggcgaaaagatcgaactgttcctacaccaggtatgccgatgatatcaccttctcgacaaatcaacaggagtttccagctgaactggcggccgaagacccacctcgaagtggcacctgggtccttagcgaagcgcttatcgctcagattacccggactggtttcaccgtgaacaatgcaaaaacgaggatgcaatgccgaccctcccagcagctggtgactggactcaccgtcaatcagaaggtcaacatcagagccgcctactatgcacgcgccaggattatgtgttccagtctctttaaccacgggcattatcatgtcgagatggaaccggcaccagctcctgctccaggaggaacaccaggcaagcccaagcctaagttgctgaccaaaacagccaccttagaaggtatcctgagtcatatatatcacattaagcacgcgcaagaactgaagagcaaccccgagacatataaagctaaagacccggaggctaagaagaagactaaccagaagagggagtatccaggttacagaaagctctacaaaaaattcctctacttccgacatttcgtgtccccaaccgctccgctggtaatgtgtgaaggcaaaacggacaatatctaccttcgctctgccctcaaaggcctggatccctcatatcctaggctggccgaggtcaaagatggcaaactgttcaccaagggccgtttcctcaaacattctcgggcagaacacgatatcctggaactcagcgggggatcagggaatatcgccaacttcatcgctcactatcggagcgccgtgttcaattataagcatcggcctatgaagtacccagtcatcattttactggacaatgactcaggggggaatgctgtattcaatcaagccaaggaaatgtttaagattcgggtgggttacgacacaaccgaggccttctaccacctgtgccacaatctttatctaatcaagacacctgagatggggaggactggagagagctgcatggaagatctctttgatgagaagaccagaaaggagttggtggatggcaaaacattcaaccctaaggccgacaaagatacagccacgcagtacggcaaaatggtgtttgcggaccgggtcgtgcgcgctaactacgcaatgattaacttcgacaagtttaagcccctcttggagagaatcgtggcagttttagaccacttcgacgccaacaagcccaaggcagcgacttga

SEQ ID NO: 8056 - RNA, 1764 nt, synthetic construct
  source 1..1764: mol_type = other RNA
atgctgagccagctgaagtcagcatctacaatcgatagattcgctgccgccctgggatataaacctgctgcattggcttttatcctcttcaagatgacagacgcagagaagtaccagactttcaccattgcaaaagcttcaggtggcgtgcgaactatccatgcgccgactgagaagctgaaacgcttgcagaaacgtttggctaacgttctcgccgattgcagaaaagaaatccacgataaaaagcctttatccaccctaagtcacggatttgaaccagatcgtagcatttttacaaacgcatgggctcataaaaacagaagatacgtgttgaacttagatctagaagactttttccccactattaattttggaagggttcggggctactttattaacaaccgcgactttcagctgcctattaaagccgcaacccttattgcacagatcgcctgttttcaaggcaagctgccccaaggttcaccctcgagtcctattatttcaaacctgatagctcacctcctcgacgtgaggatggctagactcgctaaatccaacacgtgcacctattctagatatgccgacgatctcactttttcaaccaatcagaagcagttcccaccagacatcgccacccaggttccagatgagcccgggaactgggtccttgggaatcggctaacaggcgaaatagtgcggacaggcttcacgatcaaccatcagaaaacccggatgcagtcccgcccgtcacaacagctggtcaccggtctgaccgtcaatgagaaggtcaatatcagggccagctactataggcacgcccgaaaaatgtgtagctcgtttttcaatcatggggtgtactacaatgagatggagtttgtattcggggttgagggaccaaggccaaagctcattgatacacccagcgtgttagagggaatcctgtctcatatctaccacattaagaatctccaattgacccgcagcacagagcctgaagagctcaagcagaaatctaacaagatcaaatatcccgcctatcgccacctttacaagaagtttctttacttccgacatttcatcaatctcgacgcccctctgatcgtttgcgagggaaagacagataacatttatctgcgtagcgccctgaaggccctctatcccgcattccctgttctggccgacgtcaaaaagggcgagctgcgaagtaaagtaaaattccttaagcactctaggatagaacacaacatattggaattaagtggcgggagtggtaatatcgcaaatttcattgcacactaccggggggccgtatacaattataagtacaggtccatgaagcatcctgtgatcgtgcttgtggacaatgactccggccagaaaggatccgtgttcccccaggcgaacaagcttaatgggaagatcgatataaactattcctccaaggaaccattttatcacctgtgccacaacctatatctgattaaaaccccagagattggcctgacgggcgaatcttgtatggaggatctgtttgacgcggcgaccttggctactaaggtggacgggaaaacattcaaccggaaagacgacaaggatacgtcaactcaatacggtaagatggtgtttgcggacaaggtagtccgcgctaattacgataagatcgacttcagcctgttcgtgccgctgctggaaagaataactaaggtcatcgctcactacaaaagcaatcccagcgcctctgcctccagtcatgtgaaatcttga

SEQ ID NO: 8057 - RNA, 1515 nt, synthetic construct
  source 1..1515: mol_type = other RNA
atgtcaaccctactcaggttgcgaaccgccaagaacctgaaggatttgagcgtaatccttggctatgagcctaagaagttgtcttacatcctctacaaaatcccagagcaggaaaagtacaactcattcgagatcaacaaaaaagatggggggaagcggttaatagaggctccaataccgcaaatcaagaaactccagaagcatctttgcaacatattgactctgtgtagcgtcgaactggccaaagacagtccaaataacattcttagccatggctttaagaagggctcctccattcaaacaaatgctcagaagcacaagaataaacggtttgtcttaaacttcgacattaaagacttcttctggtcgataaatttcggtagggtgagaggattctttatcaagaataaggacttcctactggacgacaaagtagcaacaataatcgcccagattgcgtgttacaatggaagacttccccagggctcacctaccagtcctatcatcagcaatctgattgctcacttgctggatatccgccttgttggagtggccaaaaaatatggctgtgtctacagtcgctacgccgacgacatcaccttttctacaaaccagaaagagtttcccctggatctggttaggaggtccagcgagaacccagagctgctcctcctcgggacacctattgaagaggaagtgaagagatctggtttttgtgtgaaccctctgaagacgagactgaagtaccgagacacacgacaagtggtgacgggactcgttgtcaacaagaaaattaacgttcgttccgaatactatcgcctcgcccgcgccatgtgccactcctattataagactggcaaatacctcataccctctaagatcagcccgatcgacattccaagcaccctgtgcgacagcgatgtcaaggctgatctgaaccggctcggaggcatccttaactatattttctacacccggaattactcagaccaaagatgtttgagagacaagcaggataataaatccgggatttggaaaatgtatcgcgattttatctacttcaagattttcggtgccctggagaggcctctaatcctgtgcgagggtcccactgattcgatttatctgaaagctgcaatcaagtcactgcacaatgaatatcccgaactgattgaaaaatgctctgagaggtttatctataacatcagtttcctgaagtactctaaaaccatccgggagctgttacatttgaccggggggactggcgagttagccaattttgtgggatattacgcatctatggcaaagcagtatgtgatttggaatccgatgcaccccgtgattatagtgacggataacgacggcaaacgtaagaacgcagcgactaaggtatttgctgcggtgaaacagaattccaaaaatagtcatcccactacagaagatgattccgactttttccacattaacaataacctttacctggtcaagatgccacatatcaataacaagaaatga

SEQ ID NO: 8058 - RNA, 1752 nt, synthetic construct
  source 1..1752: mol_type = other RNA
atggcatacttagaaaaactcaaggccgcatcaaccattcaggatctggccgctctgttaaacttaaaagcttcacacctggcttatgtgctgtttgtgctgcccgacgagacaaaatacaagcaatttgagattccgaagaaggccggtggtgaaaggatcatcaatgccccacatgaacggctcaaacacatacagcggtgtctggcccaccttctacagtattgcgtgctggaaattgaacactccaaaccccagcccacccctagggtgttatcccatggcttcagaaaaaaaacggaggtgaacccaaatcgaaaaagcgacatttccattggcatccacactaatgcgtacagccatcaaaataagaagtacgttctgaactttgacttgagcggattcttcgggtcttttaattttggccgggttaggggattctttatcaagaataatgacttcggcctgcatccctctgtcgctacactgattgcgcaaatcgcctgcttcaaaaatgagttgcctcagggatcaccttgctctccaatcattacaaatcttatcgcacacatcttggatatcagacttgtgagatgggctaaaaaaaataggtgtagttactctcgctatgtggacgacatcactctgagcaccaatcaggaaataccccagaagcttgcaacccagtcggaggagcttatgaagtggtccttaaataaggagatagagaacatcatcactcacagcgggtttcagattaatcccctgaagactcgcctccagatgcacagctctaggcagattgttacgggcctcgtggttaacaaaaagataaacgtcaagaaggagtattaccgtagtaccagagccatgtgtcatgccctgtattgtacagggtcctttttcctgctgggcgataagagtaagcctggcactctgcagcaattgaacgggatattggagtacatctacttcataaagcagaagaatcactgcaataaggaaccatgctataaaactaacgtggagcagcataacattaccaacctatactcccagttcctgtattttcgctacttcatcgctttggaaaaaccactcatcatctgtgaaggcaagacagatgtcgcctatctcaaaattgcaattaagcagctgaaaaagcagggcaagtacctgctgcctcaccagatcgattttttccactttacggaacgtatcagcgaggtcatgcatatcaatgctggaaccagcctactgaagaagtttatcgagaactacaagaagaacatagccttcaccaaacaaatacctcggagtcctgtaattgtcctcctggataacgacaaggcagctggagacgtcatacagtgccttgaaaacaagttcaagaaaactaacgtgaactacgaccggaaaaagaatttcatttacccagtgatcgagaacctttatgtggtattgctcccaattagaaatccccctgaagacatcatcatcgagaactttttcgagaaatcagtgctagaaaccaaactcggggagaaaatttttagtccggaaaatggaaacggttttgactcgcagcgccattattcaaagcaggtactcgtcgagaaagtgattcgacccaagcaagatacaatcaacttctctgggttcacagatattctggataacctcgttaccgcgatcgagcaatataaacccggtccggacaaaatacaggatcaagccgtatccattatttga

SEQ ID NO: 8059 - RNA, 1743 nt, synthetic construct
  source 1..1743: mol_type = other RNA
atgtcttcactggcaaaactgcagagcgccaagtcgctcgacgagcttgccgctatcttgggatacaagcccgcagcattggcctacctgctatatcatctgccgacagctcgcaaatatacaacctttaccatccctaagcgcgatggcaccccccgtgatattctcgcacccactccgaaattaaaacttctgcaacggcgcctcgctaacgttctgtatctggccctcgcagatatcgacaaggctggggctccacgacggcatctgagtcacggattcgccaaacacctgtcaattgtgaccaacgctaatgttcaccgacggagaagatacgtccttaacctcgatcttaaggactttttcccttccatcaacttcgggagggtgaggggaatgttcattaaggacaaacgatttgctctggaccccaaaattgctactctgatcgctcagatcgcctgccataacaacgtccttccacaggggtcaccatgctccccggtcatcagtaacgtcataggccacttacttgatattagacttgtgcgcctggcaaaagcgcaaaagtgtacttattccaggtacgccgatgacatcaccttttctacaaatgctaaactgtttcccgcggatatggcggctctcgtggcaggtaccgaacacgaatggaccctgggtgccgccctaatcgaggagatcgataaagcggggttcgcaataaacccggtaaagactcgtatgcaatacagagggagtcggcaggtgacgacaggcttactggtgaatgagaagcccaacattttgccagagtactatagacccgttcgggccatgtgttggtctttgtttaataatggctcctattatagggttgtacccgccactttggccggtgggaagccaggagatcccgatgtgcaggaacccgcaacgagcctagctcccttacaagggatgctgggacatatataccatgtgcgcgaccagattgaccagcgctcttctgcggaaaagaaaaaggaaacaaccgcaaccgcaactaggaagctctatcacaggtttctgttctacagaaatttcattgtcgcccctaagcctctgatcataccagaaggcaagacagacagcatctatctgcaggcggccattgagaagctgattgcctaccatcctcagctcggcaggatggacaaaggcaagttcaagagtgccctgaaatttatgaacttcagctcaacagtccatgctgtgctgcagttagggtccggatctggggacctcttccattttattcggaagtaccacgagttgctaaagcactatcaccaccggcccctccctaatccagtgatcgttctaatagacaatgacgatggtgcaaaagaaatctttggggccgccaaaggcttgggcgctattggcatctcactcacttccactgatgctttctaccgcttgggcccaaacctgtacttaataaagacccctgagacgggacctaagggaaagtcctgcatcgaggacctctttgatccaacactgctgaaggccgagatcgacggaaaaaaattcgacgtgaataagaagcacggcgagcctggtaaatatggtaaacagatattcgccgaaaaagtggtaaggccaaaaaaggacatcattgacttcagcaagtttagcggcctccttgatagaattgtcagcgccctggatgattacaccgccagtccaccccctccttga

SEQ ID NO: 8060 - RNA, 1407 nt, synthetic construct
  source 1..1407: mol_type = other RNA
atgctgaacctcgacatcaaagacttcttccctagcataaactttggccgagtccgcggaatgtttatcaaggataagaggttcgcgctagaccccaaaatcgcaaccctgatcgcgcagattgcctgccacgatcacgtgctcccacaggggtccccctgtagtccagttatttccaatgtggtcgggcatctcctggatattagactggtccggttcgcgaaggctcaaaagtgcacctattcaaggtacgcagatgacattaccttctctacaaacgcgaaggcttttcctccagacattgcagctccggtggctggttctgaacacgactggacattaggggccgccctgctcaaggagatcgagaaggccggatttgaagtcaaccccactaaaacccgcatgcagtaccgtggcagccgtcaggtagcaacaggtctgctggtgaatgagaagcctaatgtcagacccgagtactaccgcacagtgcgggccatgtgttggtccctgtttaattcaggcacatactatcggatggtacctgccgcacttgctggtggcaaagcaggagatcccgacgtaccagaacctgcaactagcctggccccactgcagggaatgcttggacacgtctatcatgtgagggatcaagttgacacacggccctcggccgataaaaaaaaagacgccacggccactgcaacacgcaaactttacatccgtttcttattctaccgcaattttgtcgtggcaccaaagcctctcataattcccgaaggaaagaccgacacggtttatctccgggcagcgatggaaaaactgaccgcctatcatccaaggctaggcgccatggataagggcaagtttaaaccggcactgaaatttatgaagttcagctctaccatccacgatgtgctacaacttggtaacggcgccggggacctgtttcactttataagacgatatcctgacgctctgaaaagataccgacataggcctttaccaaacccgattattgtgttgatcgataatgatgatggggccaaggagatcttcggggctgctaagggactgggggctgctcacattgctaggacttccactgatcctttctaccggctcgctcccaacttgtacttgatcaaaactcccgaaatcggcgctcagggtatatcatgcatagaggacttgtttgacccagccctcctgaaaaccgtgatcgatggaaaggtgtttgaccccaataagaagcatggcgaggccgggaagtatggcaaagcaagattcgccgagaaagttgttcagccgcagaaggacacgatcgatttcagtaagttcgccggcttgctggacagaattgtggctgcccttgatgactatgtggccaacccccctcccccatga

SEQ ID NO: 8061 - RNA, 1737 nt, synthetic construct
  source 1..1737: mol_type = other RNA
atgtctagcctggctaagctccaggctgccaagtccctagacgacttggcagcaatccttggatacaaaccagcggcccttgcgtacctgctttaccatctaccggatgcccagaaatatacagcatttacaatccccaagagaaacggaaacccaaggcctatactagcccctactcctaagttgaaattgctgcagaggcgacttgccaatgtgctgtacctggccttggctgatatcgacaaggccggagctcctaggcgccctctaagtcacggctttgcaaagcacctctccattgtgactaatgctgcagtgcataggagacagcggtatgtcctcaacctggatctgaaggacttttttcccagtattaactttgggagagtgcgggggatgttcatcaaggacaaacgattcggccttgaccccaaagttgccaccctgatagcccagattgcttgtcacgaccatgtgcttccccaagggtcaccttgctccccggtgattagcaacatcgtcggccacttgttggatatccgcctggtgcgctttgcaaaggcacaaaagtgcacctactctcgctatgcagatgatatcaccttcagcacgaatgccaaagccctgcctgcggaagtggcggtacccattcccggctccgagcacgattggaccctcggagcggctttgctgaaggaaatcgataaggcagggttcgaggtgaaccctgccaaaacacgcatgcagtatcgggggtctagacaggtaaccacgggcttgctcgttaatgagaagcctaatatcaggcctgaatactatagaaccgttcgagctatgtgctggagcctgttcaatagcgggacctattaccggatggtacccgctgcactcgcaggaggaaaacctggagatcccgacgtccaggaaccagcgacaagtctggctcctctgcaggggactctcggacacgtgtaccacgtgcgtgaccaggttgatacccggagttctgtggataaaaagaaagaggccaccgccacaaggaagctttacattcggtttctgttttatcgacattttgtggtcgcccccaagccactcatcatcccggagggtaaaacggactccgtgtacctgagagctgccatggaaaaattagccgcctatcatccccagctcggcgctatggataagggcaaatttaagccagctcttaaattcatgaacttctcatcgactgtgcacgacgtgctgcagataggcaacggtgccggcgatttactccactttataaggaagtatcccgacgccttaaagcattaccgtcaccggcccctgcccaatccaattatcgttttaatcgacaacgacgacggagcaaaggacatcttctcagtcgctaagaacttcggtgcaccgaatatctcgagaaccagcactgatccctttcatcgcctggccgcaaacctgtacctgataaaaacaccagaaattggggcgaaaggtacatcatgtattgaggacagcttcgacccagctctgctcaaaactgttattgacggtaaggtcttcgacccgaataaaaagcatggcgagccaggcaaatatggcaaggctcgtttcgccgagaaggtagtccaaccacaaaaagacactattgatttctccaagttcacatctctgctggataggattgtcgccgccctcgatgattacgctgccaatccaccaccaccttga

SEQ ID NO: 8062 - RNA, 1611 nt, synthetic construct
  source 1..1611: mol_type = other RNA
atgccgaagcgcgatggcacacagcggcagatcctcgcccctaccccgaagttgaagttattgcagaggcgactcgccaatgttctgtaccttgctttagcagacatagataaggcagggactcctcgtagacagctgtcgcacggattcgcaaagcatctgagtatcgtgaccaacgcggcggtacacaagcgacgcagatatgtgttgaatttagacctcaaagacttcttcccctccattaacttcggaagggtgcgcggcatcttcatcaaggacaaaaggtttgccctcgatccaaaggtggcaactctgattgcccagatcgcttgccacgaccatgtcctgccacagggctctccatgttcccccgtgatttctaatatcgtgggacacctgcttgatatccggctggttcgcttcgctaaggcccagaagtgcacttacagccgttacgctgacgacattacatttagcacaaatgcgaaggcgtttcccgcagatgttgccgccccggtgtcaggtagcgaacatgactgggcccttggagcagccctccttaaggaactcaagaaagccgattttgaagtaaaccccgccaaaacaaggatgcagtacagggggagtagacaagtcgccactggactactggtcaacgaaaaacccaatgtccggccagagtactacagaacagtacgggccatgtgttggtctttgtttaactcaggcacgtattatagaatggttcccgctgctctagcgggtggaaagccaggggatccagacgtgcaagagccagcatcttccctggcacccctccagggcatgctaggctacatctaccacgtgagaaatcaagtggatactcggcctgccgcagaaaagaaaaaggaggaaacctcaactgctacgaggaagctttatgtgaggtttctgttttatcggaacttcgtcgtcgctcctaagcctctcataattccagagggcaaaaccgattccatctacctgcgcgctgctatcgagaaactcaccgcttaccagccccgactgggggagatggataaagggaagtttaaacctgctcttaagttcatgaactttagcgcggccatacacgatgtgttgcagattggcaacggcgccggggatctcaaacatttcatccgtaaatatcctgatgcccttaaacactaccggcataggcctctgccgaatcctgtcattgttttaatcgacaatgacgacggagctaatgacattttctcagtggccaagaatctgggggcacctcacataagccgcaccagtaccgaccccttctatagactggcacccaacctgtatttgatcaaaacacccgagatgggcagtaaaggtacgtcctgcatcgaggatctgttcgagcccgctttgcgcaagaccgtgattgacggaaaggttttcgacccaaacaaaaaacatggtgaagctgggaaatatggtaaggccagatttgccgagaaagtagtccaacctcagaaagacaagatagatttcagcaagtttgccgacctgctggatcgaattgtggctgtgctggatgactacgccgcaaaccctccacccccatga

SEQ ID NO: 8063 - RNA, 1716 nt, synthetic construct
  source 1..1716: mol_type = other RNA
atgaaggctgctacctctctggaggattttgcgacattactgggatattcgccagccggcttgtcatacatcttgtacaggcagcctcccgccctgaagtaccgaagctttacaattcccaaaaggtctggcgaggaacggctgatctttgccccaaagcccaaattaaaactgctccagcgtaggctcgcggacctcctgtatgccgttttggcagacattgacaaagcggggaacccgcgtaaacctctttcacacggctttgcaaaaaatctaagcattgtgacgaacgcaaaaaatcacaagagaaagcggtttgttctgaacttcgacctcaaaaattttttcccttccattaacttcggccgtgtccgaggggttttcattaacgatcgaagattccagtttgatccaacgatcgctactcttatcgcacaggtggcctgtcacgagaatgctttgcctcaggggtccccctgttctccagtgattagcaatatcatcggtaacctgctcgatattaggcttgtcagattcgcccgcgcccataaatgcacttattcccgctatgcagatgatataacctttagtaccaacgccaaacatttcccacccgaagtggccgagcccctaagctttctgggtgacgaatgggtagtgggagctaacctggaggcagaggtgagcaaggccggctttcaaattaatcctggcaagacgaggatgcagttacggggaagtagacaacagactaccggactggtggtgaacgagaagccgaacatatgcagtgagtattaccgctcggtgcgcgccatgtgctcaagcctgtttaacacagggtcatactatcgcatggtcccagcggcattatccggtggggaaccaggagaaccagatgtccgcgatcagaccacaaagctggcccccctgcaggggttactcggacatatctaccacgtccggaaccaaatagatagaaggacctccagcgaaaaaaaacagaagcccactgctactaggagtctttatcagcggttccttttctaccgaaattttgtggtggccccccaaccactagtggtccctgagggcaaaaccgacagcatctatctcagagctgccatcgagagactgtctgaatatcatccgcggcttggctccttcgaggatggaaagttcaagcagtccgtgaagttcctgaatttctctccggccatccatgatgtcctccaactcggcggaggctacggcgacctgcaattctttgtacggcagtaccgaatatcactgaagaggtttcggcacagacctttgccaaatcctgtaatcgttcttgtggataatgacagtggtggtaagcaggtgtttaatgcagccaagggactagggatcgatggcatttctctgaaaagctccgaccctttctacaggctgacagagaatttgtatctggttaagactcccgaactgggcaacgaagggaccagttgtatcgaaaatttcttcaaacccgagctcttcaaggagaagataaatggtaaagaattcgaccccgcaaagaagcacggggctcctgacaaatactctaaacaggtttttgctgagaagattgtccgcgccaagaaggcggagattgacttttcagacttcgctcctctcctggggagaatcgtagctgtgttggacgactacgcagctaacccaacaaactga

SEQ ID NO: 8064 - RNA, 1743 nt, synthetic construct
  source 1..1743: mol_type = other RNA
atggggggacgggtcagtctgctccttaaattgaaaaccgccaagtcactggacgatattgcctccctgttaggttaccagccacagggcctggcttatattctctacaagatccccgaatccgtcaagtataccaccttcacgatcgcgaagcgaagcggtgagctccgcgagattaaggcacctattccacatctgaaaatcttacagcggagactggcaaatctgcttaactcatgtcttggagaaatagagaatgccggggaaagacgtcggcctatttctcacgggtttgtcccctccctgtccatcattacgaacgccagtgtgcacaagaggcggcgatacgtactgaatcttgatctcgagcatttcttcccctcgatcaatttcggccgagtcaggggcgtgctgatcagggaccgtagatttgagcttgattccaaagttgccactgtggttgcccagatcgcatgccacgagaactcactacctcagggcagtccctgttcacccgtgttgagtaacattgtgggacatctcctggatatccgccttgtgcgtttcgcgcgtcagcataagtgcacatatagcaggtacgttgacgacataaccttttcgaccaaccggacagcctttcctacagaacttgccgcacagcaagagagcggctcttgggggctgagccagagtctggtgagcgaaatcgagagggccggctttcgcgtccatgctaggaaaactaggatgcaggtgcgggggagtaggcaactcaccactggcctgttggtcaacgaaaaagtgaatgttagaccggaatactatcgcactactcggagcatgtgtgctgctctattcaacaaagggacatattacgaaatgaaaccagctacactggccggtggcaacgtgggggatgctgcagtgaaggaggttgccaacagcttggacttgctggagggaagattgggatacatataccacatcaggaacacagtcgatcgcagagagtctgctgagaaaaagaagaattccactgcaacaagaaaactcttccacaagttcttgttttacaagaatttcgtggctctggagcgacctctcataatcaccgaagggaaaacggatagcatatatctccgatgcgctataaggtctttatcttcatttcacggaaaactgaccattgaccggggctctaagccacgcctgtccgtcagttttctgaattttacatccactgttcacgatgtgctgcaattagggggcggaacgggggactttaagttcctaatgcttaggtacaagcaattgcttgatgaattcaaacacgccccgctgatccatcccgtgatcctcctcatcgacaatgatgatggcgcaagagagatcttcggagtggcgaagcagctaggtgttgcagacgtgagcctcgtatcacgcgccgctttttatcgcatttgcgctaatctatatctgattaagacaccagaaggtacctcccagaatcccaagacctgtatcgaggacctgttcgacagctcagtacgcaacactttactgggaggtaagtcttttgacccagacaagaaacataacgaggaaggaaaatacggcaaagcccacttcgcagaaagagtgattagacctcagtccaccgatattgacttctctaagtttgagatgctgctcgatcggatcgtagcggtcattgaggactatgccccggccaagggcatctga

SEQ ID NO: 8065 - RNA, 1749 nt, synthetic construct
  source 1..1749: mol_type = other RNA
atgagtgtggtgaagagtctcaaggaggctaagagcctgactgatttggccaagatcctaaactacaagccttctggcttatccgctattttgtatcacattcccgacgccaataagtacacagagtttagcatcccaaagcagtcagggggcctcaggaccattaaagccccagttgatagattgaatctgctgcagaaaaggctcagcgatctcctgtatagctatctggacgagatcgaacctaagaagaacgggttcaagaccgtctcccatggattcataaaagaccgatctatcatcaccaatgcccaagttcacaaacggagacgctacgtccttaacattgaccttaacgagtttttctctacgatcaattttggcagagtgagaggcattttcattaaggataaacgtttcgagttccaccaggatgtggctacaatcattgcccagatcgcatgtcatgctaactctctgccccaaggctcaccctgctcaccaataattagtaacattgtcggaaggcttctggacgtacgcctgattcggctggcgcgattatataagtgcacctattccaggtatgctgacgacatcacattttcgaccaaccgcgcccagtttccctcggaactggcacatcctgaccctgccggatcacctagatgggtactcgggtttgccttgacgagtgagattacaaaccgaggattccaagttaacaacaataaaacacggatgcagttcaaggctagccgacagcttgtgactggtcttatcgtgaatgacaaggttaacattaagcaggagtactacagaaatgtgcgctctatgtgttcgctccttttcaaatcaggaaaatactaccgggttactcccgccgtgttcgcaggtggatcagcgaatgatcccccggtgaaggtggaattcgatactttaggctctctgggaggaatgctctcttacgtgtatcatgtcaagaataccatcgataggcgggcgtccgtggaaaagaaaaaagaggcaacaagcgccgcaatccgcaagctgtaccacctctttctattctacaagaacttcgtggacctgaagagtccgctgatagtaacagaggggaagaccgatgctatttatctgaaatctgccgtcgaaatgctgagcaaatttcatccacagttgggcagcctcaacggtggtaagtttgtgcacaccgtgcggtacctgaaattcacgagcaccgtgagagacgtcctgcaattagggggcggttcctctgatatcaaattctttatcgagaggtatgcgaagattctgcggaaatttaagcacgggagtttgagccatccagtgataattttgattgacaatgacgagggcgccaaagatatattttccgtagttaggggcaatactccccacaaagatataagccttgacaagactgataagttttaccgtatctactccaatctctatctggtgaagacacctgaagttggtaaggtcaagaatatgacatgcatagagtcctttttcgaagacatcgttctgaagactgtactggagactaaaaccttagacctaaacaaaaaacacctagctcccggcaaatatgggaaacaggtgttcgcagaaaaagtggtccgtccaaataaaaagtccatcaacttttcagggttcgacccactgctcgaacgcatcgtcgcagtcatcgatgattacaaaaccaacccttccagtatctga

SEQ ID NO: 8066 - RNA, 1758 nt, synthetic construct
  source 1..1758: mol_type = other RNA
atgaccgtctccatagtgaaggacctaaaagcagccaaaagccttgacgacctggccctcctgcttggattttctgcatcgggcctgtcctacatactctacaagtcaaactctgccgcccgatacaccgaatttcagattcctaagaggaagggcggcactcgcactattaaagcgccggaacccaaactgaaactcctgcagaccagactcgctgaaatcctgtataattatctggacggaattgaggagaaaaagaaaccattcaaggctgtttcccatgggtttgccgaaggcaagagcatcataactaatgctgcagtccacaagcgccggaggtacgtcctgaatatcgatcttgaggatttttttccaaccattaacttcggacgcgtgcgtggcgttttcatcaaagatcggcgattcgaattcgaccccaagattgctacaatcattgcgcagattgcttgccacgatcattctttacctcagggctccccttgtagtccggtgatcagcaatatcgttggaagactcctggacgtccggttggttcggttggccaaggagcacaagtgtacctactcccggtatgccgatgatctcacctttagtacgaaccaatcaacatttcctgccgctttggctgccccagatcccgctgcagcaggcaagtggatcgtgggtaacgcccttgacgctgaaattgtgggtactggtttcaagatcaaccacggaaagacacgtatgcagtttcgcgactctaggcaaacggtgacaggtctgttggtaaacgagaaggtaaatatcgtgccagagtattaccgggctgcccgctctatgtgcagcgcctttttccaaaccggcaaatattaccacagagttcccgctgccctcgtgggagggaaagctgaagaccccatggaagatatagtctatgacacccctccagtgttggagggcatcttgagtcacatctatctcatcaaaaataccgtggatcgtaggacttccgctgaaaagaaaaaggaggagaatgtgacagccataagaaagctctaccatcatttcctgttctacaaaaacttcgtaatcagcgtcaggccgctgatagtgacagagggtaaaaccgatccaatttacctgaaagcagcaatagagcgactgccaaaattccatcccaagttgggcgcctttaaaggagggaagttccagactactgtaaggttcctgaactttacgagcactgtgagagacgtcctgcagcttggcgggggatcaggggacctgatgcactttatagagaagtatttcaagatcctctcaaagttcaagcacgcacctttagcggcaccagtgattgtcttaattgacaatgatgacggcgcggggaagattttcgggaaaatccagggactgacaaagtgccccccaattagcaccttaacaacagaacccttttactatatcaccgcaaacctatacatgattaagactcctgagatcgggaaagacaagggcatgacctgtattgagacatttttcgaagatacggttctcaagaccgtgctaggtggaaagactctgagtctaaacaaaaaacaccttgagcctgggaaatatgggaaggcaatttttgccgagaaggttatccgccccaataaagcaacaatcaaattcgatgcgtttgaaccgcttctggacagaatcacggccgtgctggatcatcatgccgctaaagcccctcccgccgcctga

SEQ ID NO: 8067 - RNA, 1743 nt, synthetic construct
  source 1..1743: mol_type = other RNA
atgagcatcgtgaacaaacttaaaggcgccaaaactctcgatgagttggccgacctgctggggttcactccatccgggttttcctacatcttgtaccgtctcccaaatgctatcaaatacaaaagcttcagcataccaaaaagggggggaggtgctcgaactatcgaggcacctgatgatcgcctcaaactgctgcagcgcaggcttgcaaatgtcctctatctgtatttagacgagatcgaaaaatctgggaaagaacacacacctgttgctcacgggtttgcccggtcactgtctattattaccaatgcagcatgtcataagagaagacggtatgtactgaacctcgatttagccgagttctttcctgcaattaactttggcagagtgcgaggggttttcctaaaagacaagagatttgagtttgcccccaagatcgccacacttatagctcaaattgcatgtcataaccatgctttgccacagggctccccctgtagtcccgtgatctcaaatatcgtggcgagactgttagatgttcggctggtgagacttgccaagcagcacaagtgtacctactcgcggtatgcggatgacatcacgttttctacaaaccagaaggagtttccagtagacctggcgttgcctgacccgagtggtaagggcccctgggttgtaggccccgctttgaccgctgaaataaccggaactggcttcgtcattaatgcatccaagaccaggatgcaaattaggggatctagacagttggcaaccggtctgctagtcaacgaaaaggttaacgtgtgcccagaatactacaggaccgtgcgcagcatgtgcgccaggctgttctccactggcgaatacttcgccatggtgccagccatgatggctggtgggaaggtcggggacccggatgttcgaaccagtttcaaaacgtttcctctgatcgagggtcgcctcgggtttatttatctagtgcgcgacggactggatcggcgggatggagtggagaaaaaaaagtcgcctacagccacccgcgtattataccatcatctcttgttctacaagcattttgtggctggcgccaggccattagtcatcacagaaggaaaaacagaccgcgtgtatctacgggctgccattgagaagctcactagcttccacccccgactgggaaagattgagtctggcgccttctcaagcagcatacgttttatgaatttctcacgtatcgtccacgacgtgctccaacttgggggtgggaccggagatctgaaattcttcatgcttcattatgccgacaccctgagaaagttcaaacatgccccccttaaggcaccaatcattgtcctgatcgataatgatctgggaaccaaggacatttttggcgttatgagggagaagactgtccacaagacaatcagtacgcagactaccgcgcctttctaccgagtgcacgcaaatctctatctggtcaagactccggaaacaggaaaggataagggcatgacatgcatcgaagacctctttgagccttgcgtgctggctacgaaaatagacggcctggtgtttgatcctgacaagaaacacaaggaacccggtaaatacggcaaggccgtgttcgcggagaaagtggtccggcccaacaagtccgctattgtatttgatggcttcgaccccctcctgcagaggatctgcgatgtgattgacgactatgccacacacccgggacacatatga

SEQ ID NO: 8068 - RNA, 1761 nt, synthetic construct
  source 1..1761: mol_type = other RNA
atgacctatcttaaaaaaattcgcgaggcccaaactctcaaggacatcgcccacatcctcggggtccagcccaagaccgtctcatacctgctgtatatcttgcctgacgcagaaaagtaccgcccatttgaaataccgaaacggaatggtggaaagcgcttgatcaacgcacccgaaccccggttaaaaatggtgcagagaagattggcaaacgtcctctacgagtgcattgccgaggcagagaagtgtgccccacctagacgacctctagctcatgggtttgcacgtccgcgggtaattggcaccgatgccagcaagaataagaaaaggcggtatgccctgggcatattcagcaatgccgctatccataagaataggagatacgttctaaatctggacctagaggatttttttccttctctgaatttcggcagggtacgggggttcttcattaaggataaaaggtttgagctcaatgagaaggtggcaacggtcatagcgcaaatcgcgtgtcaccgcaacgagcttccccagggctccccatgctctccaattatctcaaacctgctggggcatctcctggatgttagactgttccgtctggctcgcaaatacaagtgtacgtattcccgctacgccgatgacataacgttttctactaacaggaaagactttcccgccgctttagccaaacctatccccgaaaaggtgagctattggcaactgggaagtccgcttgtgaaacagatccagagggccggttttaaggtgaacaacgataaaactcggatgcagtggaggggctctaggcagatggccacaggattaattgtgaacaagaaggtcaacataagatccgaatattaccgcacagctcgggcaatctgcaatcgtctgttttcaaccggagagtattacattagtgatccagagaaatccctggacggactgaacaagatcgaaggtatcctgtctcatattcactatatcaaggatagggcagaccttagagagaaagaggagaaaaagaaggacccactggccattcggaagctctaccggcgcttcttgttctataagcatttcgttgctttggagaagccattgatcgtgacagaggggaaaacagaccccatttacctgagagctgctatatcgaaattgcctaaataccaccctcagctgggagaatttgtcaatggcaaattttctagcgctattcgattccttaagtatagtgataccatcgacaagattcttcgcttatcgggcgggaccggcaacctcaaggatttcattcttaagaactacaagaaggacatcaattcctttaaattccagcccctagcctatccagtgattatcctcatcgacaatgatcagggcgccagagacatcttcaacatggtgactaagagatttgaaataaagatctcccctgaaactacccaaagcttctatcacctgcacaaaaatctctacattgtgaaaacacccgaaaacgggaaaaatagtatatcatgcatcgaagatctgttcgacccagagctccgtgaaacacctattgacggtaagaccttcgacttctcaaaaaaaaacaaggcggatgataagcacggaaaaacagtgtttgcgactaaagttatccgaccccaggctgaccagatcgacttcagccgatttgagaagctgctcgatcgaattattgtagttctggacgattactacgtcaggcaaaagagcagtagcgtggattcctga

SEQ ID NO: 8069 - RNA, 1710 nt, synthetic construct
  source 1..1710: mol_type = other RNA
atggaaaatcttgagcgcctgcgtgaagctactagtttaaaggacatcgctcgaatatttggggtgcaaccaaaaaccatctcattcctcatttatgtgctcccggccgagcatcgttatcataccttcgagattcctaaacagtcgggcggcatgaggacaattaatgctcccgaaccgcggctaaagatgatacagaggcgactcgcggattgtttatataaatgcacgggagagatttatggcgagccccccaaacgcctactttctcatggtttcttacgatcccgatccattttcacaaacgcctcaatacataacagtagacgctacgtacttaatctggacctggaggactttttccctagctttaattttgggcgggtacgcggttttttcatcaaggattcacggttcaaactgcaccagaaggttgccactatcattgcccagattgcctgtcaccaaaatgagcttccacagggatccccttgctctccaatcatcactaacctcataggccatatgctggatgttcgcctggttaaactcgcaagaaagtacaattgcctgtactcccgctatgcggacgacatcacttttagcacaaacctgaccaattttcctgtcgacctcgccaaacagagcgatggagatctgagcaagtggcaactgggcaaaaagttgaccaaggagattgaagattctggcttcgacataaacaagagtaagactaggatgcagtggaaatgcagcagacaaactaccacaggactgacagtgaacaagaaagttaacatccgttctgaatactatagaagagcaagggctatatgtcaccagctgttcactagtggttcttattacacgtttgacgtggagtctcagtccgaaaaccttaataaaatcgagggcatcttgtcccacatctaccacattaagcagcagagcgccgtggccttcgaacgaagtacgcagcggacttgggatgccaagacaaccggtctgtacgccatcaggaagctctaccgcagcttcctgatttacagatatttcaacgtcagcgtaaaacctgcaattgtgacagagggcgtgacagaccctatatacctgaagctggcaattaagaaaatcaaggcctatcagccccaacttggggaatttacaaacggaagattccagtacaagatgtcgttcatcaaacattcaggcaacacaggggaggtgctccaattggacggaggggtcagtaaactgaacagcctcattaagaactaccggaaggacttagatcggttcaagtacactctgctgaccaatccagtcgtcgttctgatcgacaatgataagggtgcaaaggaagtatttaacaccgtgaagaatcagtatggcctagagatctcacacaagaaagaaaaacccttctatcacctccacgctaatctgtacttggtgaaaacccccctaaccaacaatcggtcagagtcctgcatcgaggattgttttgaccaggatacccttgacatcgagttggatgggaggaagtttgatccagctaaaaaaaatgggtccgaagacacgtatggaaagaccaccttcgcgagggaggtgatcattccaaacgctgacgtcgtctcctttgaagggtttgatgaagtgttgtctaggatttctgcagtgttggatgactacagagtgcggaggcagtga

SEQ ID NO: 8070 - RNA, 1689 nt, synthetic construct
  source 1..1689: mol_type = other RNA
atgtcccgcctcataaagctgcgagaagctaaatctttgtcggacctggccgttttgctgggctttaaaccgaaagccgtgtcctacattctgtataagatccccgagaacaataagtacatcgagttcgagatctctaagaaaaatggagggaaacgactcattaaggctcctaccgaaaaattaaaaaagttacagcggcgtttggccgatctcctgaatgagtgtttcaatcagatttccaaggagagcgggaagaaatcgctggctcacggctttattgagaaccattcaatcgtgagtaacgctaagaatcacaaaaacaagcgttatgtgttcaatgtcgacatccaggatttttttccctctattaactttggacgcgtcagaggctttttcattaagaacaggcacttttccctggatcccaatgtggccaccgtgatcgcccaaatcgcttgtcataataatgagcttccacagggcagtccctgctcacctatcatatctaacctcataggacatctgctggacataagaatggcgaatctaagcaagagagccaagtgtacgtacagccgctatgcagatgatctgacttttagcacaaacaggaaagattttcccgaatcaatcgcaattatgcaagacgacaataactgggttgccgggtccagacttatcaaagaaatcgataaagtcggcttctctctgaatacaaaaaagaccagcatgcagtttaagacttctcggcagatggccaccggattgattgtaaacgagaaggttaacatcaaacgcgaatactacaaaattgcaagaagtatgtgtcatgaactattcaacactggcgaattctatctgaataacaaggacgatagctcaggcgagacggacaacaatgaggataaggggaccacaataagtcagcttgaagggattctcaactttatataccagattaaacggcctcacgataccgctaaactgggtgaccgccggtttcaccctaatgcaattactaaactacacagggatttcctgttttacaagcacttccactcaatgcagatgccggtgatcgtttgcgaaggcaagacagatatcatctacttgaaatgcgccctgaaacagctggcgaagacatacaacgaattcattgagctcaatgatgacggcacggagtataagatcaacttccttaatttctccaagaaactgagggacgtgttcgcaataagtactgggacaagcggactcaagcatctcatggagattttcgagaagaatatgtgcactttcaacgtaggtggcaaaagcttcccagttgtggtgattatcgacaacgatgacggagcagaggacattaaaaagaagctgaagatcaagaactccgaggagatcaaggagttctatcacttcgtggaaaacctttacgtgctgattatcccaaaagacaagggtaaagcgatcgaagatttatttgagccagaagtgcttatgaagaaagtcgacggaaaagtgttcaataggcagaaagagctcgacgctgaaaaggagtatgggaaaatagtattcgccgaaaaggtcgtccgagagaaccaacaacatatcaactttgacggttttaaggaagtgtttgacaagttgaagaccgtcatcgacgattatcggaccaagaatgtatga

SEQ ID NO: 8071 - RNA, 1686 nt, synthetic construct
  source 1..1686: mol_type = other RNA
atgtctaggctcgaaaaacttagaaagaccaaaagcttatccgatcttgctaaactgttgggctttcaacctcgtgcagtgagttacattctatacaaaatccccgaagacagaaagtacatagagttcgaaatccctaagaagaatggaggcaagcgaattattaaggcccccacagaaaagctgaaacagctgcagaaccggctggcggatctgctgaatgagtgcttcgaccagatttcaaaggagagcaacaacaagagtctctctcacggattccgcaagaaacactccatcgtgacaaatgccaagaatcataaaaacaagcgctatgtcttcaacgttgatttacaggattttttcccttccatcaatttcgggagggttcgaggatttttcatcaagaaccaccactttgggctcgaaccaaaagtggcaaccgtgatagcacaaattgcgtgccacaacaatgaattgcctcagggttcaccgtgctctcccatcatttcaaatctgataggtcatctccttgatgtccgaatggtaaacttggccaagaaagcaaagtgtacctattcgagatatgccgatgatctgacattttctaccaacaagaagaacttttcacccctcattactatcaagcaggatgagaacaactggatggccggcgaccggctggtgaaagagatcaagaaagtaggattcacccttaatactgaaaaaacgtccatgcagtttaaaaccgctcgccaaatgacaaccgggctgatcgtcaatgagaagattaacgttcgtagagagtactacaagaacgctcggagtatgtgttacgaattgtttaggactggggagttctacatcgacaagaaagacattccacttaacaacgaggaagggcacaaggaaattggcacaatcaatcaactcgaaggcatattatccttcatttatcagatcaagaggcctcatgacaaggctaagcttggcaatagacggtttcatccaaccgcaataactaaactgtatcgggatttcctcttctataagcatttctacttcatggagatgcccgtcatcctgtgcgaagggaaaacggacatcatctatctgaagtgtgccttgagacagctggccaaaagctatactgagtttgtggagatgaatgacgatgggacgtcttacaagatcaaattcctcaattcgagtcgcaattttagggatgtttttagcataagcacaggtacctccggcctgaatcacctaatggagatctacgagaagaacattagcaaatttaaggtgaagggcaaagcctatccggtgattataataattgataacgacgacggaagcaaagagatcaaaaaacgcctcaacatcaaaaatgacgaaaaaatcaaggacttctaccacttcgtcgaaaacctgtacgtgctaattattccaaaggacaaggataaggccatcgaggacctgtttgacactggcgtaaggaaaacaaaaatagacggaaaggtctttaaccgcggaaaaaagattgacgagaagaaggagtatggtaagattgtgttcgctgaaaaggtgattaaagctaatcagcagaagatcaatttcgatcgttttaaagaggtgtttgatgaggttcagaaaatcatcgaggactacaaaaaacggaatgtctga

SEQ ID NO: 8072 - RNA, 1662 nt, synthetic construct
  source 1..1662: mol_type = other RNA
atgtcacaattggagaagctcagaaaaagcacttgtctgtcagaccttgccacgatactgggctacaaaccgaaatccgtcagcttcattatttacaaaatccccgaggacaagaaatacatcgagtttgaaatcccaaagaagaatggaaaaacccgaaaaatcaatgctccagttgatcagctcaagcacctccaacgccgtctcgccgatctgctgaacaactgttttaacgaaatcagtagtgaagcccagaaaaagtctctgagccatggcttcagaaagaataactctatcatcactaacgcgaacaaccacaaaaacaaaaggtacgtgtttaatgtggacctaaaggattttttcccttctatcaatttcggccgcgtaagagggtttctgattaaaaacaacgacttctcccttaatgaaaaggtggctacagttattgcccagatagcctgccacaataatgaactgccccagggcagcccatgctcacccacaatttctaacctgatcgcttacctactggatattcggatggttaacctggccaagcattcaaaatgcaactattcccgctatgcagatgacttgacgttctcaacaaatcggaaggatttcccaaatctgattgcgataaagaaagatgacaagagctgggacgccagcaagaaacttattcctgaaatagagaaggttggcttttgcattaatccggataagacgtctatgcagtttcgaacttcaaggcaggtgacaacaggtttgattgtgaacgagaaggtcaacattaagagtgaatactacaagaaagccagatccatgtgtcatgctgtctttaataccggacagttctacatcgagggagatgataccgaaaaggaaaacactatcaagcaacttgagggaatcctgagtttcatctactatgcaaaacggccacacgagcccagtaaggatgggtctaggaaatataaccctaccgctatcacaactctgtataggaaattcctcttctacaagcatttctatagcctggagaaacctttaatcttatgtgagggcaagaccgacatcatctatctcaaatgtgctttgaagcagctgagcaatacctatagcgactttgtcgatacctcgaaggacaaaattacctacaaggtgtctttcctaaatttctccaaaaacctcagggatgtgttttctatttcaaccggcacttccgggttagacttcatcatcgacaattataagaagctgagccctacctttaaggctcctcgcaaaccctacccagtggtcgtgattgtggacaacgatgacggttccaaagagatcaagaagaaactcaagataaacaatggggacgcaatcacagatttttatcacttcagtgacaatctgtacatacttattgcgcccaaaaataaaactggagcaatcgaggactttttcgacgataacattttgtccaccaaaatcggtgggaaatcctttaaccgtgagaaaaagatagatcccaattccgaatatgggaagatggtatttgccgaaaaggtagtcgcagccaatcagaagtcgataagtttcgacaagtttaaggaggtgttcgatggtatgcggaagattgttagagactgcgacgacaaaattgtgtga

SEQ ID NO: 8073 - RNA, 1695 nt, synthetic construct
  source 1..1695: mol_type = other RNA
atgacaaagttggagaaattacagaaaactacaagcctgagcaaatttgcaaagctgttgaactatcaaccaaagacgatcagttatatcctatacaagattcctgaggaggacaaatacaaccagttcgagatctttaagaaaaacggggaaaagcgtaagatccaggcccccataaaaaaactgaagctcctgcagagacggctcgctaatctactgaatgaatgcttcgatgagatttgcaacaaaaataagaagaccaagtccctctcacacggctttcggaagaagcatagtataatcacaaacgccaaaaaacacaagaatcgccgatacgtatttaacgtggacctccagaacttcttccctagtataaattttggaagggtgattggcttctttatcaagaacaaccacttttcattgaagccagaagtggccacagttatcgcccaaatcgcctgccatgataatgctctgccacaaggctctccttgtagccccattatctccaaccttattggacacttactggacatcaggatggtgaatttagcgaagaagaccaagtgtacctactctagatatgcagacgatctcaccttttccacgaataaaaaggaattcccggaaaaaattgctattaagaagaacgagagcgattgggtcgcgggaagggcactgaccaaagagattgaaaaaatgggcttttcggttaatgcaaagaagacttctatgcaatacagaacctcacgccagatggcgacagggctgattgtcaataagaagatcaacgtgaaaaaggagtactataaaaaggcaagggccatgtgtcacaatctgttcaagtcagacaatttctatatcgacaaaaactctgagaaggaggggacacttaagcagcttgaggggataatctcctttatttaccaggtgaaatcccctcattatatcgagaacaaaaaacccactgccataactgcactgtaccgaaagttcctgttctacaagcactttttttctatagacaagcccctgatcgtgtgtgaaggtaagacggacattatataccttaaatgcgctctcaaacagttggagaatgagtataaagagctgatggggaagtccgacaaaggaatcaacttcaagatcaagttcttgaacatttccaagaacttcaaagaggtgctaaatgtggccgagggtacaaccggcctcttgagcctgataaacatgtacaaagatggattcaaacacttcaagggcaaaggaaaaaaatatccagtcatcattgtcctggacaatgataaagctactggcaagattaagagccgcatacaggagcagcttaagcttaataacgataaaactgccgataagaagaaacagaaacaaaagctggacactaacaagtactatcatttcgctcataatctgcacatcatgtttgccattaaagaggatggtaaagaaatcgaagatctctttgataaggaagttctcgacaccaacgtggaaggcaaaaaattcagtcggaaggataaaattgacaccaaacaggaatatagcaaaaccatttttgctgagaaggtcatcaaagccaaccagacaaagattaattttgaagggttcaaacccgttttcaataaggtaaagaacatcatcaaggaatacagtaagaagaattctcagtga

SEQ ID NO: 8074 - RNA, 1758 nt, synthetic construct
  source 1..1758: mol_type = other RNA
atgtcccacctggagaatttgaaaaaaacgacaacactggctgaactagctctgttgctcgggtataagccaaaagccctctcatatatcctgtataagatccctcagattaataagtacaaggacttcacaatcccgaagaaaaatggtggagagcgccgtatacaggccccagtggacaaagtaaaacaccttcagaaacggttagccgtgttgctctctcagtgttttgacgagatctccaaaaaagcaaaccacaaacggtcgctgagtcatggatttcgcaaggaccacagcataagtaccaatgcaaataatcacacaaacaagagacacgtcttcaatatcgatttgatggatttcttcccctcaattaactttgggagggtgcggggttttttcattaaaaactcacacttcgggctgaaacccaaaatcgccacgattattgcgcagattgcgtgccataataatgagctgcctcaagggagcccctgctcccctatcatctccaacctgattgggcatctgctggacatccgaatggccaattttgcgaagaaaactaagtgcacctattctaggtacgccgacgatctgacctttagtaccaatcgaaaggaattcccggaaaagattgccagccaaaacaacggcaacgaatgggctactagcaggactttgaagaaggagattgagaaggttggtttcaaagttaacgaaaagaaaaccagccttcaatacaaaacatctagacagatcgctactggtcttgtcgtgaacaaaaaggtcaacattaagaaggagtattacaggcaaactaggtctatgtgccactctcttttccagagcaatgagtttttcctaggcaatacgtattccgctaagcctgctatttccgaaaacgcaaagatcaattcaaccagtcctgctaccaactctaagactccgctgcccaaaaatccacaggggaagattaagcaacttgaaagcatcctgtcctacatctatagcgtgaagcgcagacatgacagagataatgcaggaaaaagaaagaactaccctaacgccattacaaaactctatcgtaagttcctcttttacaagcatttcttttccctcaattgtcctctgatcatctgtgagggcaaaacagacatagtctatctgaaatgtgccctgcgacagttggctaatgaatacggagaattcattgaaaagaccggacccagttttatactaaagatcgatttcctcaacctgaccaagaatctcaaggatgtgctggcaatcagcgaaggcacaggcggacttgggtctttaatgggcatttacgagatttacatgaagcccttcaagggtgagggcaagaaacatccagtcatcatcctgattgataacgactcaggctcaaaggagataatcgagataatgaagcgcaaaaaaaagtgggacccatcgaagccattcgcttttttcactgagaacttatacgtggttcacatctcctcagaatctgggaccagtgagatggccattgaggatctctttgatgatcagacccagaataccactgtggacggaaaaaaattcaaccgcaagcccaagatagacagtgcaagcgaatatggcaagatagtatttgccgagaaagttatccgggcaaacgagaacagcatcaactttgacggctttaaaaaggtgcttaactcctttaaagccgccacgcaggattacaataaacggataacagtgtga

SEQ ID NO: 8075 - RNA, 1161 nt, synthetic construct
  source 1..1161: mol_type = other RNA
atgagcaaactcgagcgtttgcgagaagccaagtccttatctgacctcgccaatctgctggggtacaagcccaaggcagtctcctacattctgtataagattccgagtgagaaaaaatacagcgcatttactatcccaaaaaaaactggaggggataggcggataaaagccccaatcgatcctcttaaagacctacagggccgcctcgcagatctactcaacacatgtttcgatgagatctgcattaagagcaaacataaacgatccctgagttatggttttagaaagggcgagtcaatcgttactaacgcaattaatcatcgcaacaagaggcacgtatttaacgtggacctgcaggatttctttccctctatcaacttcggccgcgttcgtgggtttttcattaagaacaagcacttcgagttagaccctgacgtggccacagtcattgctcaaattgcttcacacgaaaacgagttaccccagggatcaccttgtagcccagtcattagtaacctcatagggcacctgttggacatcagaatggttaatctggcaaagaaagctaagtgcacgtactctagatacgccgacgacctgacctttagcaccaaccggaatgaattccccgagatcatcgctatgccggagaaatccggtagcaatatatggcttgctggcgagactttggagaaagaaataaagaaggtggggtttaccatcaacaaaaataagaccacaatgcagtacaaggcccggagacaaatggtcacaggcctggtcgtaaacaagaaaatcaatgtgaaacgggaatactataagcacgcgaggtcaatgtgctattcgctgtttcagtctgaccagtactatattgacaagcatctgaccatcccctccgccggaacgacaatactggacgatggagctgcggataaaaagtctgaacctaccaaggagtatgaaaagatcgtgggaaatatggcccagcttgaaggtatcttgaacttcatctattacgtgaaggatatgcatgataagagggaaaagcgggagaaaagaaaaaataggagtgccatggtggagctgtaccgcaagttcctcttctataagtacttcttttccgtggagcgaccacttattgtgtgtgaaggcaaaaattga

SEQ ID NO: 8076 - RNA, 1752 nt, synthetic construct
  source 1..1752: mol_type = other RNA
atgagttccttggaaaagctaaaaaaagccgtgacactcagcgacttggccgtactgttaggctacaaacccaaagctgtgtcttacattctgtacaaactttctctcgaggaaaagtataccgtatttaccataccaaagaagggaggcggagagagaaccatcaaagccccgacagagcaactgaaacgtcttcagaaacgactcgcagaccacctgggcaaatgctatgaggagatctacacgaaaggcccacataaaaaccccctgtgtcatgccttccgcaaaaagttctctatcgttacaaacgcagaaaatcatgttaaccgcaggcatgtgttcaatgccgacatcaaagactttttcccaactatacactttggtcgtgtccgcgggttttttattaagaacgtccatttcaccttggaacctaaggtggctacagtgattgcccaaattgcctgctgcggagacgaactgccccagggatcgccatgttcccccgtgattagtaacctagttgcaggccacctggacatcaggatggctaccttggccaagaaagccaagtgtacctactcccggtacgctgatgatctgaccttttccaccaaccgaaaagaatttcccgatctcattgcagtgctgaaggagggcagcgataaagagtggactgccggacctgggctcctgaaagaactgaaaagagctgattttaccattaatgagaggaaaacatccttacaaaactctactggaagacagatcgcaacagggctcgtggtcaatgataaggttaacgtcaggagagagtactataaacaggcacggagtatgtgttactccctctttctaaatggtgatttctaccggggctctcaccatgtaagcacgatcgaacagcccgttgcgagctctgatgtacaggcggaggcttccgccgaaaaacacgctaagtccgggacattgaattatctggagggtgtgttatcgtatatctactccgtgaaggcgtcacacgaccagaggaaaacctgtgccaagagatcatatccaagcgcagtcatgaagctgtaccgccagttcctgcactataaacactttttcgtgcttcagaagcctcttatcatttgcgaaggtaagacggacgtgatctatcttaaatgcgccctgcggcagttagggaagagccatcctagcctgatcaaactgaatgggaaggagttcgtgtatgaggtcagtttcttgaacatgagtaagaacctgaaggaggtgtttgcgatgtcagaggggaccccaggattggccagcataatggagaacttccacaaaaacatggcaggcttcgagggtgagggaaagaagcatcctgttatccttctggtcgataacgatagtggcgcaaaggagataaagaagaagattgatcacaagaatccggcaaagacttttcaccggtacgccgacaatctctatgtcatccttatccccaataagccgggccaagaagaaactgctatcgaacacctgttcgacgctaagacactgtctactactattgacgggaagaaatttaattcaagcgccgagctcaatcctaagactgaatatggcaagatcgtgttcgccgagaaggtgataaaggctaaccagcagaatattgacttctcaggttttgatagcattctccagcaattcgaagctgttattgtggactacaacaaacagcaaacacagtctgtcacgtcatga

SEQ ID NO: 8077 - RNA, 1710 nt, synthetic construct
  source 1..1710: mol_type = other RNA
atgtcaaacctggagcggcttcaattagccacaaccctgtctgatttggcagacatcctaggatataagcctagcgcgctgagctacatcgtgtataagattccatctacaagtaagtacaccacttttgatattccgaaaaaaagcggaggcacgcgactgattaatgcacccgacgaacgtctcaaacgcctgcagaagtcgctcgcgaaactactgatgaagtgcgaaatcgagataaacgataaactcaaccacaagaacaatatatcccatggctttaagaagaagtttagcatcatcaccaacgcaattccccacaagtcaaaacggcacgtgttcaatgtcgacctgaaggatttcttcccatctataaatttcggtagggtgagaggcttctttatcaaaaacaaacactttcagctgtgtgataagattgccactatcatagcccaaattgcctgtcatgataattcgctcccgcagggatcaccatgctcccctgtcatctccaatttggtcgggcacctgctagatatcagaatggtgaacctggctaaaagagctaaggtgacctacactcgctatgccgatgacttaacgttctccacgaataaaaaagagtttccttgcttgatagcttacaaaaagagcgggagtgacagtgaatggctcccctctaaaaaactgacaaaggagatcgacaaagtgggcttcactctgaatagcgacaaaattagcatgcaatataagacatctcggcagattgctactgggcttgtcgtgaacaaaaaggtgaacgtgaagagagagtattacaaaaagacaagggccatgtgtcatagtctcttcaggaacgatgaatactacttcgaaacattggacccagctacaaagaccattgttaagagccccggaaattttaaacaattagagggctacctttccttcacataccaggtgcggtccagtaataaactcaggaaggataagcagaatcagaagaagaactttatcggcaacattaagaagttcaacggaacatcaaataccgccaagatataccgagattttctgttttacaagcattgttttgccctggaaaaacccttgataatttgcgagggcaaaaccgaccgcatctaccttcaatgtgcgctgaagaaactcgcttcagcctatcctactttaattgacactactccagcagtgtcataccttatcaccttccttaacaagaccaaaaactttctgaacgtttgcaacttggctgacgggacgtctgggctcgaaggtatcatggataggtacgagaaacagatgggttattaccacggcactgggcagaaacaccctgtgattattttggtggacgatgacaagggagcaaaggagatcaagaagaaaatcatcaagaagaatggaaaggttgaaccctatcagaaatataccgacaatctgtatgtcgtctttattcctcgcgtatcctctaaaaataccgcaatcgaggatctctttgatccaagcgttctggcaacagtgatcgacggcaagaccttcaacaaggagaacgacatcgacagagataaagagtattccaagcaggtattcgcccataaagtcgtaaaggctaatcaggactccatcaatttcgacaacttccgtggtgtttttgatctgttcctggacgtaattagtgactatgcctga

SEQ ID NO: 8078 - RNA, 1371 nt, synthetic construct
  source 1..1371: mol_type = other RNA
atgactagattagaggctctgcataatgccaagagcatttacgatctttctaagttgcttggtttcaaggctaagtccatctcatatttcctctaccatagcactgaggaaaaatattataccttcgagatccccaaaaagaacggggaatttaggaaaatccaggctccaacggataagttgaagaagctgcagtctagactggcaaccctgttaagcgactgctttgaagaaatagacagaaatcagggctaccccaactccctctcacacggattccggcgtaaacactcgatcatcagtaacgccaacttgcacaagaacaaaaggtacgtgttcaacatcgatctgaaggatttttttcccaccttcaattttgggcgagtgcgcgggttcttcattaagaacaaacatttccagctgagcccaaaaatcgccacaattatcgctcaaatcgcctgtttcgataacggcctccctcagggctccccttgtagtcctatcatcaccaacctgatcgcacaccttatagatgtgcggctggtcaatcttgcgaagcatgccaaatgcacttattccaggtatgcggatgacatcacattctctaccaatagaaaggactttccaaaagaaatagcgtacaaaaccaacgccaatcaatgggtagtcggaaataaccttaatgccgagatcactaagctcggcttcaccattaatgacaaaaagacaaacatgcagtaccgaatgagtagacaggttgctaccggcctaattgttaacgagaaggtcaatgttaaacgcgaatattacaaaaaggcccgggcatgctgccagcttctctttgaaattgatgacttctacttgtccgagggcaagagcgggagtctgaaccagctggatgggatcctcaatttcatttaccaagtgaaaagaccccacgacaaggagaatatcggtccccggcgatttaaacccaatgccattactaaactgtaccgcgagttcttatcttatcgtcactttttctcaggagataagccgctgattatttgtgaaggcaagaccgatattacatatctgaaatgtgcactcaaacggctccaccctgacttcaaccaattgatcgagtttaaagacggaaaaacaaagcacaaggtgtcctttttgcgcttttcagacaggctgaaggatgtatttgctataagcgaggggacacctggactaactgccctaatggagatgtatgcagacctgctcaagcgctttaaaggtgtgggactgattcatccggtgataatagtcctggacacggactctggcaataaggaaattaggaagaaactggaggagaagacatacgaatttccatga

SEQ ID NO: 8079 - RNA, 1785 nt, synthetic construct
  source 1..1785: mol_type = other RNA
atgtcagatttagagaagctgaagagctgcaagagcttgaacgatctggctgtcgttttgaaatacaaacccagcgcactagcgtatattctgtacaagcttccagattctcaaaaatacgaggaattcaccatacctaagaagtccggtggttctcgtaagatcagggccccgaaagagagactcatggcccttcagaaaagactctcagaagtgctcaacaactgctactctgaggtcattaaaaactatgggaatcctttgagccacggcttccggaaagactgttcaatcgtgacgaacgccctgctgcacaggaatagacgcttcgtgtttaatatcgacctcaaagattttttcccatccattaacttcggccgtgttagggggttctttatttacaataagcacttctcccttgagccaaaagttgccactgtaatcgcccagattgtctgttacgacaatgagctcccgcagggatctccatgttctccagttgtgagcaacctggttggccacctccttgacattaaattggtgcagctggctaaactgcataaatgcagctacagcaggtacgctgacgacatcacattttccacaaataagaaggacttccccgaagagatagcgtacatagccgctgggggagattgggaaccgggtcctaagttaaccgcaactatcaataagatggggtttgccgtgaacgagagaaaggtaagtatgcaatccaagacccgccggcaggtggtaactgggcttgtcgttaacaaaaaggtcaacgtgaagaaggagtattatcggattgctcgagcaatgtgccacagtctctttaacaacggctctttttacatctcaacaatgggcaatgataccacacagagtgggacgattgattcaaacaataactgtaccgcgaagcagttagaaggcatcctgagttacatttatatgattaagggcgtgcatgacagtcgcaccaatgtagaaaagcgaaataagcccgcaagcattatgaaagcatatcgccaattcctgttttataagcatttttaccaggccgagaagccagtcctgatatgtgagggcaagaccgaccatatttatattcggtgcgctctaaaacagcttcatcaacattaccccgcactgatcgagaaaacgacagagggatggagctggaaaatcactttcctgaaaatgtcggaaaattttagggaagtgctgtctatcgccgaaggaacgtccggactagccgcactcatggacatgtacaaaaagaacatcggaatattcaaggatggtacaggaaaaaagcaccccgtcgtcatgttaatcgacaatgataagggcgccaaggaaatcaaatcgaaactgaagaagactgaggatgggaagggctataaaccttattttaccgagaacctgtacgtgatgacactgccccagggggccaacggggaagaaatagaaatcgaggatttgttcgacaaggatctgttggagacaaaagtggctggcaaatccttcaataagaagacaaaaaccgacaccaaaaccgaatattccaaaatcatcttcgctgagaaagtgatcaagcccaagcagcacatcattaacttttccaatttcatgcctgtgctgaatcacctaaatggcatcatacttagttatcagcacctcaagggatcagctcccaccgaaaaggagactgaggccctcaacgtcctgctgccaactcagactcctcaacctcccatttacgtgcctggtgtgtga

SEQ ID NO: 8080 - RNA, 1680 nt, synthetic construct
  source 1..1680: mol_type = other RNA
atggcgcgtctcctcgggtttcggcctaaagctctgtcatttttgctgtacaagctacctgacaatagcaagtataccacatttaagatccccaagaagtcaggtggagaaagagaaataaacgcacccgacccccgtttgaaagggctgcagaaacggctggctaaccttctccaaaattgttttgaggaaatttacggcagggaaagatataaccattccctatcccacgcgttccgaaaagaccacagtataatcactaacgccagggcccacaagaacaagaggtacgtgttcaatatcgatcttatcgatttcttcccttcgattaattttggtagggttcgaggctactttatcaaaaacaccgacttcggactgcatcctaatgtggcaacagtgatagcacagatcgtatgttataacaatgagctgccccagggatctcccacgagtccggtcctctcaaatctgattggccacatactggacgtccgattagtgatcctggctaaaaaaaccaagtgccagtattctagatatgccgacgacatcacattcagtacgagagagaagcagttcccgagtaccattgccacacaggatgatgccgggtgctggcatcctagctcaaagctcttgtgtatcattcgcaagtctggctttgaagtgaatcacaacaagaccaccatgcaacatcatgcttataggcaggtgacgacagggctcgtcgttaaccggaaggtaaacatcaaggcttcttactacaggcaagcacgggctatgtgctcctccttattcaagactggcgcattttacatcgggactgaggtacgtaagggtcgcagcgcaagtatttctggaaaagacctgggctcaattaatgtactgaggggcgtgttatcccatatctacaacgtgaaacgcctgaacgataaacgagatcagaaagagcggtggggcaagccaacagcaatccacaagctttatgagaagttcgtcctgttcgaaaaatttcacaacctgagaaagcctctcattttctgcgaagggaaaaccgattccgtttacttgaaatgcgccctttatagcttagcctctgagtatcccgatttgatccaagtgtctaacggggaggttaactacgccatagactttttcaagcactcgaagagcaatcaggacctgctacaattctccggtggcaccggagatagccggtacctgatcaaggattacaacaaaaagatgaagccattcctttgtaagggaaaaagatttccagtgatcattctggtcgactccgaccagggaagcaagaaagtgtttagtgctgcgaaggaggtgataggcaataatgagaacgtcactggcgacgaggacttttattacatcacacagaatctgtacctgatagcccttccaaagatcaacaatgtgtcctcagttgctattgaggacttctttgagaaaagcgttcgggaaactaaaattgatggaaaaagcttggccaagtccaatgaatctgacaaccgcaaatactatagcaagcacatctttgccgagaaagtgatcaggccaaataagggtaaaattaatttcgagcgcttcaaggggattctcgatagaattctcaaagtcattcaggattatgaaagtcgcagagaaactaaatcatga

SEQ ID NO: 8081 - RNA, 1746 nt, synthetic construct
  source 1..1746: mol_type = other RNA
atgagtgtcctccaaaagctcaaggacgccaagtcactgaaggagctggcgattctcctttcttttaagcccagccgcgtttcctatctcctctacaagctcgatgccgagaaaaagtattcgaagtttcagattccaaagaaaagcgggggcattagagaaatccaggcgccagaacccaggttgaaagcactgcagaaatccctagccgacctgctgtatgagtgtaccctggagatcgagtctaacggcaaaaagcgaccatctttgtcacacggcttccggaaacatcatagcatcgtgaccaacgcccggggacacaacgggaggaggtatgtcctgaatgtggatttagagggcttcttcccatccattaattttggccgggtgagaggcttcttcatcgccgataaatccttttccctgaatgagaaagtggcaaccgtggtggctcagatagcctgtttcgagaataaacttccccagggctctccttgctcccccgtaattagtaatttgatagggcacttgctggatgtacggttggtacgcttggcaaaagcccaaaagtgttcatactcaaggtatgccgatgacatcacttttagcactaaccagaaaaacttcccacccgctatggcggttcaagatgaaaagaacccagagaaatggatcgccggcaccaccctcagcaaaacaatcgagaacgcttggttcaaagtgaatcatgccaaaaccagactgcagagtcgaacaaaacgccaaagcgtgactggtgttgtggtcaataagcatgttaatgtggaagcttcgtactataaaaacgtccgcgcaatgtgccacagcgtgtttgcaaaaggtgaataccacaagccgattgttaagtccggggacccctctaagggagcagagccttccggacctgaaatgctgaaaaacatagcacccctggaggggatgctagcccatattgactacgtcaagtttgggcgcgactcaccacggtcaacggtcgagaacgcgagtggaaagtcgaggccccctgctacaaggcgactgtacgaaaagtttctgttcttcaagcactttgtctatctagacaagcctctagtgctttgcgaaggtaaaactgataacgtctacttacacgcagccatccgacagttaaaggctcaccacagcacgtttatcggaggcagcgaccagaagcctgagatgaaaatccgtttctttaagtacagtagaactagcaatggtatcctggggctgaatggtgggtctggacacttagcaaatctgatcgcctactactctaagaatctgaaggattacaactttgcccctctccttcagcctgtgattgtgcttatcgacaacgatgacggcgctccgccaattttcaagaccattaagcagaactacaaagtgacaatagatcatagtagcgcggaccttttttaccggatctgccataatctttatctcgtcaagactcctgaaaaggctaccacatacaaatcttacattgaggaactgttcgacgacacagtattgcagaagaagctgaacggaaaaacattcactacgaagaaagactatgataaagctacccaatatggaaaggaatacttctccaagtatattgttagacccaacgaggcttcaatcaatttcaccaagtttagtccgctgctcgaccgtatagcctccgccgtgtctcattatggcgccgctgcagataaatga

SEQ ID NO: 8082 - RNA, 1770 nt, synthetic construct
  source 1..1770: mol_type = other RNA
atgttcaaactccaagccctgagggatgctaagaaactggaggacgtcgccagactcgtcggtttcacaccaaagggactgagctttgtcctatacaagctgcctgactctaaaaagtataattccttcgagattgccaaacgtggaggaggcaaacgacagattaaggcccccgagcccagtctctctttgctgcagagacggctcgcaaccctgctgaccgagtgtctcgaggagttgaagaaggccgcgcctccccgaagatctctagcacacggcttcgaaaaaggacgcagcataattacaaacgcccagctgcacaaacgtcgcaggtatgtgtttaacgtggatctggctgatttctttccttcaatcaactttggaagggttcgggggtttttcatcaacgacaaaaactttagtctgcaacctccggttgctacagtgcttgcgcagatagcctgtttcgagaatcaactcccacagggttctccatgttcaccagttatcagcaatctgattggtcatgtgctcgacgggcgcttagccaggtttgcaaagactcacaaatgcacctactcgcgctatgtcgacgacattaccttctcaacgtcacggaaacattttccacccgagattgggacacctatcgctgggactgctgcctggcaggctagcaatgaacttcgatctcgcatcgaaaatgcaggctttaagatcaacgacaagaagacaaggatgcagtatcacgcctccagacaggtggcaacaggactggtggtgaacgagaaggtcaacgtgaggcaggaatatttcagagctgcacgaaatatgtgcgatgctctatttaaaaccggaagttacttccggatggtcccagctacactgaccggcggcgctgtaggtgatcccccagtaaagaatgtcataacaagccataaccagctcgggggaatgctcgcccatatttaccaagttaagaatagcaccgacttgcgcgccgatgacgtgaaaaaagcgaagcccactgccacccggagcttgtacttcaggtttctgttctacaaaaacttcgtcgcgaacaaaactcctgttatcgttcccgaggggaagacagataccgtttatctgcgggctgcaatccggtatagttcggcgtaccaccctagactcggggaattaaaatccgggaagttggagactaagattaggttcatgaatttctccaagatcgtgcacgatgtgatgcagcttgggcacggcacttccgaacaaaaatttttgatagcggattacgaacggaatcttagaggctacagacatgcccccctggctcacccggtgatcgtccttttcgataacgacgatggagccaagagtctgtttggttatgccaagaacaagcgccactctaagatcggcctggactctaccgacccattttactacttgggctacaatttgtatctggtaaagacccctgaatttgggggaggcaagaagtcctgcattgaggacctattcccctcaggcctgcttaagacgattatcgacggtaaagtgtttgaccctaacaaagaacacgaggaagctggcaaatatggcaaggtggtgtttgccaaacaggtggtgacgcccaatgccagcactatagatttctccggcttcgctccgctgctggaccgtatcgtagccgtactcgatcatcatgcaacgttaaaaaaggcaccacctgccccgttagcagcagcccttgtggcaacttcctga

SEQ ID NO: 8083 - RNA, 1575 nt, synthetic construct
  source 1..1575: mol_type = other RNA
atggatgccgaccatccacgcagtggtgtacttatcgcatctcgttctactaggaagcaggagaatagtagattctggtttgcttcccacggcttccataagggacggacaatcatctccaacgcggaggtgcatcgccgcagacgcttcgtctttaacttagacctggaggatttcttcggaactatcaatttcgggagggtgagaggcttcttcatccacgacaccatgttttctttagaaccaaaagtcgccaccctcatcgcacagatcgcgtgccacgaaaatgcgcttccccagggttccccatgtagcccggtgatctccaatctaattggaaatatcctcgacagcaggctcttggccttagcaagagacgcgcactgtacttatacaaggtacgctgatgacctgacattctcgactaacgaaacactattccccacggagattgctgtgaacgtgcacggggcagattgggaggtcggcgtgaaactgcgtaaaacgatagaaggcaccggatttttcatcaatctggccaaaacccggatgagtttacggcaatcccggcagacagtgactgggctggtcgtgaacgccaaggccaacatcaatcaggattattacagagccgcccgagctatgtgcaacagcctttttcagactgggtattatttcaggcccggagacaaccccgcctcagctacagataagttgggcccactagacggtactctttcccacatacacttcgttaaggcacgccgggaccgccaccctaaagtcaataaactggccaaagccgcgggggaatttcatccccctagggccccagaggagctgtaccgaaagttcttgttttacaagtactttgcagcgccaacagctcctctgattgttacagagggcgtgagcgatataacctaccttcaatgtgcaattcgtgccctcgttaaaaagttcccgttgctggccgaggaagtcgacggcaaggccgttaggctcgtgcattttctgaaaagctcaggcaccagcagagaattgctgaatttgggccatggagctgctggacagggagccctgattagccgatatgagaacatgctcgaggattttaagcacaaacctatggcccaccctgttattatactctgcgacaatgacgacgggctgaaatcggtgattaagaacgccaagagtaagatctcaaagattgtctctacgacgaccaccgatcccttttaccacctcgggcttaatctgtacctggtaaaggtgcccgaaggcgcaccgcccgttgataaggatattgagtcactgtttgatcccgcactgctcgccacactgctcgacggtaagaaattcaaccctaaaaaggagcatgctgaccataccgaatatggcaaagtaatctttgcagaagccgtagtgagagccaacgccggcaccgtggacttctctggttttgaggggctgctgactcgaattgaagatgtgcttcggcactatgctgccttgatgaccgctgctgcaatacctgcagcagctgcaccaggagctgctgccgctccttga

SEQ ID NO: 8084 - RNA, 1770 nt, synthetic construct
  source 1..1770: mol_type = other RNA
atgagcagcttggaaaaactgcagaaggccaagagtctaaccgaccttgctaagctgctcggctttactcccaagggagtgagttacgtgttgtacaaaatggatgcagccaaaaagtaccgttcattcgacattcccaaaaaatccgggggtgtccggactatccatgcacctgagccgcaactcgctttgttgcagaccaggctggcggaactgctgtatgcctgcgtgcacgagaaaaagaagacagacagacggttttggttcgcttctcacggctttcatcagggacgaacaattgttagcaacgccgaggtgcatcggagaaggcgattcgtattcaatcttgatctggagaatttctttggcaccatcaatttcggaagagtacgcggcttcttcattcacgactcaatgttttctctagaacctaaggttgcgacaatcatcgcccagattgcctgccatgataacgcactgcctcagggttcaccctgtagccccgtcatttctaatctgatcgggaacattcttgattcgcgattgcttgcactggccagggatgctagatgcacttacactcgctatgccgatgacctgacctttagcacaaacgagaaactcttccctaccgagatagccgtgaatgtgcacggggccgactgggaagtagggaaaaagctccgcaaggaaattgagaaatccggcttcttcatcaacccagctaagactagaatgtccctgcgccggtctagacagacggtcaccggccttgtcgtcaacgaaaaagccaatatcaaccaggattattacagggccgccagggccatgtgtaattccctgttccagacagggttttatttcaagccaggagacgatcctgcggacgccaccgacaacctaaatccattggagggtacactcagccacatctactttgttaaagctcgtcgtgataggaagccccgcgtgaataagttagcaagagctgccggggaattcaatcctccacgagcaccagaggacctgtaccggaagtttctcttctacaaatattttgcagcccctaaagccccgctcatcgtaactgaggggatttccgatatcacatatctccagtgtgccatccgggctctggttaagaaatttcccctactgggtaaggaggaagatggaaaggtgattagactggtgcacttcttaaagcccaccggcacctcgagggacatattgaacctgggacatggtgctgccggtcaagccagtctgatatcctcttacaccaacaacctgaagaactacgcgcataaaccaatggccaatccagttataatcctgtgcgacaacgacgacggacccaagacagtctttaaaaacgctgagaagaagggcggaaccaaaattactactacgacaatcgatcccttctactatctcggcgagaacctctacttagtgaaagtccctgaaggagcaactccacacccccgggaaatagaagagctctttcaaccggccctgcttgcgaccaaattaaatggcaagtcattcgacccgaaaaaagaccacggcgatgatacgcattatgggaaggtggcgtttgccgagagtgttgtgagggcgaatgctagcacggtggacttttctgggtttgagaagctgctcgaacgcatcgaggctgtgcttaagcactatgccgctctgttagctgctccagccgcaccagctgcagcacctgcagctcctgcagcaggcacagcaaccccctga

SEQ ID NO: 8085 - RNA, 1758 nt, synthetic construct
  source 1..1758: mol_type = other RNA
atgtcccagctcgaacggctgaagcaggcgaagaacctgacagatttggccaaactgctggggttcacccccaccggagtgtcgtttatactctacaagatggatcccgccaagaaatatcggagcttcgacatcccaaaaaaatcaggcggtgtgagaacgattcatgcccccgaggcacagctggcccttcttcagtccaggctagccgacctcctgtatgcatgtgtcagaatcagaaagaaagaaaacgcgcgcttctggtgcgcttctcacgggtttcatcagggcaggaccatagtgagcaacgctgaggctcatcgcaggaagcggttcgtattcaatctggacctgatggatttcttcggcaccataaattttggtcgggtaagaggcttttttatacatgactccatgttcgggctggaaccgtccatcgccacattgattgcccagattgcctgccacgataatgccctgccccaaggcagtccttgttcacctgttatctccaacctgattggcaacattctagacgctcggttattggcccttgccagggacgctcgatgcacttacacccgctacgccgatgatttgacattctcaactaacgagaaattgttccccagcgagatcgcagtgaatgtgcacggggcagagtgggaggttagcgccaaactcaagaaggccattgaaaaaactggtttcttcatcaatcctgttaaaacccggatgagtcttagacgttctcggcagacagtcaccggactggtggtgaatgacaaggtgaatgtctcacaggactattacagggccgcacgcgccatctgcaacgctctatttcagacagggaagtaccataaacccggagacgacctcgccgacgcttctgacaatctgaatccggtggagggaatgttgagccacatctactttgttaaggccagaagggatagactgcccaaggttaacaaactggcgaccgtggctggcgaatttcgctctcctagggctccagaagagctttaccgaaagttcctgttctataagtactttgcagcccctaaggccccactcatcgtgactgagggggtttcagacataacatacctgcaatgtgccatccgtgcactcgtgcaaaagttcccgctgttagcaaaagaggaaaatggcaaagtagtgcgtctcgtccactttctgaaaagttctggaacgagtcgagatatccttaacctaggtcatggtgctgcggggcaaggcgcgttaattagccagtatgaaaacgctctcaaaaagtatccccacaagccaatgagcaacccagttattattctttgtgacaacgatgacggcctgaagtccgtcatcaaaaacgccaagagtaagattggaaagatcgtgtcgactacaactacagattccttttatcacctcggcctgaatctctaccttgtaaaagtgcctgagggagtgccccctgcagataaggatatcgagtctttgttcgatccagcattactgaccactctgttagacggaaagagctttaatccaaagaaagaacatgccgaccacaccgaatacgggaaggtggtgtttgcagaggcggttgtccgctctaacgctggcgctgtcgatttttcagggttcgaaggtctgctgacccgagtcgaggatgtcctcaaacactatgccgcgttgagcgccgctacggtagctgcacctgctgcaggagctgcatccgccgcaaattga

SEQ ID NO: 8086 - RNA, 1236 nt, synthetic construct
  source 1..1236: mol_type = other RNA
atgagctcccttacccagctgcaacgagctaaggatctggcagacctcgccaaactactcggcttcacacccaaaggggttagcttcgtgctttataagatgggggagactaagaagtataggtcattcgagattcctaaaaaatccggtggctttcgaattattcatgcccctgagccccagctcgcattgctgcagcgtcgtctcgcaaagtttctctatgactgcgtacaagagaggaaaaagaaatacccaaggttttggttcgccagtcatggatttcatcaaggaagaaccatagtgtctaatgcggaagttcataagaggcggagattcgtgttcaatatcgacctggaaaactttttcggaatgatcaacttcggacgcgtgagggggttttttctgcacgactccatgttcgtcctagaacccaagatcgccaccattatagctcagatagcctgccacgagaacgtcctcccgcagggatcgccttgttcaccagtgatttctaacctgatcggtaacatcttagactcaagacttctggccctggctcgcgatgctagatgcacatacactaggtatgcggacgacctgacattttcaacaaacgaaaagtttttcccaaccgagattgccgtaaacgtccacggggccgattggcaggttgctagcaaacttaaaaagaccatcgaaaaaaccggctttttaatcaatcctgcaaagactagaatgtccctgagaagaagccgccagacggtcacaggcctggtggtgaacgataaggtaaatatcaatcaggactactaccggaccgcccgggcaatgtgtcacaacttgtttcatactgggttgtatttcaaacctggccacggtcccgcagatgcgaccgataatctgaatcctctggagggcacgttgagtcacatctacttcattaagaaacgccgcgatcgttgccagcgagtgaacaagctcgccgaaaatgcgcgcgagttttatccacccaaggccccggaagcactgtatcggaagttcctgttctacaaatacttcgccgctcccgcagccccccttctcataacagagggcgtctccgacattatctacctgcagtgtgctatccgagccctggctcaaaaatttccactacttgggaaagaggaagctggtaaggttaagtctctcgtgaggttcttacggccaagtagcacttctcgggatgtgttgtga

SEQ ID NO: 8087 - RNA, 1773 nt, synthetic construct
  source 1..1773: mol_type = other RNA
atgagcagtttggagaatctaaggaaggcaaagtccctaaccgatttagccaaactgctgggattcactccaaagggggtatcctatgtgctgtataagatagatgccgccgaaaagtaccgttcatttgagattcccaagaaatctggaggcaccagggtaatccacgccccggagccacagcttgcattgctccaatctaggctggcagagatgctctatgcatgcgttcaggaacgtcagaaggtgaacaggaggttttggttcgccagtcacggcttccatcagggccggaccattatttcaaacgctgaggtgcataaacgccgacgcttcgttttcaatctggaccttgaggactttttcggcacaataaattttggccgggtgcgggggttctttatcaatgaccaaatgttttccctggagccaaaggtggctactattatcgcacagatcgcctgtcatgacaacgccctgccgcagggatcaccatgttctcccgttatcagcaatctgatcggtaatattttggacagcagattgctcgctctcgcccgcgatgcgcattgcacctatacccggtacgcagatgatctgacattctctactaatgagaaactctttcccacagaagtggctgttaatctccatggtgccgaatggcaggtaggggttaaacttaagaaggcaatcgaaaaaaccggcttttctataaaccctaccaagacgcgcatgtccttcagacgaagtcgccagaccgtgacagggctggtggtgaatgacaaggcgaatatcaatcaggactactaccgcgccgcaagagccatgtgccacagcctgtttagaaccggatgttattttaagcccggcgacgacgccgcaaatcccacagataacttaaacccccttgaaggcgctctgagccacatatacttcgtcaaatccagacgagatcggaaacctaaagtgaacaaggtcgccaaggccgcgggtgaattcaacccccctagggctcccgaaaacctgtaccgtaagtttctgttttataagtacttcgccgcccccactgcccctattattgtgactgagggaatttcggatatcacttatcttcagtgcgcgattcgggcacttggaaagaaattcccactactggctaaagagcagggcggcaaaataacaagacaggtgcacttcctgaagccctctggaacgtcccgagaaatcctgaacttaggccatggcgctgctggccaagcgagtctcgtttcttcctatacttccaacctaaaacactacactcataaaccaatggctaatcctgtgatcatcctctgtgataacgacgacggtcctaagacggtattcaaaaacgctaagaccaaggctggggtcgccatttcgaccaccaccgcggatccattttactacttgggggacaatctgtacttggtcaaagtgcctgaaaaactggccgctatccctagggagatcgaagatctcttccaaccagcactcttggggacaacgcttaacggtaagacattcgatccaaaaaaggaccacggagatgccaagcactacggaaaagtggcctttgccgagagcgtggtcagaccgaacgccggaaccgtcgacttcagcgggtttgaggacctcttaactcggattgaggacgtcctgaagcactatgctgggctgagtgcagctagcgcgatgactacactgaacacatcagccgtcgccgctggtacatcagcagcaccttga

SEQ ID NO: 8088 - RNA, 1725 nt, synthetic construct
  source 1..1725: mol_type = other RNA
atgtcccggctgcagagcttgcagcaggccgaaaacctcgatgatcttgcgaagctactgggtttcagtcccactgggttaagctatgtgttataccgcataccagaggacaaaaaatacagggtctttgatgtgccaaagaaaggcggaggtgtgaggattatcaaagccccgaacgaccgtcttggcctcctgcagcttcgccttgcagagctcctcagcgactgcggagaagagatccgcaagaagaaacaaaaccactggcattctagccatggtttccgaaaaggccgaaatataattagtaacgctgatgcccatcgccgtcggcgcttcgtgttcaacctggacctcgaggattttttcggaaccataaactttggacgggtaagagggctgttcattgccgataaagctatggccctgaggcccaatatagccaccttaatcgcaaaaatcgcttgtcacgacaatgccctacctcagggctctccttgcagtcctgtcatatccaactttgtcggcaacattctggactcgcggatgcttgctttggccagagacggccggtgcacctatactcggtacgccgacgaccttacgttctctacaaacgagaagatctttcccaaggagatcgcagttaacctgtttggcgcagactggggaatcggggaaaggctgagaaaggaagtggagggcgccgggtttcagatcaaccacgggaagacccgcatgttcttgcgccaatcaaggcagactgtgactggcctggtagtaaatgcgaagaccaacattaatcaggattattaccgtaccgttagagctatgtgtcactctgtgtttaagtcagggacatatcatcgagagacacctgccggagcaaaaacaaccacgaacttagcccccctggaaggcatgctgtcccacatttacttcgtgaaggcaaggcgggacaggacatacaagaataactcggccgctagggacgctggagaattccgaccacccgaggctcccgtgcgtctatacgataagtttctcttctacagacggtttgtcgccttgcctgcccctctgatcgttcctgagggcaaaacagataatgtctacgtgcattccgcaattagaaatctcgtatctagtttcccaaggttgggcacgatgtctgggactaagttcgaatgcctggttgacttcctgaaaccaacacctatcactaaagacgtcatgaatatcggacatggggcctccggtcagaacgcgctgattagcaaatatgcgaagcaagtgaaaagatatccgcacaagcccctcgatcaccctgtgattatcctgtgtgataatgacgacgggcccagagcggttttctcatccgccggtagactggcagggaagacaattactaagcagaccaccgatccattttactatctcggcgataatttgtatctcgtcaaagtgccagaaggaactccggctaccgaccgagatatggaggatctgtttgatccggtgttgcttgcacaaaaagtcggaggtaaaccatttgacaagaagaaggagcacggtgacggcaccgcttacggaaaggaaattttcgctaatcagatcgttagaccaaattggcagacagtgaattttgagaacttccgcgagctgctggaaaggatcgaccaatgtatcacggattattcaagccggaagcccgcagggagcccctga

SEQ ID NO: 8089 - RNA, 1734 nt, synthetic construct
  source 1..1734: mol_type = other RNA
atgaaaaggctgaaagccgctaagtcccttgatgacctggcactgatgctgggatttacgccgaagggactggcatacattttgtatgtaatggccgatgctgccaaatacagtacgttcgaaatccccaaaaaaaccggcggtagccgtacgatcagtgcacctattccccatctgaaactcctgcagggcagactggccgatctgttgacaaagtgcgtgactgagataagcaaggaaaagaagaattattggagggcctcacatggcttccaaccaggcaagactgtggtgtctaacgctgaggtgcacaagctgagacggttcgtgtttaatctggacctaagcgattttttcgggaccatcaactttggtagggttcgaggattcttcatccgggacaagacatttgagctggatccagctgttgccacggttattgcacaaatcgcgtgccatgataacgctcttccacagggctcgccttgctccccggtcataagcaacttgatcggtaatattctagacgtcagattattggccctagccagagattgcgggtgtacatataccagatatgccgacgatatgactttctctacaaacgaagtccttttcccaacagagatagcagttaatattttgggggcagaatggaccatcggaaagcgcctcgacggggaaattaagcgagcgggctttgccgttaaccccgccaaaaccaggatgagtctacgccgttcccggcaaaccgtgaccggcttagtggtcaatgccaaagccaacattaacatagactattaccgcacagccaggtccatgtgtcacagcctcttcaaaacaggtcagtatttcagacgggatggcgaacaaatcgaaagtctcgggccactcgagggcatcctgtctcacatatactttgtcaagacaaggcgtgacaggggagcgcggatcaacaaacttgctaaggaggctaatgagttccggcctcctgaagccgctgtagcactctacagaaaattccttgcctacaaatactttgtcaaccctgcagcccccgtgattgtgaccgagggcatctcagatatcacttatattaagtgcgccatcagaagcctggggaaagattttcccctgcttgaggagtccaaggacggaacatctaaacgactcgtgaatttcctgcgctcaactcccaccaccagggacgtgttaaatctcgggaatggcactgccggtcaggctagccttgtgtctcagtacgctaagacggtcgctgcctttccttcacgcccgatgaagcaccctgtgatcatcctgtgtgataatgacgacggacccaaaaatgtgtttaagaacgcgaaaactaaggcacacgtggaaatatcccataccacaacagagcagttttattacttgggggaaaacctctacctggtcaaggtacctgagggcgtcccacccgagatgcgagagattgaaaaactgtttactgctgaactgttggcgacccagattgacggtaagtctttcgatatgaagaaagaccatggaaacgaaaatgcatacggaaaggtggtatttgcagagaagatcgttcgcttacagtggaagaccactgacttctcagggttcgctccactgctgagtcggctcgaggcctgtattacccactatcaggcgctcacatccgcccaggtggagactgaggctgttgccgcaaccgctgcatga

SEQ ID NO: 8090 - RNA, 1752 nt, synthetic construct
  source 1..1752: mol_type = other RNA
atggacactctggagcgcctacaaggcgccaagaacctcacagatttcgccaagctgctcggcttcactccaaaaggaatgagctacgtgctgtatcaactcccgaacgacacgaaatatagaacttttgagatccctaagaaggcaggtgggaccaggaccataagggcccctgaacatcgactcgccctgctccagacacggttaggcgagatgctggatgaatgcgtgggcgagctgaagcagcgcaacaggaaattttggagagctagtcatggtttccagaaaggaagaaccattgtgagcaatgctgaagtacacagaagaaggcgcttcgttttcaatgtagatttggaagacttctttgggactatcaatttcgggagagtgcgggggtttttcatcaacgacaagtctttttcgttacacccaagcatcgccacgctcattgctcagatcgcgtgccacgaaaacgtgttgccccagggaagcccttgctcccctgtgatctccaatctcataggaaatattctcgacgctaggctgctagctcttgcacgggacgagcattgtacctacacaaggtacgcagatgatctgacattctcatctaacgagggtttatttccaacccgtattgcagtaaacgtgcacggcgccgaatggaaagtgggtaggaaacttcggcaggagatcgagggtgctggcttcaaactgaatgaaacgaagacccggatgagcctgcggtgtagccgtcagactgtgaccggattggtcgtcaacgcgaaacctaacattaagcaggattattacagaggcgtgcgcagtatgtgccattccctgttccgcaacggagagtatcaccggcgggttgctgagcgcgaagacacaaccaatgcgttgaccccattggaggggatgctttcccacatttactttgtgaaagcccgacgggatcgagcctacaaggtcaacaaactcgccatcgaggcagccgaattcagacctcccagggcgccagttgagctttaccgaaagtttcttaagtataagcactttgtggcccccccagcacctctgattgtcactgaaggaatatcagacataacctacttggagtgcgccatccgcgcccttgctgcatcatttccggtcctggcaaaaaatgatggcggcaaaatcgtgcgccttgtgaattttctaagaccctccggcactgccagggatatactgaatctgggccatggagcgtctgggcaggctgctctgattgggcaatatcgaaatatgctgaaggagtaccgtcacatgcccatggtccatcccgtgattgtgctgtgtgataacgatgacggcccaaaggaggtttttaagagtgcagccaagcgctccggactcacgatcagtacaacaacaactcgtcccttctatcatctcggggacaatctgtatctggtgaaggttcctgagggcgccttaccacagtctaaggaaattgaagaactgtttcagcccgccctactggccacaaaagttgataacaaaccatttgacccgaagaaagaccacggtgacgaggccgcatacgggaaagtcatcttcgctgagaaggtcgtaagaccccactgggcttccatcgacttcagcaacttcacagagttattgtctaggatcgaacaatgtctgacccattacgccgcggtcaagagtgctaccactgccgcacctgctgcagccgcttcttcaccctga

SEQ ID NO: 8091 - RNA, 1773 nt, synthetic construct
  source 1..1773: mol_type = other RNA
atgacgggaattgatctgttaaagcaggcaaaatcgctcaccgatattgccaagctggtgggattcactcccgctggcctgagttatattctgtacaggatgcctgagtctgccaagtaccgggcttttgagatccccaagaggtctgggggtacaagaactatcaaagcccccatgagagagttggctcttctgcagagccggttgaataccttcctcggccagtgcgcagaagagctggcaagagacaacccgaggttctgggccgctgctcatgggtttagaaaagggcgcaccattgtaaccaatgccaatgcccacagatctagaaggtatgttttcaacgtagacatcgctaacttctttgacagcataaacttcggtagagttcgaggtgtgttcataaaggacagggcatttaatctagagccaacagtggccaccatcatcgcgcaaatcgcctgttttgagaacgccctaccgcaaggaagcccttgctcccccatcattagcaactttgtcgcagggatactggacgcccggcttctccgtctggccaaacacgccagatgtacatacacaaggtatgcagatgacctgaccttctccacaaacgagcggctgttcccaaccgaaatcgctagggagcttgctggtccagattggtgcgttggccctcgcctgtctgaagtggtcgaagctagcggctttcaactcaatcccggtaaaacgcgcatgagcctgcgacggtcacgccaaacagttaccggccttgtcgtaaacgaaaagcctaacatcaaacagaagtattacagggatactagatccatgtgctctagcctgttctcatctgggaagtggcaccacggtaccggagttgacgaacaacagacttccaatctgcgtccactggagggccgcctggcacatatatattacgtgaaagcccgccatgatcggtcccagaagcagaataagcacgcggaatacgtccccccgacagctcctgtggaactctataggaagttcctattctacaaacatttcgtggcaaatgacttgcccactgtggtgaccgagggcgtgtcagacatcacctacttgaagtgtgccattcgaagtctgtctgcaaagttcccatccctcatcgggatgtcacgcgggaaactcaaggtcgatttacagtttctcaaccctactgggactagccggtcagtactgaatcttggacatggcgcctccgggcaggcctcattaatacagcagtacagtaaccgacttaagaactataaaaaccgtccccttgcgatgccggtcatcattctctgcgacaatgacgatggccccaaggaagtcttcaagaatgcctccggaaaaacaggaaagaccattagcaaaagtacgacagaccctttttattacttgggagacaatctctacctggtgaaagttcccgagaacggcacacagtcgcgcgatatggaagatatgttcccagcctccgtgctagatgagttactggaaaataagccatttaacaagaagaaagagcacggagacggcactgcttatggcaaggtcatttttgcggagaaagtggtgcggccaaaaacgggcaccagcatctttaatgactttgaggatctgttgactcgaatcatcgcgtgtattgctcactacgcagccattcgggccaccaaagccgctgctagtagtcctgcccctgctttgtcagtgcctactgcagcagcggtggcagccccaacaacgtga

SEQ ID NO: 8092 - RNA, 1770 nt, synthetic construct
  source 1..1770: mol_type = other RNA
atgagtaagctcgaacgcctcaagaaaacaaaaaacctgtctgatctcgcaaagttactcggttttaccccaaagggcttgtcctacgtgatttaccagataccagatacaaagaagtataaggttttcgacattcccaagaagacaggtggaatcaggaccatcaaggctccggtggaccagctgtctctgcttcaatcgagattggccgaactcttgacagagtgtgtcgaagagctgattaaggacaacccacgctactggaccgccagccatggttttagaaaatccagaaccatagtttccaacgccgatgctcacagaaagcggcgatatgtgtttaacgtggatctggctgactttttcggaaccatcaatttcgggcgggtacgtgggtatttcataaaggacaactcatttggtctggaccctgcagtggcaactgttattgcccagatcgcatgtcacgagaacgcactgccccagggcagtagttgtagtcctgtgattagcaacctcgtggctaatatcttggacgcacggctactgaggctggctaaggctgccggatgtactttcactcggtacgctgatgacttgaccttctctacaaataaaagcattttcccttccgaaattgccaaagaactcgcaggggccaattgggaggtcggcaagcagctgcaggacctgattgaaaggtctggatacactctgaacatagcgaaaacccgcatgagtttgcgtcagagcagacaaaccgtcactggcttggtggtcaatgagaaaccgaatatttctaaagactactaccggtgcgtacgggctatgtgccattcggtctttaccacagggtcttggtatagacccgtccaagctgcgggagccgttcctgtcccaactgcatctctaaggcccgtcgaggggatgctctcccacatctatttcgttaaggccaggcgagatcgttcccagaggatgaacaaagacgctggttttataacgcccaaaacgtcaacgcgcctttataaggagttcctgttctataagcacttcgtggccagcccttccccaatgatcgtgacagagggcatcagcgacatcacctatataaagtgcgctatccgagccttagccgccaaatttccgctgttagccagtgttaaaggcggaaacgtgacccctgaggtggccttccttaatccaacggggacatccagatccgtgcttaatcttgggcacggagccagcgggcagggaaacttagtagatcaatacgcatcatcactaaagtgctaccgccatctgcctctcacatctcctgttattatcctctgtgataacgatgatggcccaaaagaagtgtttagcaaggcacagaaaaagagtggagtgcccattagcctgactactacaagctcattctaccatctgggccagaatctgtacctggtgaaggtgccagagggcgttccctcagccaaaagggatatcgaggacctgttccccgccgctcttcttgggcagctcgtagacggaaagccctttgataagaaaaaggcccacggcgatcatactgcttatggcaaagtgatcttcgctgaaaaagtggtccgacccaatgccgccaaaatcgactttaccgcgtttgaagagctgctggaacgcatcgagggctgcattaaacactacgctgccatcgtagcggcaaaagctctagccgcgacagcatcagcccctgcagcaaagacctccgcgaccggtccatga

SEQ ID NO: 8093 - RNA, 1755 nt, synthetic construct
  source 1..1755: mol_type = other RNA
atgtctgaacttaataagctgaaggcagctaagaatctgagcgacgtggctcagttgttgggattctcccccaaaggcctggcctatgtgctgtataaacagaaaccagagcagaaatacaaacacttcgagatacccaaaaaaacgggtggcacccgaagcatctgcgctccgacatctcagctggcacttctgcaggaacggctcggtgagcacctataccaatctgtgctcgagttgaagaaaaaggagccgtacctgtgggctgcaagccacggatttcacaaggggaggacgatcgtgtcaaatgctcaagtgcatcggagaaggcgatttgtgttcaatgttgacattgaggatttctttggtgccatcaattttggacgcgtgagaggatatttcatcaaggatcgcgcgttcgagcttgacccgaaggtcgccacaattattgcccagatcgcttgccatgaaaacgcattacctcagggctccccatgcagcccaattatttccaatctgatcgggaacatactcgatttgcggctgattgccctcgcaaagaatgcaaaatgtacttacaccaggtatgccgacgatcttactttttcgactaacctgaaacggttcccctccaagattgctatctcagttgaacaaggcaaatgggtagccggcgatcggttggtgacagaaatagggcgcgcaggatttaacctgaatagcgtgaaaacacgtatgtcgcatcgacagagtaggcagaccgtaaccggtttaatcgtaaataagaaggttaacatccggcaggaatactacagaactgtcagagtgatgtgtaactccgtgttccagaccggcgtctattaccgacctatcaaggacgaggagacagagcctatctttctgaacaatctgaatcccctggagggcatgctgtctcatatttatttcgtgaaagcacgtcgcgatagacaaccaggcgtcaataagcttgctaagtttgccaacgagctggtggttcccgaggcccctacccaattgtaccgtaagtttctatgttacaagcactttgttgcccttgcgtccccactcatagtgaccgagggcgttagtgacatcacgtacctaaagtgcgcgatcaagtctctgtctaaccagttccccaacctcgtcgaaaacaacaatggaatgcgccaggtcgcaatcaagttcctcaagcctactgggataagccgggatatactgaatttagcgcacggcgccactgggcaggctagtcttattagtaactacgcaaaccagctaaagaaatatacacataagcccatagatcatcctgtgatcattctctgtgataatgacgacgggcccaaaacagtctttaagaatgccaggtcaaagaccggtaaagatgtgagcaaaacgacaattgacagtttctatcacctcgttgaaaacctgtatctcgtcaaagtaccagagggagatccacctggaatcagagagctcgaagatctgtttcctaacgaatggttcgacgtaaaaatcaacggcaaaccattcaaccgcaagaaggaccacggggacaccacagcctatggaaaggtcatttttgccgagagcgtcgtgaggcctaacacccacaaaattgacttcgccggcttcgtgcccttgctgtcaagaattgaagggtgcatcgcccattacaagtcaaggaaactggctgaaatgactaccactgctgcctccgggttatga

SEQ ID NO: 8094 - RNA, 1743 nt, synthetic construct
  source 1..1743: mol_type = other RNA
atgagcacactggaaaggctgaagaatgctaaggacctgtccggcctagccacaatcctgggcttcacacccaagggggtgtcctatgtcctgtacaaactcaaacctgacgagaagtacagaaccttcaaaattcccaagaagactggcggcgagcgcacaattcaggcgccagagcctcggcttgctcttatgcagaaaagattggctgagcacctgtacgaatgcgtggcagaaattcaacatgagtacccccactactggcgcgccagtcacggattccagaagcggaagactatcgtaggaaacgccgccgttcacacccgcaggcgatatgtgtttaatgtggacatagaagacttcttcggctctattaattttggacgggtccggggcttctttatctctgacaaaacattcgcgcttgaaccggccgtggcaaccgttatagcccagatagcctgccatgagaatgctttgccgcagggttcaccctgtagtccgatcattagcaaccatatcggaaacatcctggatctaaggcttttagctctggctcgggatgctcactgcacctatacgcgctacgccgatgaccttacctttagcactaacctgaaagagtttcccgatgagatcgccgttgatcctgggactgggaggtgggaggaagggcatcggctgaggaaggtgatagaggattcgggcttcaggctgaatccaatcaaaacgagaatgaccttgcgtcagtcccgccagtctgtcaccggcctggtcgtaaacgctaagcccaatattgaccaagactactatagacgagtacgtgccatgtgcaactcactctttggaactggacaatatcacagggtggtgggaggtaaggatgaagtgacaagcaacctaaacccactcgagggcatgctgtcatacgtgtatttcgtcaaggcaagaagggaccgaagcctgcgggtgaataagaggagcaaaaacgaaggcgagtttaatccacctagagcaccaatagagctgtaccggaagtttctcttctacaaacacttcgtatcgcctccactgcctttgattgttacggaaggtgtcagtgacatcgtctacattgagtgcgcaattagagctcttgcaaagtcctttccacgactcgccaaagaagaagacggcaaaatcaagagacaagtgaacttcctccgcccctccgacaccacacgagatgtcctgaccttaggtcacggagccagcgggcaggccaatttaattgggcagtataccagctccctcaagaagtatgcccaccagcccatggctcatccggtcatagtgctgtgtgacaacgatgatgggcctaaaaaggtgtttaaaaatgccaaggacaagtgtgatatggcgatttccactagtactatcgaccctttctactatctcggtgacaacttgtatctcgtgaaagttcctgaaggtgcagccgcccatccccgcgaaatcgaagagctgttcaaacctgagatcctggcttacaaaatcggcggaaagccatttgatagaaaaaaggagcacggggatgagacagcctatggcaaggtgaagtttgccgaagaggtagttaaacccaatgcgagtactatcgatttttctgatttctctgagctcttgtcacgtattgaccagtgtttagcgcattacgggaccgtggttgcagcttctccagtggcagcagctgcagcctcatga

SEQ ID NO: 8095 - RNA, 1707 nt, synthetic construct
  source 1..1707: mol_type = other RNA
atgtcatatctggatcgcctaaaatccgccaagaatcttagtgatatcgctaggctgctcgggtttacgcccaaagggctctcctacgtgctgtacaagacaggagacacctcgaattaccgggaattttttataccgaaaaagaccggcggcacacgcaaaatcttagcccctgaacggcgcctggcgttactgcagtccagactcggggatcttctttatggctgtgtggaggaacttaagcgtaaggatccttatttttggcacagctcgaacggcttccagaagggtaggtctaccatcagcaatgccaaggcgcacagcaggaggcggtacgtgttcaatgttgacctcgaggacttttttggcacaatcaatttcggtagagtgagaggattcttcattcatgacaggaacttcaggattgagcctccagccgccactattatcgctcagatcgcatgtcataagaactccctgccacagggctcaccttgcagccctgtgatctctaacatgatcggaaacatcttggacgtccggttgttagctctggcacggaatacacactgtacttatacccgctacgcagacgatctcaccttttcaacaaatgaacgggtcttccctaacgagatcgctgtgacgctagagggtaaagggtgggaactgggcaacaaattgcgagaagagatagagcgagccggctttcgagtgaacgacaagaaaaccagaatgtccctgcgggattcacgtcaaacagtgaccgggcttgtcgtaaacgctaagccaaacattaatcaggattattatcgttctgctagggcgatgtgcaatgctttgtttcaaaccggtaagtatcatggagcagacaaacaggagacagcaaacttgaatagtctggagggtatgctctcctacatctatcatgtgaagattagaagagatcgcactcacaggattaataagcttgctagacaagctaatgaattcagggccccctctgcccctattgaactctatagacggttcctcttctataagtactttatcgccagctcactgcccactattgtgacagagggggtcagtgacatcacctacattcgctgcgcgattcagtcactaactccaagtttccccctgctggccgagaaagtggataaaaaaatacgcctgagtgtccgattcctgaagccgtctggcaccactcgtgatgtgctcaacctgggacatggcacgagtggacaggtcaaacttatctccgagtacaagaacaatttgaaccattacaaacacaagcccatggcacatccagttatcattctgtgtgacaatgacaaaggagcctccaacatctttaaggaggccgccagaaagtctggtacagctatacacttggaatctgaggagaatttttaccacatcagcaacaacctgtacctgatcaaagtacccgaaggggaaccaccagccgaaagagcaatagaagatctgtttatgcccgagctcctagcccaaaccctcgacggcaaacccttcgacaggaagaaggagcacggggacaaagcagcgttcggaaaggtaatgtttgctgagtacgttgttcgcccgaaccggactagcattaatttcagcaagttcagccagttactgagccgaatagaggcatgcattaaacacgattccgcccagcgcacttcttga

SEQ ID NO: 8096 - RNA, 1635 nt, synthetic construct
  source 1..1635: mol_type = other RNA
atgaaaactataactaggcttaagggagccgataagcttgatgaactggcgaaactgttgagctttaccccccggggtctgagtttcgtcgtgtacaagattgatacaatgaacaagtacagagttttcgaaatagcgaaaaaatccggcggaacaagaacgatccacgcccccgagaagcaactcgcccttctgcaaaccaggctggcgaacctactttattcttgtgtggcggagctgcagcaggaaaagccgaaactgtggcacgccagccatggcttccagaaacagaagaccacaatctctaacgcaaatccacatcgacggcgcaggttcgtgtttaacctcgacctcgaggacttttttggctcaatcaattttggccgggttcgtggatttttcatcaacgacaagaacttcaaacttaatccaaagatcgccactatcattgcccaaatcgcctgccatcgcaacgctctccctcaaggctcaccgtgctcccccgtcatttcgaacctgattggtaatattctcgacttacgactgatcgctctggcccgcgaaacgaaatgtacttatactcgttatgcagatgatctaaccttttccactaatgaaatgctgtttccaaccgagattgcaactaaccctcagggctccacatgggaagtgggcattaagctgcacaaggaaatcgagcagaccgggttcaagattaacccccgcaaaacacgtatgtccttgcgacggtcgaggcagacagtgaccggtttggtggtcaactcaaaagtgaacattaagaaggactactacaggtctgctagagcaatgtgcaatgccgttttcagtaccggcgaatatcatatcatcgacaaggacaagaatataagtgacctccgcagcctggagggtatcctgtcacatatatttttcgtgaaagcccggcgggacagagctccaaagaccaataagatggcaatcgaggccaatgagttcaagcttccgtccgctcccgtagagctgtacaggaagtttctgttctacagattatttgtcgcccctaaggctcctctcgttgtaacagaggggataagcgatatcacatatattcagtgtgcaatcagagcattggcaaaaagcttcccagctctcgctctcgaaaaagatggcaagcacaccagactactcagcttcctgaaccccagcggaactaccagggacgtgttaaatctgggtcatggggcctctggacaggcatccttgatcatgcagtactttggcaatctgaaaaagtacaagcacaaacccttggatcacccagtgattattctgtgcgataatgatgacggacctaaaacggtattcaaaaacgctaaatccaagtcaggattaacgatctctaccagtacaacagaccagttttatcacctaggcgaaaacctgtatattgtgaaggtccccgaggggaatcctgccaccatcaaggagattgagaaccttttcgacagtaagctcctgacagagaaattggatgggaaaagcttcgaccctaagaaggagcacggagatccaacttcttacgggaaagtggtttttgctgagaaaatagtccgccctaatgccggggaagggtga

SEQ ID NO: 8097 - RNA, 1689 nt, synthetic construct
  source 1..1689: mol_type = other RNA
atgtccagatttcagctgctgaaagacgctaccaccatcaatgatatcgctagccttctaaactataaagccaagacactttcctacatcttatacgtgttatctaaacaggatgactattacacgagttttgaagtacccaaaaagaatggcggagtccgcttgatccaagcacccaataaaaaacttaagcaggtccagaccaacctgtctggcttgttgaatgagtgcgtgaatgaaatcatcgaaaaggagcccaaatatttctatgcatcacatggatttctcgctgacaagaccataattacaaacgccaataagcataagaagaaacggtacgtgtttaacgtggacattgaaaacttttttgggtccatcaactttgggcgcgtgatgggattttttatgaatgatcgccactttcggcttgataagaaagttgccacaataatcgcacagatcgcctgtcacgagaatgcgctgccgcaaggttccccatgtagcccaataatctcaaacctcatcgggaatatcattgatatacgactcatcaccctagctaaaaagcataagtgcacgtacacacgttatgcggatgacattactttctctacgaatgtgaaacaattccctacttccatcgccaaaaagagagacgagacttgggaggtaggcactaagctcagcagggaaattcagaagctgggcttcaacattaacgaaaaaaagacacgaatgagcttcaataacagtcagcagatggttacggggatcgtcgtgaataaaaagattaatttcagccaggcctattatagggagctgcggtcacaatgtcacaacctgttcaaaaacggatcatatcatgtcaacaatgaggtatgcagcaatctcaacaaactgcagggtaagctcgcttacctgtacttcatccagaataacaagaagaacatcaagatagacaagaatgaggaggccaactttgggagtggcctcaataagctgtacagaaaattcctcttctacaaatacttcgtggcctcggagaagcctgtgattgtcacagaaggagctaccgacattgggcacctgaagctggcaattgatgccctggatgagaaagacatgaatctgaagttctttaatcctagtaagaccgggattaaactgctgaatctgggcgaaggtacaggcggccagaacaaacttatattcaattacaggtccatgatgaacaaactgggcaaaaacatgccagcgccctttagcccggttatcctactctgtgacaacgacgaaggcgcctctgacattttcaagactatcaacaacaagaagaacaagttttcctgtgagatttctctgtccactactgatcctttctataagctctgccacaatttatacttgatcaaggtgccagagtcaaagggagcagagacaagcattgaggatctgtatgaagaaaccgttttggataccaagttgggtgagaaaacattcaacaaaaccaacaagaagcttggggataacgagtatggtaaacagtactttctggactacgtggtcaggaagaataaaaatagcattgacttctctggattcactccccttttagacagaattaagttgtgcataagcaattgggaatctcaagaaaaatcctcacataacagtaccaactcgcactga

SEQ ID NO: 8098 - RNA, 1713 nt, synthetic construct
  source 1..1713: mol_type = other RNA
atgagcacactccaaaagctgaagaacgcaagaacgcgaagcgatttggctaagatattaggcgtaacaccatctgggctgacctatgcgctgttcgtgatcccccaggaagcaaaatatcacaaattccaaatccctaaacgatctggaggccatagggagatctcagctcccaattctcatatcaagctagtgcagagacgactcgccagcaagctctacgagtgtaccaaggaaattgaaaacgcccagcctaatcggaagaaagtgacacatggatttcagccaggccgcagcattatcaccaacgccgacagacacaagaaccgtcggtacgtgtttaatgtcgacgtgaaggatttctttgacagtattaatttcggccgcgtgcgcggcttttttaataaggaccgtgagtttctgttggataaggagatctgtaccgctatcgctcagattgcctgctgggagaattctttaccccaggggtcgccttgcagccctgtcatcagcaacctcatcggccacatcctcgatgtcaaaatgttgaaactagcgaaggagtccaaatgtcgctatacgcggtacgccgacgacatgacgtttagcacaaacgaacgcgaatttccctcatctatcgctatccgggatgcacaagacccaggtaaatggtccgtgagcactaaactggaaggactgattaaacaggctgggtttgaaataaatccacagaaaactcggatgcaaattgtcggctcaaggcagctagcaactggacttgttgtgaacaagaaggtaaacatcaaggaagaatactgccggcagactagagctatgtgcaatcacctcttcaaaaaggacgcatactttctgcagaacaccaaagaaggggaggcacctaagttgattaagaatctggacatcttggagggaaaattatgccacattcatgccgtaaagaccagggttgacctgacagaccagcagaaaaagtcaaggaagtttgatccgcctccgggtaccctgaggttgtataaaaagttcctcttctacaagaacttcttcgcgcaagagcgccccctgataatcacagaaggtgcctccgatattatctacctcagaaccgccattaggcactccaaaaagaagttcccactgctgtttgataaaactcttcagatcaggttcctgaaaaactccaagacagtgaaagaggttttaggcctgggagatggatgtggtggcattggtaaactggttgccacctatgccaaggagataagcgcttttggcagacccagtgccttccctattatcatccttatagacaacgatgacgggagtaagaagagtatattcaaggttgccaaggatgccgcaaaagcgactcttaagaaggacattgaaataagtatcgagtccaacgactgttggcaccatcttggggataatctctacctggtgaaagtgccacatggggggtcaaaatctcccaagagtatcgaggagctgttcccagagaagtggctgaaattttctgtggatggcaagattttcgacccctcgaaaaagcacggcgatcacacctcactgggaaaagtcgctttcgctaagaaagtcgtcgagactcatgccggtgagatagacttcggcggattcgactccctcttttcccttattgaaggggcaattgccgattatagaaaaaattga

SEQ ID NO: 8099 - RNA, 1572 nt, synthetic construct
  source 1..1572: mol_type = other RNA
atgggactggtgcaaaggcgcctcgctacacgcctgtatgagtgcgtgcttgagatagaggagaaacaaccaaataggaggcgagtaacacatggctttcaaaaggggcgtagcattattactaacgctgaccgccatcactcccggcggtacgtgtttaatatcgatattcaggacttcttccagagtatcaacttcgggcgcgtacgaggattcttccagaaggattcaaccttcgcattgaatgatgaggtggcaactactattgcgcagattgcctgctggcagaacggactcccgcagggatctccttgtagtccagtgatcgcaaacttggtcggacatatcctggacgtgaaactgctcaagctggccaagcaggctaggtgtaggtatacgcgatacgccgacgatatcagtttctcgacttccgagagaaatttcccttccttaattgctgctcgcgctgacggcaagcccgcagtatgggaaccctcagagaaccttgcctctgcaattagacaagccggtttcgccataaaccctgccaaaacccgcatgcagataagaggcagccggcagatggccaccggtctgatggtgaatgaaaaggtcaatattcgtcctgagtactataacgagacaagagcaatgtgccatcggctgtttaccacggggagatatgagatcccaaggtggcctgataggcaagagactgaccagcttggagcattggaaggcaggctgtctcacatctttgcggtgaaggcaagattggatctctcttccaaacggcgtaaagaaagacacgtgaaagtcccgagcggcacaatcgaattatgtcgtcggttcctgttctacaagaacttcgtcgttaatccactacccgtgataatcacagaaggtccatccgatgttatctacctgagagccgctctcagggctaggggaaaggagtttcccaaactctatgacgcccgccaggaacagaagtttcttgttcggttcgtgaatcatagccattttatgagagagaacctcctaggccacggcgttggcggtcttggaaccctgatttctcggtatcacgccaccctgcaggaatacgcgcaggagggccaaaccgcacccgttgtgcttctggtcgacaatgatgaggagtccgacaaggcttttaaggcggccaaaaaagccatcaaggaagacggcaatggggctgcaagcatcagcgtcgagagcaatgacgcctggcaccacttgatcgataacttatacctggttaagattcctcatgggggagctgaacagaaaaaacgagtgatcgagcagctcctgccagaagagtggctaaagcacgaagtggatgggaagcggttcgacccctcaaagaagcacggcgaccacagttctctgggcaaggtcttctttgcgaaaaaggtcgtagaagccaacgccgacaagataaactttggggcctttgacgctctcttttcactgctggatggggccttgcgcgattttgaggataaacgaaaacaggaagccggtgggaaagtgatggcagcttcgtga

SEQ ID NO: 8100 - RNA, 1755 nt, synthetic construct
  source 1..1755: mol_type = other RNA
atgggacgcttagacgaattgaaggctgctaaaaccagaagtgacttggctaaactgctccactttacccctaagggtctagcctatgtgctgtacaaaactcctgctgctgataagtactcaatcttcaccattcccaagaaaggaggaggcgaacgccgcatcgaagcacccgaaccacgattaaagctgcttcagacccagctcgccgccgtgctgtatgactgccttgaggaaatcgaaagtgagacacctaatcgccggtccatctcccatggatatcacaggggcagatccatcgtcaccaatgccgttccgcatagaagacatcgttacgtcctcaatatcgatctgtcagacttctttgggactatcaatttcgggcgggtaagaggattctttatcaaagacagcaactttgctttgactgacgaggcagcgactaccattgcccaaattgcctgtcacgagggtcgcttgcctcagggcagtccatgctccccggtcattagtaatctcattgctagaatactggatgtcagactggcccgtctggccaagtctaccgggtgtacctatacccgttatgtggatgatttaacatttagcacagcccagcggacattcccccctaagctagctaaaaagattgcaactagcccccacaaatggaggctgatgcggtccctgcgtgacgagataaaaaatgcggggttcaaaatcaacaccgccaagacacgcatgcagatttgtgggtcccggcaggaagcaacagggctggtaataaacgagaagatcaacattagtcagccagcctacaggactattcggagcatgactcacactttattcagtacggggaaatacttcgttcctggcggagagcttgacccatcaggcgcccctaagtggatttctgaactggcaccactcgagggtaggctggcccacctgtattttgtgaaggcacgacgagacagatccgagcagcttaacaagcgggagaattttaaaacaccccgcgctgtaaaagagctgtaccgcaggttcctgttctacaaatactgcgtggccccagaggccccccttattgtgaccgaaggtaagacggacgtcatgtatttaaagtccgcactgaaagccaggggtgcactccacccccaactcgcatctgaggaaaagggaaaatcgaagaggcaaattaggttccttccggcaagctacatgaataacacggtgctcgaactcggctctagcgcttcacagctgacaaagctgatagaatcctactcaaaccgacttaaactgtaccggcatagacccttgtcagccccagtgatagtgatcgctgataacgatgacggcgtggacaggatcttgaaggctgccaataagcggtctgagctggaggtcaaggctgggacaccccagtgcatgtttcacatcgttgacaacttgtatctggtgaagacacctcatgtgggcgagaaagcaaagacttgtatcgaggacctcttttcggatcgcctgaagagccagaaagtcaaaggcaaacccttcgatattaagaaggatcatggagacgagacgtcttatggcaaatctaggtttgcggaggaggttgttgcgaagctagcgcaagcccctgattttgctgggttcgaaccactcctaaacgcaatcgaaggcgccatctctgattacagcagccgaatgatgaacaaggaaagaagcgccgcgctcataggcacctga

SEQ ID NO: 8101 - RNA, 1698 nt, synthetic construct
  source 1..1698: mol_type = other RNA
atgaaacaccttcaggcactgagagacgccaagaacatccaagatttggcgaacatcttagggtacaaagcaaaaggcctttcttacgtactctacaagtacccagaagacaagaagtacacaagattcactattcctaagagaagcggtgaaccccgagtcatttctgccccatgtaagccattaaaactcttgcagagacgcctagctgactatctttatatttgcgaaaaggagatcgaagaggcgcagccccaccggaaaaggctgtcacatggttttcacaaggggcgatctatcattagtaacgccgacctgcataggaaccggcggtacgtcttgaacgtcgatatagaagacttctttggcacgattaattttggacgtgtccgtggcttcttcatcaaggataagaattttctgctcaacgataaggtagctacaatcctagcccagattgcatgccatgccaacgctctgccgcaaggaagtccttgttcccccgtcattagcaacctggtgggaagaatcatggacgttcgcctcgctcagctggcaaagtcatgctattgtacttatagtcgctatgcagacgaccttacattctcaactaataagtccggctttccggagcagctcgctatcatgaaagcagattccgacggttcatggggggtcggaaaagcgctgcagaatgaggttgagcgggccggcttcaaggtaaacaattccaaaactaggttacagttccgctcttcccgacagtctgttaccgggctcgttaccaataagaaagtgaatgtgagcaaggaattttggaggaacgcccggtcaatgagcttccaactcttcagcaccggcaaatacaattgccagcacaagcagccaaacgtgccaaccacttccctcgctccgcttactggtgtgctggctcatatctatcaagtgaagtcaaggagggatctggatgaaacccagatagaggaaaggagctttagtgcccctaaaggacacgagacactgtaccgaaagttccttgactttaagtatttcgtggcgctggacaagcccgtgttactgaccgaaggccctacggatatcgtgtatttgcgggaagccattaaaagtcgggcagccaagttcccttcgctgtacagcggaggggagcaccaactgaaatttctcagacctacggacacagtgaaagagctactgtctgtgggaaccgggtttggggacttgctgggcctgatgtctgagtacgaggagagggttgccaaatttccttattgtcccttgtcccaccccgtaataatgctacttgataacgatgatgctacaagtgctctctcgaagatgaaatacctgaagcgcaagaaaattgtgataaaaacctccagtaccgccgattattaccatatcgcaaagaacctgtatgtggtgaagacgcccgaaggctctcccacaaatgagacttgcatcgaggactgtttcgatgctgccaccagaggtgttactattgacggcaaaccctttgacccaaataagaaacatggtgaccacagctccttcgggaaacaggtcttcgccgagcgtgtcgtcaagcctaattccagcacaatcgattttaccggcttcgaccctctgttggatcgcataacaaaagtggtgagcggatacgtgccacccgccccatga

SEQ ID NO: 8102 - RNA, 1755 nt, synthetic construct
  source 1..1755: mol_type = other RNA
atgtcagaacttaacaatcttaaggctgctaaaacactcccccagttcgcacatctgctgaaactgaaatcagagacggtcagctatgccctgtactggtacaggcgcagaagtccgtattcccacttcacgatcagcaagaagaatggtggcaggcggcatattgctgcaccaaactctcggctcaaactggtgcagagccgactcgccgaactgttggggcgtatcgagacagagatggagatgaagcgcaccacaaaggtgcgagtgctgtcccacggatttaagaagggcttctccatcatcacgaatgccaatcagcacagaaacaaacggtgggtgtttaacgtggacatcagggatttttttccatccatcaacttcggcagggtgtatggtttctttgtcaaggaccgtaactttcagctcgatcctaagatcgctacaattatcgctcagattgcctgctaccaaaatagactgccccagggatcaccttgctcccccgttgtgagtaacctgattacacacatactggatattaagctcaacaagctcgctaacgacctgcattgtacctacaccagatatgctgatgacctcacattctctaccaatgagaaagaattccccgaacagatcgccaggttagttcgagggaacgatgataagtgggtcgcaggcgacgggctgctttacctggtgtatagagccgggtttcaactcaatcacgagaagaccaggatgcagcgtagggatagtcgccaagacaccaccggcctgattgtgaaccagaaacttaacgttagacatgagtactacaaacaggtgcgcgcaatgtgtcatcatttgttcaatcacggattcgctttttctgaccccggaaaggtccctgtatcaaatcacacagtcgaggggatgttgagctttatataccaaatccggcgcatacggagtcaaaatcttgttgtggaaaaggaaccagaaagaaactcttttttccagaccgaccaggccggtttcactgaactttacagaaggttcctaaattaccgcagcttttatggaatgatcaagcccactattatttgcgaggggaaaactgacaacatttacctcctcgccgcgatccgaaagctggcaccgaaattccctaaattaatcgatcctgctcagaaactaccattgaaagtccagtttttcaactattcacatcggtctgccctgttccagggattaagcggaggtggcgacgagatgtataagctgattaaggactttcgcgagcgaatgaaattctttaaacacgtccctacacaacccgtgattatgatcatcgacaatgatgccgcatccactggtatttttacttatgtggggaccgtacatggcactggcccggtgagtggcttggacccattttaccacgtgttcgaaaacctgtacatcgtccccgtccctacaactgcaggagtcaaggctgtgatagaggatctgttcgaccctgtagtaaagaagcccatatccgggcggaccttcaattcgtctaataaaagcttcgaccagaccaagttctatggcaagaatgaatttgcgactaaaatagttgccccagagcgggccacgattgattttacaaagttcgagcccctattgcaggccatctgtgatgttatggatcactttgcagccaccctggctgccaaaagcatcgttttacctgcaccagtggtggtagcggaagccgcgccatga

SEQ ID NO: 8103 - RNA, 1080 nt, synthetic construct
  source 1..1080: mol_type = other RNA
atgtccgagttgtccaatctgaaagccaccaaaacattgccccagtttgcaaggatccttgacctggacggacagaccgtgagctacgctttatattggtacaagcggcggaatccttatgaacatttcacgatccctaagaagaacggaggagtccgccacattgccgcgccgaattcaagattaaaggtggtgcagtcacgactcgcggagctgctgggcaggatagagtctgaaatggagctcaagaggaccactaaagcccgcgtgctgagtcacggcttcaagaaggggttcagtataattacgaacgccaatcagcacagaaacaagcgctgggtgtttaatgttgacattcgcgacttctttccttcaattaacttcggtagagtttacggcttctttctgaaagatcgcaacttccaactggatccaaaaatcgccaccatcattgctcagatagcttgctatcagaacgaactccctcaaggcagcccctgtagccccgtgatcagcaacctgatcacccatattcttgacatcaagctaaataaactcgccaatgagcttcattgcacttatacaagatacgcagatgatttaaccttttcgactaacgaaaaggagtttcccgagcgaatagcacggctggtacggggctctgacgacaaatgggtcgctggggatggcctgtcctatctaatttatcgcgcaggatttcaactcaaccacgaaaagacacggatgcaacgtcgagacagtaggcaggataccactggtcttatcgtaaaccagaaactgaacgtgcggcacgagtactacaagcaggtccgtgccatgtgccatcacttgttcaatcatggtttcgcttactccgggccatcaaaagttcccgtcagcaatcacacactggaagggatgctctccttcatttaccagatccgtaggatcaagaaaccggaattgctgtttggcgcctgcccagtgggacggagatttagaccagagcatgacagacacaagttttctaagtgtaggaggattttcgggtctgatgagatcaaatgtcagcgaacatga

SEQ ID NO: 8104 - RNA, 1749 nt, synthetic construct
  source 1..1749: mol_type = other RNA
atgagtgaattaagcaacctaagagacgtgacaactctgccacagctggcccggcttttggactttcccgcagagaacctgtccttcgccttgtattggcaccggcgaagacgcccttaccaccattttaccatcgccaagaagaatgggggtcgtcgcgttatcgctgcccccaatggtaagctgaaattcgttcagggcaggctagctgacctcctcggccgaattgagagtgagatggaattgaagcgtaccactagatccagggtgttgtcacatgggttcaagaaaacttttagcatcatcaccaatgctaaccagcataggaatcggcgctgggtgtttaacgcggatataaaggattttttccccagcataaactttgggcgggtgtacggcttcttcctcaaagacaacaatttcgaactccacccaaaaatagccactatcatcgctcagattgcttgctaccaaaatcagctgccacagggatccccttgctcaccagtcatctccaatctgattacccacattctcgatattaagctgaatcgcctggcaaacgatcttcattgtacatacaccaggtatgccgatgacatcacgttctctacgaatgagaaggagttccctgaacgaatcgcgagactggtgagaggctcagacgacaagtgggtcgccggtgatggattgttacacctgctctaccgggcaggcttccagattaaccacgataaaacaagaatgcagaggcgggatagccgccaagatactaccggtctgatcgtgaaccagaaacttaatgtccgacatgagtactataagcaggttagggcgatgtgtcaccacctgtttaaggagggattcgcttattctgagccttctcggatccccgtgagtaaccatactctggagggcatgctgtccttcatataccaaattcgcagactgaggtcacttagtatagtggtcgaggacgaaatcgagcgcaataccttctttaaaagagatcagccaggctttacagaactgtatggaagattcctcaattaccgttcattttatggcatgattaagcccaccattatttgtgaggggaagactgacaatatttatctccttgcagcaattaagaagctagcccccaaattcttaaagctgatcgatccaatacagaaggtaccgatgaaagtccagttcttcaattactctcaccaatccgccctgtttcaatccctcagcggaggaggtgacgaaatgtacaagctgatgaaagagttcaaggagcggatcgaattctttaaacatggactcagtcacccggtgattatggtgattgacaacgataaagcatctaaagggatcttctcttacatcggcacggttcacgggaccgggcctgtaagcggcttagacccgttctattacgtgtatgaaaacctgtatgtcgtgcctgttccaaccactgctgatgtaaccgctattatcgaggacttgttcgaccccagcgtgaagaggcctatcaacggccgaacatttagcgactcgaacaaaaagtttgatcttaccaagcactacggaaaaaacgaatttgccacaacaatcgtcgcacctgagagggacacaattgactttacgaaatttgaacccatgctgcaggcaatatgcgacgtgatggatcattttgctgccatccttgccgccaaacccgaagctgccgtaccacctttggccgcgacagggacatga

SEQ ID NO: 8105 - RNA, 1740 nt, synthetic construct
  source 1..1740: mol_type = other RNA
atgtccgaactttcgaacttgaaagccgctaaaacgctccctcagctcgctcgtcttctgaacctgaacggcgaaacattgagctatgcactctattggtatcgccgctccgcgccctacacctactttaccgttgcgaagaagtccggaggaagaagggctatagccgcacctaacagccgtcttaagcttgtgcagtcccggctaggtcaattgctcgctagaatcgagactgatatggaattgaagcgaacgacaaagtccagggttctatcacacggtttcaaagccgggtttagcatcgtcacaaatgccaaacaccacagaaataaacggtgggtgtttaatgtagacctgaaagagttcttcccatcaattaattttggccgcgtgtacggcttcttcctgaaagaccggaacttcgagcttgatcccaagattgctaccatcattgcacagatcgcgtgtcatgataataagcttccgcaaggtagcccctgcagtcctgtgatcagtaacctgattgcgcatattctcgacataaagctgaataagcttgcgaatgacctgcattgtacatatactaggtatgccgatgacctcactttttcaaccaacgaaaaacacttcccagaagccatcgccaggctagtgaggggctcagatgacaagtgggttgccggagatgggttactgaatctgatttacagggccgggtttcagctgaaccacgagaagaccagaatgcagcatcgagattctaggcaagacgcaacgggcttggtcgtgaatcagaaagtcaacgtgagacacgagtattacaaacaggctcgagccatgtgccaccatttgttcacaaatggttatgcatactccagaaccgaatttgcacccgtgagcaacgacgcagtggagggaatgatgaatttcatctatcagattagagccgtgcgatctcctgacttcaccgctacagaccctagaggtttcttcaagtctgaccagcctggcttttctgaattgtacggacggctgctcaactattgcagcttttacgggatgctccgcccaaccatcatctgtgagggcaagaccgataacatttatctcctggccgctatcaaacaactggcagcgaaatttccacaactcatagaccccgcccagaaggttccaatgaaagtccagttctttaactactctgaacggactgctctgttccagggcctgagtggggggggtgatgagatgtacaagctgatgaaagagtttagggagcgcatgcgctttttcaaacacggcccctctaagccggtgataatggtggtcgataatgacgacgcctcaaagggaattttttcctacattggaactgtcatgggcacaggacccgtgagtggcctggatccattctattacgtatttgagaacctgtacgtggtgccagttcccaaagtcgccggaacatccgcaataatcgaagatctgtttgatgccgccgtaaaaaagcctatcaatgggcggatcttcaattctagcaacaagaaattcgacttaactaagtactacgggaagaacgaattagctaccaagattgtagcccccgagcgtagcagtatcgattttactaagttcgagcctatgttacagtcgttcgccgacatcattatggactatggggcccggctggctgctaagccagcaatggttccggtcaagaatgcagtggctggcccttga

SEQ ID NO: 8106 - RNA, 1716 nt, synthetic construct
  source 1..1716: mol_type = other RNA
atgtcagacttgactgccctgaggaacgcccgaaacttaccacaactggcccggctgttaaaactcaagggcgaatatgtaagccactccctgtattggtaccagcagcaaaagccttactcccacttcactattccgaagaaaggggggggaaagcgatctattgaagccccaaacagcaggcttaaactccttcaaagacgtctagccgagctgctaatgcggatcgaagctgaaatggagggacagcggactaccaaggccagagttctggcccatggcttcaagcccaatttctctataatgactaatgccgcgttgcaccggaataagcgctgggtgtttaacatggacttgaaagacttcttccatacgattaactttgggcgagtatatggcttcctgttgaaaaatagaaacttcgctcttgcgcccaagactgctgcggttatctcccagatagcatgttatagaaatcatctgccacaggggagtccttgttcccccgtaatttcaaatttcattgcacacgtgcttgacatcaaactgaataaactagcaaacaaactccgctgcacatacacccgctatgctgacgatatcacattctctacgaacgaaaaggagtttccggaagatattgcacgtttagtcagaggctccgatgacaaatgggtcgtgggagacaaggtgctgagggaagtgtatagggctggatttaagatcaatcacgacaagaccagaatgcagcgtcgagacagtcgccaggacactacggggctgatcgtcaaccagaaactcaacgtccgccacgaatattataagcaagctcgcgccatgtgccaccacctctttgtccacggttacgcgcattccggtaccgataggggctcggttccaatcaagaatgaggtggttgagggcatgctgggatttattcatcagataagaagcctgaagaacgccgagttttttaaagctgaccaacccggattcagttctctctacggaaaattcctcgactatcagtctttctacggcatcctcagaccaaggattattggggagggtaagaccgacaatatctacataaagagcgcaatcaaaagccttgccgccaaatttcccgccctggttgatgccacagagcctcttaccaccgcagtcgatttcttcaggtataacaagcggagttccatctttcaggatctgtcaggaggcaccggggaaatgaataaattactggcctcttacagacataggatggcctccttcaaacacatcgcacggcaccccgtgataatggtggtcgataatgacagcggctcggcttcactcttcaattacgtgtcaaaggtgctggggacccctattggcggtctggatccttactaccatgtgtttgagaatttgtatcttgtccccatccctaaaacaagcggtcatgtggctattgaagacctgtttgatgcagccctgttggcggagacaatcgacagccgaacttttgagaggcgcaacaacaagttcgattctaccaagttttacggcaagaacgagttcgccacaaagatcgtagcacccaagcgggccacaattgattttagtaaattcgagccactcttgcaggcctttgtggatatcatggcagattacgagaagcgccacgctgcagctatagtggctgcacggcctccagttgtggctgctgcctga

SEQ ID NO: 8107 - RNA, 1716 nt, synthetic construct
  source 1..1716: mol_type = other RNA
atgagcgacttgtccgcacttcggaacgctacaacccttcctcggttagccaggctgttaaagctgaagggagagtacctgagccattccctgtattggtataggcagagtaacccttacgctacgttctctatcttgaaaaaaggcggggggagacgcttgattgaagccccaaattcccgcttgaagctcgtgcagtcaagactcgcagacctcctgatgcggatcgaggccgagatggagaacaaaaggaccaccaaagcgagggtgctggctcacggcttcaaaccaggttattccatcatgaccaacgcagcccttcatagaaataaacgctgggttttcaacatcgaccttaaggactttttccactcgataaatttcggcagagtatatggctttctgcttaaggaccggaactttgaattggctcctaaaaccgctgcagtgattgcacagatagcctgccataataaccgcctgccacaaggcagcccgtgttctcccgtcattagtaatctgattgctcacgtgctcgacctgaaactgaacaaactggccaacgcgcaccgatgcacttacacccgatatgccgacgacatcacattttccaccaacgagaaggagtttccagaggccgtggctaggctcatccgagggtctgaggataaatgggtggccggcgacaagatcttgagagaggtatacagggccggattcaagatcaatcatgacaagtcaaggatgcagagacgtgactcccggcaggacactacggggcttatcgtgaatcagaaactgaatgttcgccacgaatattacaagcaggttcgcgctatgtgtcatcatctatttgtacatggatacgcgcatagcggtctgggtgctggcagagatcccgtgaagaacgagagcgtcgatggtatgctcggtttcatacaccaggtccggagtctcaaaaacgctggattctttaagactgaccaacccggattcagcagcctgtatggcaaattcctagattaccaagccttttatgggattctccgtcctcggataatcggcgagggaaagactgataacatttacatccgatctgctattaagagactggcggggaaatttccctctctcattgaaccgtcttccccactagccgaagccgtcgatttcttccactacaatactcgatcagcactatttcaggacctgagtggcgggacggatgaaatgcacaagttactctcaagctatcgtgcaagaaccagttcgtttaaacacatcgcccgccaccccgtcatcatggtggtagataatgacgccgcctccgccaagattttcgcacacctcagcaatatcctgggtactgctgttgggggcatggacccattttaccacgtgtatgagaatctgtatcttgctcccattcctaagaccacaggacatgtggccgtggaggatctgtttgatgccaccgtcttagcacagacaattaacgggaggacatttaatccttcaaacaagaagttcgatcagtctgtgtactacggcaagaatgaatttgccacaaaaattgttgctccgcaaagggctactatagatttcacaaagttcgaacccctgctggcagcattcgtcgatatcatggccgattacgaaaaacggtacgctggagccttggcggccttgaagggaggcatagccgcagcagcgtga

SEQ ID NO: 8108 - RNA, 1716 nt, synthetic construct
  source 1..1716: mol_type = other RNA
atgagcgatctgagtgctctgcgcaataccaagaaccttccccagttggccagactgctcaagttgaaaggagaattcgtgtcccacacgctgtattggtaccggcccaacactccctactcttgcttcacaattccaaagaagaatggcggtcggcgcttgatcgaagcccctaattctagacttaagctgctccagtcccggttagctaacctcctgatgaggattgagagcgaaatggagggaaagcgaaccaccaaagcaagagtcctagcccacggctttaagcctggcttttccattataactaacgcagccctccacagaaataaaaggtgggtgtttaacatcgatctgaaggacttcttccattccattaacttcggtcgtgtatacggttttctgataaaggatcgcaacttcgagctggctccaaaaaccgccgcaatcattgcacaaattgcgtgtcataaaaatcatctgccccaagggagtccttgcagtcctgttatttcaaatctcatcacacatctcctggacataaagctgaataaactggcaaacaaactccactgcacctatactcgctatgcagatgacatcacctttagcacgaatgaaaaggagttcccggcagccatcgcaagactggtcagaggatctcacgacaagtgggtggccggagacgccgtgttacgtgaggtgtatagggcgggctttaaggtgaaccatgataagtcacgaatgcagagacgagactcccgacaggacactacagggctaatcgtgaatcagaaacttaacgttaggcatgagtactatcggcaagctcgggctatgtgtcaccatctcttcgtgcatggctacgcctacaatggcgcagacacacgtaataaccccatcaaaaacgagactttggatggaatgctgggctttatccaccaggtaaggtcccttaagaatgctgagtttttcaaagaggaccaacccggatttagcagcctgtatggaaagttcctagattaccaggccttctatgggatcctccgccctaggataattggggaaggcaagaccgataacatttacatccgatctgctatcaagagtttggccgcgaaatttccttcactggtcaacccaagcatccccgcgacagcggccttggatttttttcattacaatacccggtcggctctgtttcaggggttgtctggcggtacagatgaaatgcacaaacttctgtccagctaccgctcacggatcagctcttttaagcacatagctagacatccggtgattatggttgttgataacgacgccgcttccacaaaaatcttcgctcacttaagtaacatactggggtatccggtgaatggtatggaaccattttaccacgtatacgaaaacctttatcttgcccccgtcccaaagactacgggacacgtcgcaatcgaggatctgttcgacgcttcagttcgcgcccagcagattgatgggaggagcttcaacccatcaaacaagaaattcgacctgtccatttattacggcaaaaatgagttcgcaaccaaagtcgtgtcgccacacagggccaccatcgacttcagtcagtttgaacctctcctcactgccttcgtcgagattattgctgactataataaacggtacgccgccatcttaggggctgccaagggcgacgtgctttctgccgcatga

SEQ ID NO: 8109 - RNA, 1719 nt, synthetic construct
  source 1..1719: mol_type = other RNA
atgtctgagctgtcggaactgaaatctgccactactcttcctcaactggctaggctgctcaagctaaagggggaaactgtgagttatgctctctactggtatcgaagagcgaatccttacgactattttgaaattcccaagaagaatggcggacggagattgatcgcagccccaaattcgcggctcaagttagtccagacccggctggccggtctgcttggaagaatcgaggcagaactggaaggtaagagggccacgaaagcaagggttgtgtcccacggttttaagacaggattcagcatcgtcacaaacgccgctcatcaccggaacagacgctgggtcttcaatgccgaccttcaggatttttttccttctatcaatttcgggagggtgtatggctttttcattaaggaccgaaattttcagctggacccaaagatcgccactattatcgcccagattgcgtgtcacaacaacaagctcccccagggaagtccctgctcccctgtgatttcaaatttgatcgcgcacattctcgacatacaactaaacaaaatggccagcaaacatcattgcacctatacccgctacgctgatgatctgaccttctcaacaaacgagaaagagttcccagaagcggttgccaggctggtcagagggagtcgggataaatggaccgcaggcgatgggatcttgcgcctggtgtacagagccgggttcaaagtaaaccatgagaagagtcgtatgcagaaaagggattctagacaagacactacgggccttattgtgaaccagaagttgaatgtgcgccacgagtattataaacaatcccgcgcaatgtgccgacacctgtttcagcacggctgggcccataccggcaccaaacgaggggagaggccagtttctaatgactcattagacggcatgctgagctttatctaccagatacgtcggatcaagaacgacgctttcttcaccgatgatcagccaggcttttccaagctgttcggatactttctggattaccagagcttttacgggattgttagaccccggataatttgtgagggcaagaccgacaatatctacttaagggctgcaattaagagccttcaccttaaattcccccgcctggtcgatgcaactccgaaattcagcctgctggtggatttttttcattataacagccggaccgccagatttcaggacttatcagggggcggtgatgagatgaacaaactactcagctcatatcgtcagaggatgaaaccctttaagcatggagccagccagcctgtgatcatggtggtggacaacgattccggctcaacgaagatcttcaatcacctcacaaacatcctgggcaaacctattgacggatctgacccgttttactatgtctacgagaatctctatgtcgtaccaattcgaaaggttgcgggagcctctacagctatagaagatctcttcgacgggagtgttctcgccgaaaaaataggagtgcgtgaatttaaccgctccaataagaagttcgaccaaacaaaattctacggtaagaacgagttcgctacagagatcattgctcctaagcgcgccacaatcgacttctcccggttcgagcccttgcagaaggcttgttgcgacgtggtagatcactaccaggtgttgtccaaagcagcaccaatacccactccggtacaagtggctgcactgccttga

SEQ ID NO: 8110 - RNA, 1743 nt, synthetic construct
  source 1..1743: mol_type = other RNA
atggcaaatgaatacccgcaggccacaagtcctatctcagagctggcacaattaaggagtgtcaacactttgacccatttagctcaccttatgggactggaagggtggaccttgtctcacgcgctttatcagcagggtcagaaacggggttacacctatttttccatccccaagaaacgagggggcttcagacagatcgcagccccaaattctcgcctgaagatggtccaatccaaattagccggcctcctgagccgaattgaggccgagatggaggggaaaagggcccgtcagcagtgtatcctgtcccacgggttcaagccaggctactctattattactaatgcagcccagcaccggaacaaacgctatgtctttaatgccgatctcaaagagtttttcccttccatcaacttcggccgggtgcgcggcttcttcatccacgataagaattttcaactgaaccacaagatcgctacaatcatcgcccagatcgcctgccacaacaaccagctgccccagggcagtccgtgttctcccgttatttctaatttaattgcccacatgctggacgtgaagctgaataaagtggcccgaaggagcagatgcacttacacccgttatgccgatgatcttaccttcagcacgaatgaaaaggagttccctacagagatagctcggctggtacgcggagcacatgataaatgggtacctggcaacagcgtggttcgcagtgtgtacaaggccggattcacgctaaacgagttgaaaaccagaatgcagtatagggactcacggcaggatgcaactggactcattgtgaacgagaagcttaacgtgcctcatgaatactataagctcgctcgggcccgatgccgacatctcttccggaatggctacgcctatgaccaacacagcgggactgaaatttccgatgaagctgtggagggcatgatgtcttatatttaccagattcgcagggctcggacagaggacttttggaaggagcagtcaggcttcgcaaaactctacaaacagctgctagatcacaggtccttttggggaattacgaaaccaagaatcgtgtgcgaggggaagaccgacaacatctatctgagagctgctctccaaagcctggcggcaaagtttccagaactgtatgaggctggtgctgaaccccaggacagacttaaggtttgttttttcaaccataccaagagggccgaaatattccaaatcgggtctggtgggtcagagctggcaaagctggttggagcctacaaaagcagaactaaatcattcgaggcgggaatgccacctcatcccgtcattgtggttgcagacaatgacagtggctccaccggactattttccgctatgagcaaaatactcggaacatcggtagggggcgaaaatctgagatactacctgggtgacaacttgtatgtcgtgcccatcccaaagaagaacggtcatacagctattgaagatctcttcgataatcaagtcctggacgaaaagatagatggtagaagctttgaccgcaaggggaaacaggccgacaagaccaagtggtacggcaagaatgagttcgccactaaaatagtccatgcaaagcgtcacgagttggactttgccggatttgaagctgtacttacagccttttcggaggtgatagtggattacgaaaggaagaaaaaggagatcgcgggcgcaaaagcggcgttgaaagtggccgcttga

SEQ ID NO: 8111 - RNA, 1725 nt, synthetic construct
  source 1..1725: mol_type = other RNA
atgtccgaactggagaaacttaaatcatgtagcacactcccacaattagcacacctgctgggcatcaaaggggagacactgtccagcgtcctttactggctcaagccatcacagaaatatgttcattttacggtgcccaaaaaaaacggaacaagaagactgatagctgcaccaacagaccggctgaagtatgttcaagggcagttggctgagttattgtctaagatcgaagccgagctcgaaggtaggagaactaccaagtactgcgtcctgtctcacggttttaagaaaggattctccatcgtgactaatgcggatgtccaccgcaaccgccgacacgtgttcaacgctgatcttcgtgatttctttccctctatcaatttcggccgagtctatggcttcttccagaaggaccgtaatttccatctcagtcccaagatagcgaccatcatcgcccagattgcttgtcatgacaaccagctaccccaagggagcccttgcagccctgtaatctccaatcttattgcacacgtcctggacatcaagctcaataagattgcgtccgccggacgatgcagctatacccgctatgctgacgacctgactttttcaactaatgaacgcgagttcccagcatctattgccaggctcgttcggggcagccacgataagtgggtggccggagatttgctcctcgagagggtgtacagatctggcttttcgctgaacgaggctaagacccggatgcagcatagggattcacggcaggacgccaccggcttaattgtaaatcagaaactgaacgtgcctaatgagtattacaagcttgccaggtccatgtgtcatcagctatttaccgacgggtattgctacgtggggccagatagagcctacgtgcccgacgcgaagctggaagggatgcttgccttcatttatcagatccgtaagatcaagatcgaaaacttcaaggccgaccaagctggcttcagcaaattatatgggcggttcctggactaccgatcattttacggtctggcacagccaagaataatctgtgaaggcaagaccgataatgtttacattaggagtgcactgaaggccttagcagtcaaatacccttctcttattgatccaggaaaaaagccccctctgaaagtcgacctgttcaattatactaagcgcgccgccaccttccaagacttgtccggcggcagtgatgagctgaaaaagttgatcaacaactacgcaaccaggacagctcggtttaagcacggggcccctcaccccgtcctcgtaatagtggataacgatgcgggaagtgtgggcatctttcagatgttgacgaaactcctgggtaagcctataggaggactggaccccttctatcacgtgatcgagaatctgtacgtggtccccattccaaaagttgccacgccggtggctattgaagatctgtttgaccctgccctactggctcggaaaatcgacggtaaagattttgacagaacagggaaggagaaggacggaagtaagtggtacggtaagaacgaattcgcaacaaagattgttgccccggaacgcgggactataaaatttgatggctttgagcccctactcaacgccgtggtggatgctattcagcattacgagggcgtgaaagcagccgcagccgctaaagccgctgctttgaaagccgcgaaacctgcagtggtagctattccgtga

SEQ ID NO: 8112 - RNA, 1704 nt, synthetic construct
  source 1..1704: mol_type = other RNA
atgacaaagctctcccagctcagaggggctaagacccttccccagctcgcgagggtcattggcgtgcaaccacacggcctgtcctacgcgctgtactggctgacagaggaccagaaatacgaaagctttactatacccaaacgaggagggggacgacgtatcattacggcgccaaaaaactacctgaaggtgattcaaacaaagctggcaaagctcctgttggacatccacattgagctggagggctccaggagcaaaagccagtgtagactgtcacacgggttcaagcggggatactctatcgtgactaacgccgctgctcaccggaataagcgatacgtcttcaacgccgatctcaaggactttttcccctctatcaactttggaagagtactgggtttccttactagggatcgcaacttcgccttagagcccaaagtggccactataatagcccagatagcctgtcataataatcaactcccacaggggtccccttgctcacctgtgatctcaaacctgatcgcccacgtcttggacatccatctaaataggatcgctcggaatgctaattgcacctacacccgatatgttgatgatctcacatttagcacaaatgaaaaggagttcccgcctagcattgcccggctggtcagtgggaacacatcagcatgggtccccggcgactctcttattcgctatgtgtaccgtagcggtttcaagctaaatcatgacaagacccgcatgcagaggcgcgatagtcgtcaggacgccaccggcttgatcgtgaacaaaaaagtgaacgttaggaacgagtactataaagccgctagggcaaaatgtcaccatctttttcaacatggcttctgctattctgatcacgacaagacggcactgtcggatgccgctttagaaggcaccatgtcattcatctatcacattcggcgcttaaagaccgtagactggaagttggaacagaagtctttttatcagctgtatagacagttcctggattatagagccttctacggactgactagaccccggatcatttgtgagggaaagacagacaatatatatctcagatgcgcaattggagcgctgagtgcgaagtttccacagtttattcatccagatcccaaagcagggctgaatatcgacttcttttattataccgacacgagcgctacttttcaggacttgagtggtggcaccggtgagttaaacaagctacttgggtcctacagggcacgcgcgtcgagcttcaaacacggcccaacccagccggtgttcatggtggtcgataacgactccgggtctaatggcctcttcaggcacctggccggcattcttgggaaacccgtgggaggtatggatccattttaccatgtttttgacaacctgtacgttgtacctattcctaaagccggggttgccgccgccatcgaagatctcttcgaagccgtgttgctgactcgcacaatcaatggccgggcctttgatcggactggaaaacaaaaggacttgtccaaatggtacagcaagtttgacttcgcaacccaaatcgtgaaacctgaaagagctaagataaactttgcaggtttcgagcctctgcttcaggcaatctccgatgcccgaaaagattttgcttctagagtaagtgctggcgctgcagcagcagctgtcaaggctgctgccgcctga

SEQ ID NO: 8113 - RNA, 1695 nt, synthetic construct
  source 1..1695: mol_type = other RNA
atgaccaagttgagccaattaagaggggctcggaccctgccacagcttgctcgagtgttaggtgtaaaacctgccagcttgtcatttgtgctctattggttagccgatgatcagaagtatgaaacctttaccattccgaagaaaggcggcgggcgacggctaattactgcaccaaagccccgccttaagatgattcagaccaaactagctgacctgttattggatatacacgtggagctagagagtgctagaagtagagttcagtgccaactggcccacgggtttaaacctgacttttccattgtcacgaatgcgaccgcacacaggaataagcggtatgtgttcaatgccgatcttaaagacttcttcccgagcatcaatttcggcagagtgctcggattcttcacaaaggatcataacttctccctggagcctaaagtcgcgactgtgatagcccaaatcgcctgccacaacaaccagttgccccagggaagcccctgtagccccgtgatctccaatctgatcgcccatgtgctggatattcatctctcaaaagttgcgcgagcgggtcgttgtacgtacaccagatatgtagacgatctgacattttccactaatgagaaggagttcccagctagcgtggcaaggctggtatctggaagatcagacgcttgggttccgggcgattccctggttaaacatgtgtaccgttctggctttaagctgaactacgataaaacaaggatgcagaggcgcggctctcggcaggatgcaactggtctgatagtcaacaagaaagtgaacgtgcggaacgaatattacaagattgcacgcgccaagtgtcaccacctgtttttgaacgggttcagttactctgataaggacaagaaagcaatcagcgataatgcccttgaagggacaatgtcgttcatctaccatatccgtcgcctgaagacagtcgattggcagagggaacagcagtcgttctataagctgtaccggcaatttctggactatcgagccttccacggcctcttgcgacctcggatcatctgcgaaggcaagacagataatatttacatccgcagcgccattaaagcccttggggcaaagttcccagagttcattcactcagaccccagtaaaggtctgacggttgatttctttaactacaccgaggccgcagtgatctttcaggacctgagtggaggcaccggcgaacttaaaaaactgctaacttcatacaggccaagactgtcttccttcaagcacgccgctccacagcctgtcataatgatcgtagacaatgacaaaggaagcactggactcttccatcaactcgctcatattatcggaaagcctgtagggggcgtggatcccttctaccacgttctcgataacttgtatgtcgtgcccgtgccaaaaaccggtactgaagccgccatcgaggacctgtttgactctgctctgctcaagaagacaatcaaaggtcgctcttttgaccgcacagggaaggcaaaagactttacgaaatggtattccaaggtcgactttgccacccagattgtgaagcccgagagaagtactatagacttctcaggatttgaaccccttctcaaggctattctcgacgttaggaaggacttttccctcaggcctcctgtcgctacagctgtcgcacgggctgccgagtga

SEQ ID NO: 8114 - RNA, 1719 nt, synthetic construct
  source 1..1719: mol_type = other RNA
atgacccaattagctagactacgcggggtcaagactctgcctcaattggcacgggttcttggcgtccagcctgctagtctcagtttcgtgctgtactggctgccagaccagcagaagtatgagcagtttaccatacctaaaaagggcggggggtggagacttattacggcgcctaaaccaaggttgaaaatgatccagacaaagctggcagaccttctgctggatatccatgtcgagctcgaacagtctcgcagcagaagtcagtgccaactggcccatggttttaagcggggactaagtattgtaacaaacgccacagcacacaggaataagcgatttgtgttcaatgccgatctgaaagatttctttccctccatcaacttcggccgagtgagaggtttttttcagtgggataacaacttctcattggatcccaaggtagctaccattatagctcagatagcttgtcgggacaatcagttgccccagggcagcccgtgttcacccgtgatcagcaacctgatcgctcacatcctcgacatccatctgaacagattggcccgcgccggccgctgtacttacactagatacgtcgatgacatcacattctctacaaatgagaaggaatttccatcatctatcgcaaggctggtgagagggagcacggacaagtgggtccccggagacagtctggttaaaagggtatattcctcaggctacagcctgaactacgacaaaacgcgtatgcagaggcgagactctagacaggatacaaccgggctgattgttaataagaaggtgaatgtgaggaatgagtactacaaaaccgcacgcgcaaagtgcgatcacctgttcaagaacggtttttgtttctccgataaggatcggaagccgattttcgacgatgcactagatggaaccatgggttttatccgccaaattcgggggttgaagaccaaagattggcagagcgagcaaaattcgttcttcaagctttatcgacaatttctggactaccgcgccttccacgggatcacccgtcccaaaattatttgcgagggcaaaaccgataatatctacctgcgatgtgccttccagaggctccgggccagattccctgcctttatccacccagatcccctcgttggcctgactgttgacctgtttaactacacagaagcggctgccacgttccaggacttaagcggcggaactaacgatctttccaagcttttatcacattatgccgcgagagtgtctccattcaaactcagccccgaccagcctgtaatcatgatagtggacaacgacaaaggttcggctgatctctttcgtaaactgaccaagatgttgggccgtgttgtgggcgggcttgacccgttctattatgtgtgcgccaacctgtatgtggtcccagtgccaaaagggataactactctcgaagctgcgattgaggatctctttgaacccgccctcctggctcggaccattaagggaaagaattttgacaggaccggaaaggaaaaagaccggtcaaaatggtatagcaaagtggaattcgccacagaggtcgtgaaaccagagagggcaacaatcaatttttccggattcgagccactccttcaggcaatttccgacgcctgcaaggactttactggacggcgcgccgcgccttctaagcctttacccagtgcctccgcttccgcaggctctccttga

SEQ ID NO: 8115 - RNA, 1476 nt, synthetic construct
  source 1..1476: mol_type = other RNA
atgggtaggcagtggctaaagtcctaccggtacctaactatcgccaatgagtatcctagagctcttcctcccatcgtgacgcagagcgccagtcggttgagcaacgttaagagcttggatcagttagctgcggtgctggaggaacagacaaaagtgctcagctattggctgtacaaggctgagccatcaaagaaatatctcgagtactccatccccaaaaagaacgggggctggaggcacataactgcgcccaaagatgggctgaaaaggatccagggaaaacttgcccggctgctcgctgaaatttacaatgatattgaacaacggaggtccaacgggtcgttcgactcatccagagccagcgagtctgtgctcgcacatggcttcaaagacaagtactcgataatcaccaatgcacgagttcacgtgggtaaacgctacgtgttcaatacagatctcgaggacttttttccatcaattacatttggcagagtacgggcattcttcattgcagataataactttcggctgtccccacccgtcgcgaccatgatcgctcagctggcctgctataggaatcaattacctcagggcgccccgactagtccaattatctctaatttcatcgcccacatactggacattaagcttaacaagatggcgcgcgcagggaattgcagctatacccgttatgcagatgacctcacattttccactaacgaggcacgttttccttctgccattgctagactcgtggccggaactacagatcggtgggtggcaggcgacggtttgctgggaagggtctacgcctcaggcttccgagtcaatcacgacaagtctcgcatgcagttgccgaagagccgccaagaggctaccggtttgaccgtgaaccagaacgttaacgtcgcaagcacatactataaattagcaaggagtatgtgcgaccacctttttacgggaggcacctgttttgaaacgatcgacggaaagtgggtagagttcccagcccataaactgcaaggccgcatggatttcatttatagcgtgaggagaagtagaatcggaatttcccttgaccatgtgtcaaagaagcaacatcccatagcttatcgtgaacgagaagccgagttttgtaagcgccagtcttcttttacaaaactgtatcgcaacctgctcaactaccagtccttccacggtatggagaagcctgtcattgtgggcgaagggatcaccgatggactgtacatccgagctgccatccagtccaccggtgggctgtttcctaagctgtatgaccccactggcgatggcgaagtcctagttagtttctaccgacactcagacaaaaaaaacctgagtaattgggggggaagattcgccacccaggccgtacatcacagagtctacgaggttgatggggctgtgcagaacaaggccaaggccgctcggaattcttacagacgccagaggtga

SEQ ID NO: 8116 - RNA, 1713 nt, synthetic construct
  source 1..1713: mol_type = other RNA
atgcttgaggaacaaactaaagtgctgtcgtattggttatacaaagccgagccttccaaaaaatacttcgaatactcaatcccaaagcgcaatggtggttggcggcagatcactgccccaaaggatggcctcaaacgcattcagggaaaacttgctagactgctggcagagatatacaacgatctggaacagagaaggctgaacgcagagtttgattcctccagggtttctgattgcgtgcttagccacgggttcaaagacaagtactctattattaccaacgcgcgagttcacgtcggcaaacggtatgtgttcaacgccgacctggaggatttttttccttccataacctttggtagagtgcgtgcattcttcatcgcggataacaacttcaggttgaacccgtccgtcgccaccatgattgctcagttggtgtgccaccgcaatcagttaccccagggtgctccctcgagccccataattagcaatttcattggacacatgctggatattaaactgaataagatggccaaggtgggaaattgtagctatactcggtatgcagatgatcttactttttctacgaacgaaacacgatttcctagtgcgatcgctcgcttagtggtgggcactgccgataggtgggtagcaggagacggcctactcgccagggtgtacgcaagtggtttcagggttaaccacgataaaacgcgaatgcaactgccaaagagtcgacaggaggccaccggcctcactgtgaaccagaatgtcaacgtggcttcaacttattacaaacgcgcccggtctatgtgtgaccatttgttcaccggggggacatgtttcgagatgatcgacgggaagtggattgaatttccagtgtctaagcttcagggcagaatggacttcatttactctgtcagaagatccaggctccgcatgagtctggaccatgtgtctaaaaagcaacatgccatcgcttatcgcgaacgagagacagaattctgcaagcagcagagaagcttcacaacactgtaccggaatctgctcaactatcagagctttcatggaatggagaagcccattattgttggcgaaggcatcaccgacggtctgtacattcgtgcagcaataaagaccataggggcttcatttcctaagctttatgatgctacaggtgacggcggagtgctggtgtcattttacaagcactcagacaaaaggaagttttaccagataggggaaggcgcgagtcagctgaagccctttatcaccgagtacacaaagttgatggatgccttcaagactcggccgaagcaaccagtaatcctcatcgtcgataatgacgacgagggacaatcagtcctcaatgtagctggcaaccggtggaagaaagatgttaagacggccacccccttctatcacttagtatccaatctgtatatcatccctattcccgctaaaaccggcctaatcagcaccgctatcgaagacctctttgacgcggcatggctagctgcccaagacatcgggggacgtaagttcaccaaagacaatgacttcaacagcgccacacattttggcaaggcagagttgctggggcagattgtccggccaagcagagccacaatcaattggacaaattttcagacgctgctccaggggatccagggagccatcttggactatgaggttaaactggccgtctccccttga

SEQ ID NO: 8117 - RNA, 1884 nt, synthetic construct
  source 1..1884: mol_type = other RNA
atggtagattatgcagtgactgtgaacgctgaatacagcactgaccggtacacagtcaaatcatatagacacctcaccgtcgccaatgagtaccctcgggccctgcctccaatagtgacacaaagcgtcagccgcctccgtaatgttaagtcattagaccaactggccgcggtgctgaaggagcagacaaaggtgctctctttttggctctataaggcagctccccaccagaaatacgtggactatcagatcccaaagaaaaacgggggctggcgccacattactgcacctaaggatggcctgaagaggatccagggtaaactggccaggcttctgagtgagatttataacgacctcgaacaaagacgcatcgaccctgcctttgacgggtcacatccatcatcctgtgtattggcccacgggttcaaagacaagtattcgatcaccacaaatgctacagtgcacgtaaaaaaaaggtacgtctttaatgctgacctggaggatttcttcccctccatctctttcggcagagtgagagcatttttcgtggctgaccagaacttcaaactggaccctgctattgccaccatgatcgcacagttggtgtgctttcggaatcagttgcctcagggggcgccgacgtcacctgtcattagcaatttcattggacatatcctggacgtgcagctgaataagttagcggcgaacggcaactgttcttacactcggtacgccgatgatctcacattctccactaatgagaaggccttctctcccgctatcgcacgactggtgtccggcactaccgatcgatgggtggcaggagacggtctggtcggtagagtgtacgccagcggattccgaataaaccatgacaagtctcgtatgcagctacccaagtctcgccaggacgtgacggggcttacagttaatcaggccgttaatgtctcagcaacctactacaagctagctcgcagcatgtgcgatcacttatttaccggaggcacctgccatgaaaaaattaacggcgaatggcacaggtttccggcctataaacttcaaggtagaatggacttcatctactctattcgtcgcagcagactaaaggtttccatcgactatctgcccaaaaaacagcagccggttgcctttcgcgaaagggaggccgagttttgtaagcaacagaagagcttcacgactctttacaggcatttgcttaactataggagtttccatggcatggaaaaaccagtcatcgtgggggaggggataaccgatggactgtacatttccgctgcgattaagagtttgggagccctctttcccaccctgttcgatgccggcggtgatggggaggtcaaggcatcgttttataaacacaccgataagcggaaattttaccaaattggagaaggggccagtaaccttaagccatttattacggagtatactaagatcatggaaccattcaagaccattccacggcaccctgtgataatcgtggtagataatgacgatgaaggccgggcagttttaagcgttgcaggtaaccggtggaaaaaggatctgaaaaccacagcagccttttatcacctcgtaagcaacttgtacatcatcaaaatacccttcggcagttccgcctcttcctccgctattgaggacctgtttgactctgcttggctgagtgctcaggacataggcgggaggaagttcagcaaagataatgatttcgacagtgctacacattttggaaaggccgacctggttggacagatagtgcgacccaaaagaactacaatcgattgggctggcttcgtcccactcctcgcggctattgagggagccatcatcgattacgattccaagctgaactcagtgccctga

SEQ ID NO: 8118 - RNA, 1779 nt, synthetic construct
  source 1..1779: mol_type = other RNA
atgcccccaatagtgacccagagctccagtagactgtcgaacgtgaagtcattagaccagctcgccgccgttctgggagagcagaccaaggtgctgtcttattggctctataaagccgaacccgcgcggaaatacgagcagtattcgattcctaagaaaagtggcggctggcggcatatttccgcacctcgcgacggtcttaaacgaattcagggtaagctgagcagactgttggcggagatttataatgatagggagcagaggcgcgtgaacggctcatttgacgggtcccgcacaagcccttacgtacttgctcacgggttcaaggacaaatatagcatcattacgaacgctcagatgcacgtaggcaagcgctttgtctttaacaccgatctcgaagacttctttcccagtatctcctttggtcgagtgaggtctttttttcgcctggatactgacttccggttagatccagctgtggcaacaatgatagcccagctgacatgttttagaaaccaactcccgcaaggcgccccgactagtcctattatctctaatttcatcggtcacatgctggatatcaaactgaataagatggctagaaaaggcaattgttcttacacaagatatgccgacgatctgacattctctacaaatgaagaaagttttccaccagcaatcgctcgcttggttgcagggaccacggatgaatgggtcgccggggatggactactggctcgagtctacgcctcagggttcagggtgaatcatgacaagtctagaatgcaggtggcctccagtcgccaagacgctaccgggctcaccgtcaaccgtaccgtgaatgtcagcgccacgtattataaattggcacgggccatgtgcgatcacctgtttaccgggggtacctgtcatgagatgaaaggcggaaaatggactgtcctcccgcctcatcgtttacaggggaggctcgacttcatttattcagtacgaaggtcccggctgaagatccccctggaccacgtcgcaaagaagcaattcccaatcgaatacatgaagagggaagcccttttctgcgatcagcagaaagcgttctctaccctctacaagaatatgatgaactacatgaccttccatggtatcgagaagccaatgatcgtgggagagggcataactgacggcctgtacatcagagcagctattaagactgtgggacctgcctacccgaagctataccacccttcaggcgacggggaagttcttgtgaatttctacaaacacacagataagcgaaagttttaccagatcggagagggagcggcacccctgagatcattcattgccgagtatcctaaattgatgggcaggttcaagacgaaaccaaagcagcccgtgattttgattgtggataacgacaaagagggaagggatgtgcttaaagctgctggtagccggtggcagaaagatacatccgtgcctagccccttctaccacctcgtctccaacctgtacatcatccccttgccaaagcctggcgccaccgatgtatgcatagaggacctttttgaccagacatggctcgcagctcaaaacattggggcacgtaagttcactaagaagaacgattttgattctgccacatacttcggcaaggcggacctggtcggccagatagttcggccccaacgggctactatcgactggtccggatttgttcccctgctagaggccgtgcagggagccataagcgactatgaagttaaactgagcttaactccatga

SEQ ID NO: 8119 - RNA, 1803 nt, synthetic construct
  source 1..1803: mol_type = other RNA
atggcttatgagtatccccgggcgctccctccaatcaccacacaatccgtcagcaggctgagaaacgcacatagtcgcgctcagctagccgccattctcggcgaacagtccaaggtcctgagttattggctgtataaggccgatctatctaccaagtacactcagtactcaatcccaaaaaagaatggcggctggaggtatatcaccgctcctcaaaacggcctgaagaggatccagactaagcttgcccgcttacttgcggacatctataatgacattgaacagcgccgactgaatgagagcttcgacggggtcactgtgtcagagtgtgtcctgtcccacgggtttaaggactcttacagtattatcaccaacgccaaagtgcatgtgggaaagaactttgtgttcaactcagatttggagaactttttcccatccataagctttggcagggtcagaggcttttttatcaacgaccggaactttagacttcacgaggacgtggccacggccattgctcagatcgcttgctatcagaaccagttgcctcagggggcaccatgtagtccgattatcagcaattttattgcccacatgctggatatcaagcttaataagatggccaaaaaaggtaattgctcatacacgcgttacgctgacgatctcaccttcagtactaatgaaaaacatttcccggctgagattgcacgcctggtggcagggacaaccgatcggtgggtagcgggaaacggcctgatctcaagggtgtatgcaagtggctttcgaattaatcacgataaatcccgaatgcagctgcctatgtctcggcaggaaacaacaggcctgactgtaaaccagaaggttaatgtacccgccacctattataaagccgcaagatccatgtgtgaccgcctgtttaaggagggatactgctttgaaatagtgtcaggaaaatgggtggaggtgccgtctgtcaaattacaaggtcgaatggacttcatacactctgtgcggatgggtcgcctcggaatatcgttagatcacctgcctaaaaaacgttttccaacagcgtacagggacagggaaaacatcttccgtggtcagcaaaaggccttctcaagtatttacgagaagttgctgaactacagatcttttcatgagatggtgaagccaataatagtgggtgagggcatcacagatgggctgtacattaatgctgccatcagaacaatcggcggactttaccccagactatttgaccctgccggcaacggaacattgctcgtggacttctacaaacacagcgacaagaggaagatctaccagattggcgaaggagctaaacccctgggcgcattcgtaaaagactacgctaagctgatggagcccttcaaggcaaagccctccaatcccgtcatagtggtcattgacaatgataaagaaggacgcgaagtgcttaccgcaattggtaagcggtgggggaagactatcgacgggaaatctagcttctatcacttggttagcaacttgtacgtcgttccagttcccgcaacggggggggttctcactagcatcgaggatctgttcgattcgacctggctcgccgctcaagatatctccggaagaaagttcacgaaagataatgactttgacagctccacccatttcggaaagacacagttcgccgggcaaattgttcggcctaaacgggcctccattaaatgggatgggttcaagcccctgctccagggtattcaggatactatcctcgatttcgaattacagagctctcctggcacctga

SEQ ID NO: 8120 - RNA, 1701 nt, synthetic construct
  source 1..1701: mol_type = other RNA
atgtccaagctcgacgcgctgaaacaggctaaaagcctgtcggatttggcctacatactcggggagcagccaaaagtcctcagctacgtcctctacatgatcccctcgaccctcaagtacactccatttctgatccccaagaaaagcggtgggacccgtaccatccaagcccccatcgaccgcttgaagcgaatacagagggctctcgcagacctattgcaggacatacaggaggagattagtacaaagcgcaaagtggacaaaagacatgccgtgagccatggattcaagcggaagctttctattatcactaacgccagaaatcacaggaacaagacatacgttttcaactctgatctggagaattttttcccatccattaacttcgggagggtatacgggtttttcgttcacaatgagacatttagtctggaccctaaagtggccactgtgatcgcgcaaatcgcctgtcatgataatagtctacctcaggggagcccctgctctccgatcatttcagactacataggccacatcctggatatgcggctctcaagactagcttcccgccaccgttgtacctatacccggtacgtcgacgatctgtctttctccacctcacaacctaattttccaaaggagattgcataccagcacgagggagatcacaaatggctcgctggcgatgcactcgtgaaaaacgtgtttaagacgggttttaagttgaatcatgccaagacgcgagttcaatataaactttctagacaagaagccacaggcctgatcgtcaatagaaaggtgggtgtgccgactgaattttatcatctcaccagggcaatgtgccactccctgtttaaccaggggttcgccttcgttgtcaaagacgggattgcccagcccgtctcagatgccgttgtgcgtggccgactgtcatatattcaccacgtacggagtatgcagaatacactggaaaagggccctagcttacagggtacggccccttttcggttgtaccagaggtatctcaatttcaaaagcttctacggcatctcccaaccagtcattatcggagagggcgtcacagacactatttatctgaaggctgcgcttaaccagctggccggcaaattccccaacttaatcgacgtgggccatgggaccaaggagcacaaactgactttttttaagtatgggaagtcttcccgggaactgatgggattaagcggaggcaccggcgagctgaaaaacttactgggggattaccgcaagaggatatcaggattcaagttcggaggggcaaacccggttataatcctggtggacaatgatgacggcgcagaaaagtttttcaagactctgggaagcatgacaaagaccaaggtgacgggaaccgatcccttttattatgtatatgccaacctgtatgctgtgcctattcctcccacaggtggaccagtggctgccattgaaggcctgtttgatccatccctacttaatatccctcatgagggaaaaaagttggacctgactaacaaagaaacagatggcactaagttctacagtaaacatacattcgccaaatctgtggtaagaccaaaccaggataaaattgacttcaccggctttgaaccccttttgcttgctatcgagcaggtgattgcggacttcgcaggtcgccttgctgcaggtaccgctccttga

SEQ ID NO: 8121 - RNA, 1704 nt, synthetic construct
  source 1..1704: mol_type = other RNA
atgagcaaactcgaagccttaaagaaagctaaatccctcagcgatctggcaagtatcttgggagaacaaccgcgggtcctgtcctttattctgtacaaaatcccgagcaatctgaaatataagagcttcgaaattacgaagaagtccggaggaaagcggacaattcatgcccctgtcgcgagattgaagcggatccagaggtcgctggccgaccttctgcaggatatccaggatgagattaagattcagcgcaaagtgaatgataactgcgtagtctcccacggatttaagaggaaactgagtatcatcactaacgccaggaatcaccggaataaaacatatgtgttcaactcagacctgaaagacttctttccctctatcaactttggtcgtgtatatgggttcttcgtacgaaaccaagagttcgcgttggaccccaaggtcgccacagtgatagcccagattgcctgccagggcaactcattgccccagggctctccttgctccccaatcatctctgattttatcggacatatcctggatatgcggctgtcgaggatggccgcaaggcatagatgtacctacactcgctatgtcgatgatctcagcttttccactaataagagatctttcccgaaggctatagcataccaaaatgaggataattctcatgagtggttagctggcgacgccctgttgaaaaacgtgtttaagagtgggtttaaactaaacaatgccaagacacgcgtgcagtataagtccagcagacaggaggcgactggtctgatagtgaataagaaagttgctgtgcccaccgaattttatcacacaacacgcgcgatgtgtcacaacctctttaaagatggctttgctttcatcgttaaggacgggacacctaagcccatatcagacgctgtgctcagaggtcggctaagttacattcatcacgtacgaagtacccagaacaagttagagaacggtcctcctcttaaaactacggccccttttaagctgtatcagcagtacctcaactacatttcctttttcggcagcagtatgccagtgatcataggtgaaggagttaccgataccatctacctgaaagccgctctcaatcagctggcggcaaagtaccccaacctcatcacagttgtggacaaaaagaaggagcacaaacttcagttcttcaagtacagcaactcatctcgagaactgatgggccttagcgggggcacaggggaactaaagaatcttctcggagagtataggaagcgcatttctggcttcaagttcggaggaacccaacctgtcatcattttggtcgacaacgacgacggcgccaaagccttcttcagcacgttgggctcaattaccaaaactaaggtgtcaggcactgacccattctactacgtttatgctaatctgtacgctgtcccaattccacccactgggaatcccgtgaccgcaatagagggcttatttgaacccgcacttcttaataccatctacgacgggaaaaaactggatctcaccaataaagagccagacgggtctaagttttattccaaacacaccttcgccaagaacgtggtgcgtccaaaccaagataagatcgatttcaagggttttgagccactgctgacggcaattgaccacgtgatggccgactatgcagcaagactggttgctgggaccgctccttga

SEQ ID NO: 8122 - RNA, 1704 nt, synthetic construct
  source 1..1704: mol_type = other RNA
atgagcaaactcgaggctctaaagaaggcccaatcgttgtccgacttagcgtgcatattggaggagcagcccaaggtcctgtcatacgtcctctacaaaattcctacgaactctaagtacaaagccttccagatccctaaaaagtcgggcggcacaagaactattcaggctccagtggacaggctcaagcgcatccaaaagtccctggcatcactactgcaggatatccatcttgaaatccagaaaaaacgaggggttaaggctaactgtattgtgagccacgggttcaaaccgaaactgagcataataacgaacgctaggaaccataggaataagacgtacgtgttcaactcagaccttaaggacttttttcctagcattaactttggccgcgtgtatggattcttcgttaaaaatgaggatttcgccctggatccaaaagtagcaaccgtcattgcccagcttgcatgtcacggtaattccctgccccaagggagcccttgctctccgatcatctccgacttaatagggcacattctggatatgagactctccaaggtggctactcgttatcgctgtacctacacaaggtacgtcgatgatctgacctttagtacaaacgaaagcacatttcctaaggccatagcgtatgaagacaaggataaccagcacaagtgggtggccggagatgcccttcttaagtctgtatttaaaagcggcttcaagctgaatgatgctaagacccgagtgcagtatcagtcctcacggcaggaagcgacagggctcattgtgaatcgcaaggttgcagtgcccaccgagtattatcacgccacaagggccatgtgccacaatctatttaaagagggatttgccttcaccgtcaaagacggcgtggctaagcccgttagtgatgccgtgttacggggtcggctgagctacattcatcatgttagatctatgcagaataagctggaaaacggccccagtctgaagctgactgccccattcaagctataccagcaatatctgaactatgtatcctttttcgggatcagtaaacctgtcatcattggagagggcatcaccgacacaatctacctgaaggcagcactcaatcagttggccggtaaattccccagtctggtggaagtggccggcggagagaacgtccacaagctgggattcttcaagtatggaaatagctctcgggagctgatgggcctgagtggtgggaccggcgagttgaagaatttgttgggggaataccgcaaaagaatctctggcttcaaattcggcggtgcacatccagttattatcctcgtcgacaatgatgatggcgccaaagcctttttttctaccctcggaactatcactaaaactaaagtctcaggaaccgacgcattctactatgtgtacgcaaacctttatgctgttccaatcccaccaactggtaattctgtggccgcgatagaggggctctttgaccctacactgcttaaaaccatttacgatggccggcagctggacttaactaacaaagagccggacggatcaaagttttacagcaagcacatcttcgccaagtccgtggtacgtcccaaccaggacaaaattgattttaaggggtttgaacctctcttgacagctattgaccaagtgatcacggactacgctgctaggcgagctgcgagatccgcaccctga

SEQ ID NO: 8123 - RNA, 1710 nt, synthetic construct
  source 1..1710: mol_type = other RNA
atgagtttcgaacttgttgccctgaagaatgctgtcgatctgactgatgttgccgtgctgcttggggtcaagccaaaagatctgtcatacgctctatacatccaaccaagcagcgccaagtatagggcttttgagattcctaagaagggaggcggtttccgcctcattactgcccctgaacccagattgaggagtatacaacgccgtcttgccgatctgcttctgacgattcagcaggaattagaggttcagcggacaaaaagcaagggtattgtggcggcccatggctttaagaagtcccttagcatcatcactaatgcacggtgtcataggggcaaatcatttgtgtttaatggcgacctcaaggactttttcccatcgatgaactttggaagagtgtatggctttttcctcaagaaccgggattttgagctgcacccaaaagtcgctaccgtgttggcccagatcgcctgctttgagaatcgcctaccccaggggtcaccttgctctccggtgattagcaatttcatcgccggaattctcgacaggcacctctccaagttagccgcagagaaccggtgcacttatacccgctacgcagatgacctgacattttctacaaatgaggcaatattccccgagcaagtcgctcgcttagttagaggcgccaatgataagtgggtggccggttatgaacttgccgggcgcgtggcacgatccggatttcagatcaacgagctgaaaacaagactccaataccggaattcaaggcaggacgtcactgggctagttgtgaatgagaagctgaatgtgcctagtgagtattacaagttggctcgggccatgtgtcatcacctgtttaaagacggaactgctttccgtacgatcgacggaattaagatccctgtatccgacgaaagagtgaggggcatcctgtctcacatccaccatgtgagaacttcccagggcggtcctaaacacccacctggtgacccaaaagcaccagggcatcagaaactgtaccgacggttcctggattatgtctcattctttggacatcagcagccgaccattatctgcgagggcaaaacagacaatgtgtacataaagacagcgatgcaaatgctggcgccaaagtttcccgacctggtagaggtagcggggaacaagttcgatctcaaagtcaagttcttcaaatatggccgagctagtgcccagattcagaacctgggtggagggagcggggcacttaaaaccctcttgatggaatatgaaaaacgtttgaaagggttcgcaggcaccgcttctcagcctgtgataatggtgctggacgtagacaagggtaccacccaaatctggagtgaaatctctaagattctgggaaccgcagttgcaggccacggacccgatcccttctaccacgtcagaaacaacctctacgtagtcccgattcccgctaaacctggggtggaaacgtgtatcgaggatctgtttgacgccaaaaccttggcaataccccatgacggcaaagtgttcgacaaggagagcgataaggataagcccggcacctacagcaagaacacattcgccaaccaggttgtcagggaaaaccgacactccattgatttctctggattcgagcccttactcgaagctatcaacgctgcgataaaaaactactccaccaaggtggccgctatgacagcctga

SEQ ID NO: 8124 - RNA, 1683 nt, synthetic construct
  source 1..1683: mol_type = other RNA
atgtcccccgaactcaaactgctcaaggctgctaatggcctgagtgatgtagccagtctgttaaatgtgcggcctgcggacctttcctacgcactctatattctccccaacgaggtcaagtacagaaccttccagatacctaagaaaggtggagggttccgcgttattgcggcacccgagtctcggctccgatacatccagaaacagcttgcggatttgctggtcgctatcgaattggggctggaggcagggcgaactcagaggaagtttatcgtctctcacggctttaagaagaaaatgtccatcgtcacgaatgcaaagaaccaccgcaataaggaattcgtgttcaatagcgacttgaaagacttcttcccatctatcaacttcgggcgcgtgatcgggttttttgtgaaaaatcgagattttgggctgaagccgaaagttgctactgtgctggcccagatcgcctgttttaacaacaagcttcctcagggaagcccttgctctccagttattagcaacttgatagcagggattctggatagacatctctcaaaaatggccgtccagcacaggtgcacgtatactcgttacgctgacgatctgacattttccaccaacgagagagtgtttcccgaagctattgcccggagggtgagaggcgccgaagataaatgggttgctggtcacgagttagtgggaagggtggctcggtctggctttcaagtcaacgagcttaaaacacggctgcagtacaggagcagcagacaggataccacgggactggtcgtgaatgagaagctcaacgttcccgccgaatattataagctgacacgggccatgtgtttccacctcttccgcgatggcaccgcatttgcggtcgatgataatgccaggatgcccattagtgatgagcgtttgcgcgggagactggctcatctgtaccacatccgggggctggaaaacggtcacaaaaagtatccccaaaagaaaggtcctgcttatgtcaaactttatggcaagttcctagactacatcgccttttacggacatcaacgaccaaccatcatctgcgaaggcaagacagataatatctacatcaagaccgccattcaaatgctggccccaaaatttccagagctggtagacgtggtgggtgcagagtacaagttgaaggttaagttctttaagtacggcaaagccagctcaaatctgcaagacttgtccggaggcgcaggccagctaaaaacacttataatggactacggtaacaggctaagtggattcacttcaggagcaaagaaccctgtgataatggtgctggatgtggacaaaggcacaacacagatttgggccgagctttccaagattctgggaaagagtgtggcgggacatgacccatactatcatgtgagggacaacctatatgtagtgcctgttcccgtatcgtcaggcgccgaaggggacatggaggacctcttcgacaagaaaactctggagctcgagtatgaccagaagaaattcgataaaaagagcgacaaggacatgccaggcacctactccaagaatacttttgctaatcacgtcattagagacaaccgtgctaccatcgatttctcaggcttcgaaccgttattaaaatctattcgcgacgtaatagccgattatgcagccaaaatctga

SEQ ID NO: 8125 - RNA, 1728 nt, synthetic construct
  source 1..1728: mol_type = other RNA
atgagcgtggagagtctgctcctcttaagattgagagcttgtacagatctgtcttccgtggctcgtgtgctgggcttgactcccgctgtgctttccttcgtcctatataaaatccccacccaggccagatatcggacctttagcattgccaagcgggccggaggaagtcgcgcaatcatggcgcccaacgagagattaaaaatggttcagcgtcgactggcctctgtgctgttacagatccagaccgaacaggaacggtccaggacgaagaaagcctgtatactgtcccatggatttaagcgggagcttagcattctgactaatgcccggaaccaccgcaacaagaggttcgtgtttaacctagacctggaagactttttccctacctttaattttgggcgcgttcggggttttttcatgagggaccagaacttccaacttcatcctgccgccgccacagtgttagcgcagattgcatgtcacaataatcacctaccccaaggctcgccatgctcaccggtcatttccaatctactggcacatatgctcgacctcaggctgaataagatagcacgaagacacaaatgcacttacactcgctatgccgacgacctgaccttttctaccaacaagaaggatttccctgaagtcataggcgctaccagtcctggagatccaaataaatggagcgcagggaacgatctcctcgcgtccgtctacctgtctgggcataagattaaccatagcaaaacacgtatgcagtatagagatagtaggcaggagactaccggcctggtcgttaacaggaagatcaatgtgtcagtcgactactacaaattagttcgggccatgtgcgatcgactttttgcatctggtattgctttcagacaggacaaaaacaagattgagccagtgtcccggagccacttgcagggcaaacttgcgttcatctaccatatccgcggtcaggagacgagccaccgcaaactgcagaaaaaagaccagccaggctattatcgcttgtactcacaattcctggactattgtaatctttacgatgtcgaccggccaacaatcatttgcgagggcaagaccgacaatgtatacattaggtctgccatagaagccctctcaagcaaggtacccggattgctcgattcagagaagaaactcactgtcagactgttcaagtacactaaaatcacgtctaccatccaagacctggctgggggcacggaccagctcaagaagctggtgagagagtacgcaaaccgtactcaaatgtttaagacgacacccagccaccctctgatcctcgtgacagatgtggataagggcagtacagagtttttcaaggccgtaagcgctatcttggggacaaccgttgctggagcagacccgttttatcaccttatcaagaacctgtatgtcgtacctgttcctaagattaaacatccagaaacagccatcgaagatcttttcgacgataccctcttgaatgagaaggtggatgggaaatccttcgataggaccaacaaagagaaggatggtacaaagttctacgggaagcacgtgtttgctaccagggtggtgtggcccaatcgatctacaataaacttcgcccgctttgaaccgctgctgcgagccttcgaagacgtgaaatcccactacaaaactctgactagtacctcggttaagtcaccagctcccatcgcggcagcagcttga

SEQ ID NO: 8126 - RNA, 1722 nt, synthetic construct
  source 1..1722: mol_type = other RNA
atgcctgcagcgagccctgaactgcaacgtcttaagaaggcgaccgaccttcacggggtagctgccctcctaaacgtaaagccttctagactgtcctatgccttgtattatatgcccccagcgaccaaataccggtcatttacagtgcccaagaaaaggggcggcacacgaacaatcagtgccccgcacggaggcctcaaatacatccagaagcaattggcaaccctgctactgagtattgagaaggagctagagggcgatagacggaagaactccatactggcgcacggctttaagaaggagctcagcattattacgaacgccatccgccacaggaacaagagatgggtgtttaatattgacctccgagacttcttcccctctataaatttcggccgagtcagaggcttttttattgctaacaaccagtttgctttgacccccaaaacatcaacaatactcgcacagctggcatgccatgataatgttttgccccaaggctccccgtgctcccctccaatctccaatcttattgctcgctctctggattatcggttgaatcggctcgctcgggaatgcaactgcacctacactcgatacgctgatgacattacttttagcaccaacgagccagagttccctgaaagaatcgcagtactcgcagggcctcatgcttggcagccaagtgaggagctcgcatcaaggattgtgtcgagcggattcgaaattaacccagacaaaacccgcatgcagtatagggacagtcgccaggacaccaccggcttgatcgtgaatagacacctgaatgtgcctgtggagtactggaaacaaactcgtgcaatgtgtcatcgcttatttgtcgatgggcaggcctatagggtgttcgatggcgagaaggaaccgatctccctcgactctcttaggggaaggttaaatttcatctactacatccgttctctgactctgggcaaggcgaatcttgagaaacccaaagggatccccggatatcggaaaattttcgccaggttcttgaattataacgccttttggagcatcgaaaagccagtcatcgtctgtgaaggcaaaacggacggaatctacctccggagtgcaatacgatctctgcatgccaaatttcccgatttcttcgaaactgtggatggaaaggtgaagatccgccccaccttctttaaatacaccacaaacacgcgggaggttcaggacttaagcggggggaatggtcagctgaaaaatctggttgcccagtacgctcacagaacaaagggtttcaaagggactccaaaggccccagttataattgtgaccgactgtgacaagggagccgtacatctgtttgaagaggtgagcaaaatcctggggagaactgtcgccggagctgacccgttctattaccttcacacaaacctgtacgtcgttcccatacccaaactggggcttcctgaaaccgccatcgaagacttatttgataagacactgctggatactaagattgatggtaaaactttcgacaagacaaaccacgagaaggacggtgctaagttctactccaaatttactttcgccacaaaggtgattgctgcctcaaaggtgcctgtggattattcaggtttcgagccactgctacaggcaatgctggatgtcgaggccgattttgccgcacgcctcgctaccgttccacctacggtgctgcccgcccattga

SEQ ID NO: 8127 - RNA, 1749 nt, synthetic construct
  source 1..1749: mol_type = other RNA
atgtctgtgagttcccttgacctggggcgactcaagcgtgccgctacactgacagatttggccgcagtgctcggtgtggaggctagtacactgtccttcgctctgtacattatgcctgtgcatgagcgttatcacacctttactgtacccaaaaaacgcggaggcgaaagaatcattaatgccccaaacgagagactaaagtttatccagaagaagctcgccgatattctgttgcgcatcgagcgcgacttagaagcacctttgagagaggcagctaacaacggagccaaaaagcttcctatcttgtcacacggctttaagaaggagctttctatcgtgactaatgcccataagcacaaaaatcggcggttcgtttttaatctcgacttggcagatttttttccctcactgaatttcggcagagtgaggggattttttctccacaataatcacttccagcttccagagaaagtggctactcttctcgcacagatcgcctgcttccagaacgagctgcctcaaggaagcccctgttctcccccaatcgctaatctgatagctaatatcctggacgtgcgcttaaacgcactggcgaggagctgtcagtgtagctacacacgctatgcagacgacattaccttctccactaataataaggagtttcccagccatatcgccgcccagaactccgacggccattgggtgccatcggacaagctgattagcaggatttcggccagcgggttccgcataaatgagtctaaaacacggatgcagttccgggattctaggcaggaagccacaggtctgattgtcaaccgcaaactgaacgtgccggtggaatattataaggagactcgagcactgtgccattacctgtttcacgggagagtccctgtgttaaagatcgaaggcggtagcatcccagtgacaacctcatccttaaggggccgactgaatcacattttccacattcgtggcatagaaacggggcacaaaaaaccagagaaaagtaagtacccgggctatttcaagctgtacgcccaatttctcgactacgtctcattctggggtattgagcagcctacgatcatctgcgaagggaaaaccgataacatctacctaaagaatgctatgagagctcttaagcccaccttcccccatttttggaagttcgtagacggcaaagaacagcagaccattaacttcttcaagtacaccaaatgctcaaacatcatacaggacctgtccggcggtaacggacaactcaagaaccttgttcacgagtttgaaaaaaggacccggaagtttcgaagcctccctaaggctccggtgatcatcatcactgacgtcgataaaggggcaaccgacctgttcaaagcgatgaaaaagattctggggtataccgtcgacggcgataagagttggtactatttgcgggataacctatacattgtaccagtccctaaggggggaagagcggaagtcgctatagaagacctgttcgatcccgccttgctcgaggttgagttagagggaaagaagttcgatcggactaaccatgaaagtgatggagaaaaagtttattccaagtttaccttcgctacgaaagttgttgccgcaaggagggatgagatagattttggtagatttcaacccctactccaagccattctggatgtgcaggccgactacgctcagaaaatagcccatgccgtaccatctcctgcgcaggccacagcggcatga

SEQ ID NO: 8128 - RNA, 1734 nt, synthetic construct
  source 1..1734: mol_type = other RNA
atgaccgttaaatcattaacgcttgaaaggcttaagaaatctacagacttgacagaagtggccatactgttgggcgttaaaccatctgctttgtcccacgccctatacatcacccccactgcaaagaagtatcatacattcagtatacccaagaagagaggaggagagcgtattatcacggcgcctaacgaaaggctgaaactgatacaggctcgtctggccgccctactgcttcagattgagcaggatctggaggccacacagtccaagagttgtatcctggcgcacggcttcaagaacgagttatccatcattacgaacgccgccaagcatcggaacagaaggtttgtgtttaacgtggacctcaaggactttttccccagtattaacttcggaagggtacgagggttttttatggctaatcgcgatttccaattgtcagaaaaggctgcgacaatactggcacagattgcttgccaccagaataagctccctcaaggctctccttgcagtcctcccattagcaatcttatcggacagattctcgatgtgcacctaaacaagcttgcaaaggagtgtagatgcacctatactcgatacgctgatgatatcaccttctcaacgaaccagaagaaatttccggaaaaaattgccgtactccaggccggctctgagcatacttgggtgccatccgatgaattaagctttaggatcatccgtgcagggttcgagctcaataaacagaagaccaacatgcaatatcgcgatagcagacagacgaccaccggtctgatcgtaaatcagaaactgaatgtgcctgtggaatattacaaaactgtgcgcgcgacctgtcacaaactgtttactaccggcactgccttccgcaaactcggctcaaaactgatcccaactaccccccctaaaatccgcggtcagctgagcttcctgttccatataaaggggctcgagactgggcatcggaaattgcccaagcccgagatgcctaacttttacaaactgtacgcgcaattcctcaactttatgtctttctgggctatctctcagccaacactggtctgcgagggcaagaccgacaatatctacatccggtccgccatacgggcactctcggccaagtttccagacctggtggaaaagaaggacggcaaggaacggattaagttgaccttttttaagtacacagggattgccaaaacaattcaggacctcagtgggggaaatggacagcttaagaatttagtccgagaatacccgggcaggactgagaaattcaaagtccaacccgcccaccccgtcatcgtggtcaccgatgtggataagggggccgtagacttatttaaggcagtcagcgacgaggtgggaaaaactattttgggtcacgagcaaccatggtattttctccgggacaatctgtatgttgtgccggttccaaaaggtgcaggtgccgagacagccatcgaggacctattcgattcagctctgctgacaaccgaaatcgatggcaaaaagttcgacagaaccaaccacgaaaaagacggtgacaagttctatagcaagttcacttttgccaccaaagtgattagcgcatccaagacacctattgattacgggggattcgagccccttctgcaggccatcctggacgttcaggctgattacgcagctagaatagcagccccacctgtcggcacagctgctgcagctgcgtcctga

SEQ ID NO: 8129 - RNA, 1773 nt, synthetic construct
  source 1..1773: mol_type = other RNA
atgacagttgtttccctcaggttggagctgtttaaaaaggcaaaggaccttacagatgtggcaaagatcctggatctcatgcccgctcatatttcattcgccttatataagctggatagacctggcttcgaaccgaagtacgaggaatttactgttcccaagaagacagggggtattcgtacgattaaagcccctcatagggcccttaaagcagtgcagaagcgactcgccaaagatctgctggagattgagcaggccctggaaaccactcgggtgaaaaaggtggactgtattctggcccacggcttcaagaagcggttatccataatgactaatggagaaaatcaccgcaaacgccgctacgtgttcaacgtcgacctcaaggacttcttccccaccctcaactttggtcgcgtgaggggctttttcatgaagcacaaggacttccagctgaacaaggacgtggcaacaattcttgcccaaatcgcctgccatgacaatcacttgccccaagggagcccatctagccccgtgatatcaaacttgatcgccggcgtcttagatatccggctcaatgagctggcacagcaatataactgtacatatacccgttatgcggatgatattaccttctccacctctgaaaagctatttccttcggcaataggccggccagaaccggggagtatcaacctgtgggaggcgggccctaagttactcaaggctattacaagagccggattcgagctaaaccccgtgaagacccggatgttgctcgattggtcacgacaggaggtaacaggggtcgtagtcaaccagaaagtgaacgtgcctgccgattattatgcactcgctgctgccatgtgccaccacctgtttatggacggagcctgttttacaaccgtaggcggtgtgaaaaaaccctatccgcttactaagctccgcggtaggctggcgtacatctaccaggtgagaggaaggggccctaaacctaaaccagctgtggatgacgcagaagataagcctaaattgggcaagccctgggctagcacaaacctttttcagaaatttctggactacgccgacctgtacggaatcgaaaagccagtgctgctgtgcgagggcgtcactgataatatctatctgaaagcagctattcagtccctggcgccaaagtacccaaccttgactacagccgcaggggagctcaaggtaaaacttttcaagtacaccagaagtagtgctgctctgcaacaactgtctggtggggggggaggactcggagtcctagcttatgcatacccccagagagtccgaaagtttaaaagcgggggtaagcatccactgatcctaattggagataatgacgaaggatctgagaagctgttcggggcgattaaggcaaaaactggcaaaaaagtggatgggagcgagccctggtattacttgggccagaatatgtacgttgttccaatcccgaaagttggaggcatagatacccctatcgaaaggctttttgagcctagcctgttagccactcagtatgagggcaaaacctttaataaaacgaacgcttccaaagaccctgccaagtactacgacaaaaaagtctttgcgacgcaggtcgtggccaaagacaaggccaatgtgaatttcgacggtttcgagcccttccttgacgctatcgtctccgttatcaaccatcacaaggctaaggtggggtcaatcccagtaccagctgccgccgttaccatagctacggcagccccctga

SEQ ID NO: 8130 - RNA, 1770 nt, synthetic construct
  source 1..1770: mol_type = other RNA
atgaccctcccactaaaactgagtctctaccggaaggctagagatctgacagacgttgcaaaaatccttgatttaaaacccgcacatttgtcatacgccctgtacaagttggacaagcccggctttcccccgaaatataaggagtttaccgtccctaaaaaagcaggcggagtaaggacgatcatggctcctcacaaggttttgaaggccgtccagaaaaggctggctaacgacctgttggagattgaacaggtgttagagaagacgcgggtcaaaaaagcggactgtatcctcgcacatgggttcaaaaagaacctcagcatcatgaccaacggtgagaatcatcgcaaaaggaggtacgtttttaacgtggacctgaaagactttttcccaagcctaaacttcgggagagtgcgcggcttctttatgaagcacaatgacttcgaactcgatactgacgtcgctacaattctggcgcagatcgcctgccacgaaaaccagctcccccaaggatccccctgcagtccagtggtgagtaatctaatcgcctccgtgctcgatatcaggttaaatgagcttgcaaggcagcacaactgcacttatacacggtacgcagacgatattacattcagcactaatgaaaagctgtttccaactgcaattggccgcagagagcatggatcactgaatctgtgggaggccggatcgaagctggtaaaagtgattgaacgagctgggttcgaactgaacccagcgaagacccgtatgttgcttgattggtcccgccaggaggtgacaggcgtagttgtgaatcaaaaagtgaatattcccgccgactactatgctactgctgcagcaatgtgtcaccaccttttcatggatggggcctgcttcacaatggtgggaggggtgaaacagcctttctccttgactaaattacgcggacggctggcttatatctaccaggtgcgaggcagaggccccaagactaaacccgccgccgatggtaccgaggataagcccaaatctggaaagttgtgggccagcaccgatctgtttcagaagtttgtggactatgccgacctctatgggatagagcgtcccgtacttctctgtgaaggggtaaccgataacatatacctaaaggctgccatccaggccctggctcctaaataccctgccctggccactgctgccggtgaactgaacgttaagctgttcaagtatacgaagacctccgccgctctgcagcatctcggtggtggagggggtgatcttggaaagctcgccaatgtgtacgcccaacgaacccggaagtttaaatctggaggcaagtaccctttaatccttataggagacaatgacgaggggtctgaaaagctcttcggggcggtcaaagctaaaacaggtaagaaggtggatgggtcagatccttggtattatctgggccagaacatgtacgtcgttccgattcctaaagtgggcggcatcgacacccctatcgagagactgtttgagccgaagcttctggcaacccaatatgagggcaagacctttaacaagacaaacgcttctaaggacccaacgaagttttacgataagaaagtgttcgcgacaaaggtcgtcgcaaaagacaaggcaaatgtcaatttcgacggcttcgaacccctgttgaatgcaatagtgagcattatcaaccaccacaaagccaagattgcgccgattccagccccagctccagccgttctggttgctgccgtcggcccttga

SEQ ID NO: 8131 - RNA, 1767 nt, synthetic construct
  source 1..1767: mol_type = other RNA
atgacggtggtgtcactgaaacttgaactgtaccgcaaagcggaggacatcaccgacctggccaagatcttgggtctgaaacctgcacatatctcttatgcgttataccacctgcccctgggcgataggtacgaggagttcacagtgccaaagaaaactggcggtgtgaggactattaaggctccccatcggaccctcaaagcgattcagaagagattagcaaaagacctacttgagatagaacaggcccttgagcagtcaagagtgaagaagaccaattgtatcctggcccacggcttcaagaaaaaactctctattatgaccaacggagaaaatcaccgaaaaagaagatacgtgtttaacgtcgatctcaaggactttttccctacaattaatttcggcagggtgcggggcttcttcatgaaacataacgacttcgagttgaaacccgcagttgcgacggtgttagctcagatcgcttgccacgacaacgaactgccccaggggagtccatgctctcctgttatctccaatctcatcgcttccgttatggacattcgtctgaatgaactagctcaccggcacaattgtacctatactagatatgcagacgacattacatttagctcttccgagaaaatattcgctccagcaatcggacgacgcaacgtctccagcattaatctttgggaagctggcatctctctgagccgcgtgatcaaaaaagccggattcaaggtgaacgcagctaagacccgtatgcagctcgattatagtaggcaggaagtcacaggtgtcgttgtcaatcagaaggtgaacgtgcccgctaactactacgctgaggcagccgcaatgtgccatcatctctttatggatggggagtgctttgtaaagatagccggcgtaaagcagccactccctaggcgcaagctgaggggacggcttgcatatatttatcaagtgcgaggacggggtccgctaatcaaggctgcaccagaggaccaggaggaaagacccaaaggaggtaagttgtgggccagctccaagctctttgaacgcttcgtggattacgtggatttatacggcattgagaggcccgtcgtgctttgtgagggcgtcaccgataatatctatataaaaagcgccattcaggccctggcacctatttacccaactctcaccaatcctgccggcgaactgaagatcaagctgttcaagtataccaagaccagtgcagctttgcaacagttgtcggggggtgccggagagttggggaagttggctaacacttatccgtccagaatccggaaatttaagtctggcggacaacacccactgattatcattggggatagcgacgacggctccaagaaactctttgccgctgttgagagtaagacggggaaaaaggtagatgggagtcaaacttggtaccatatgggcgctaacctgtacgtcgtgccgatccccaaaataggtaataaggatacagacatagagcgccttttcgatgtggcactgctgaaaactaattacgatggcaagacattcgacaagaccaacgccgaaaaggacggaaccaagttttatgggaaaaaagtgtttgccacaaaagtagttgcggccaacaaggccacagtgaacttcgacgggtttaaacccctgctggccactatcgcggaagtcatcgatcaccacaagacaacggtcgtctcacctacagttgccgccgtaagctcatcagccgttgccgccgggggaccttga

SEQ ID NO: 8132 - RNA, 1776 nt, synthetic construct
  source 1..1776: mol_type = other RNA
atgaccgttgtttctctgaagctggagcaatatcgcaaggcagaggatattacggatctggcaaagatctttgactctaagcctgcacatatctcatatgccctctacaaattagaccaggcgcccgccccatcgaaatacacagaattcactgtccccaaaaagagcggcggagtgagaaccatcaaggcccctcacccagctcttaaagccatccagaaaaaccttgcaaaagacctgttggagattgagcaggtactcgaagagacaagagtcaaaaagccagattgcatcctagcccacggctttaagaagaagctcagcataatgaccaatggcgagaatcaccgcaagaggaggtacgtattcaatgttgacctgaaagatttcttccccacaattaactttggtcgtgtgcgagggtttttcatgaagcacaaggattttgagctgaagcccgccgtcgctaccgtgctagcccagattgcatgtcatgataatcaactaccccaggggagcccttgttcgccggtgatcagtaacctgatcgcctcagttctggacatcaggctcaatgagctggcacatcagtacaattgtacatacacacggtacgccgatgacataaccttcagtacaagcgaaaagaattttcctactgcaattggcaggcgctatgtcggatcaattaacctgtgggaagcgggcccgaagcttctgaaagccatctcccgtgccggattcgaactaaacccagctaagactagaatgcagctggactattcccggcaagaagtcacaggtgtcgtggtaaatcagaaagttaacattcccgcggattactgcgccaccgtggctgctatgtgccaccacctctttatggacggggaatgtttcatccaggtggccggggctaaacagccattccctcttaagaagcttagaggtcgcttagcgtacatctatcaagttaggggaaaggggccgaaagtgagaataaccccagaggatgctgaagaaaaacctaagaccccgaaaccttgggcttctactaagttgttcgagaaatttgcagactatgctgatctttatgggattgagcggcctgttttgctctgcgagggcgtcactgacaacatatacatcaaggccgccatccaggccctggccctgaaattcccatctctgactaatgctgcgggggacttgaagatcaagctcttcaaatacaccaagacgagtgccgccttgcagcaactgtccggaggtgccggcgaactcggaaaactcgcgttcacctatgctagtcggatacgaaagttcaaaagcggcgcaaaacatccactgatcctgattggtgactcagattccggctctcagaagctgttcgacgctgtggagaaaaaaaccgggaagaaagtggacggcagccaggcttggtatcatttaggatccaacttgtacgtcgtgcctattccaaaagtaggaaacaaagatacccccatagagcggttatttgaccaggccctcctggatactccctatgagagcaagaaattcgacaaaacaaacgctgagaaggatggcaataagttttacggcaaaaaggtgtttgcgacaaaggtggtcgccgcaaacaagggcactgtgaattttggtgggtttgagccccttctgacggccattgcagaagtaatcgaatttcacaagacgaaggtggctcccccagcaaactccgtgcaagcaattgcacctgtggccgctgccggaccctga

SEQ ID NO: 8133 - RNA, 1764 nt, synthetic construct
  source 1..1764: mol_type = other RNA
atgaatattgtctcattgaagctagagcagtatagaaaggccacctccctgatcgatatcagccatgtactggctctagagccagcacacatttccttcgccctgtacaagttggacaagccaggatttgcacctaagtatactgaattttctgtggcgaaaaaagcaggaggcgagcgtactatcaaggcccctcacaaagcactgaaagccgtccaaaaaaggctcgctcaggacttattgatgatcgaacaacagctggaggccacgcgcgtgaaacgatctgattgtatcctggcgcacggcttcaaaaagaagctttctatcatgaccaacggcgaaaaccaccgacataggcgctacgtgttcaatattgacctgaaggacttcttcccaactatcaattttgggagagtgagaggcttcttcatgaagcacaagagctttgagctgcaggagagcgtcgccaccattttggcacagatcgcctgtcacaataatcagctgcctcagggaagtccctgctcccccgtgatctcaaacctgattgctagtgttctggacatccgtctgaacgagctcgcacatcagtacaactgtacatatacacgatacgctgatgacatcacattctctacaagtgagcagaattttccaaccgctataggtaggagggatgtcgggtccgtgaacctctgggaagcgggtccgaaactcctgaaaacaatccagcgggcgggctttgagcttaatcccactaagaccaggatgcaacacagctattcccggcaagaagttacgggagttgtggtgaatcagaaagtgaacatagccgccgattattatgacgaagtcgccgccatgtgccatcatctgttcatggatggcgaatgctttattaaaatctcgggtgctaagcagccgtttccgattaaaaagctgcgcgggcggctcgcttatatctaccaagtgagagggaaaggccctaaagtaatacagaagggagaggacggtgagtctaaaggcacccagaagttctgggcctctttcaatttattcgaacggttcctgaactacgcagatctctacgcggttgatagacctcttgttttgtgcgagggtgttacagacaacatatacattaagagtgcaatccaggcgcttgctgtcgcttacccaaccctgacaagcccctcaggcgaacttaaggtgaagttgttcaagtataccaagacaagcactgctgtgcaacagctgggcggagggtccggagaactcttgaagctgattaccaagtaccatctccgcactaataagtttaaagccgggggcaagcaccccctcattgtgatagtggacctggacgaggggtccaagacgatctttaaagaagtggagaaaaagaccggaaaaaaaatcggaacccagccctggttccactgggacaagaacctttacatcgtacccattcccaaggtaggcggcgccgatacgcccattgaacggttattccctcaggctctcctagaagccacctatgacgggaaaacatttgatctcactaactcagagaaagatgggtcaaaattttttggcaagaaagtgtttgccactaaggtcgtcgccgccgataaaggggccattaacttcggtggatttgccccactactggcagctatagtggaggtcattgagcatcacaagacaaagatgagccttcctttagcagctgccgccgctccagttgcagcagctgcaccttga

SEQ ID NO: 8134 - RNA, 1776 nt, synthetic construct
  source 1..1776: mol_type = other RNA
atgacgaccgcagccgccctaaaactggatctgtacaggaaggctgaggacatccgggatttagcagccatactgggccttgccccagcccacattagctatgcacttttcaagatgcccgacgctaacaaatacaaagttttcactgtgccgaagaaaaccggcggcgtgcgcactattaaagcacctcataagacactaaaggctatacagaagcggctcgcccaagatctgatgggcatcgaagcccaccttgaggccgtgcgagtcaagaaacgagactgcatcctcgcccacgggttcaaaaagaagctgtctatcatgaccaacggcgagaatcataggcatagaaggtacgtgttcaatgttgacctcaaggacttcttcccttcgatcaactttggaagggtttacggctttttccagaaaaatcaaagcttcaatctcaagcctaaagtcgcagctgcgattgcccagctggcctgtttcgagaaccagctcccacagggctcaccttgctccccagtcatctccaatcttattgccgggattctggatgttcgcttgaacgaactcgcccagcagtataactgcagctacacgaggtatgctgacgatattacattctcaacttccgaacagaattttccctctgctatcgggcagcgacacccagggagcatcaacttatgggaagccggcccaaaattgttgaaggctattaaacgggcgggctttgagctgaatgccactaagacaaggatgcaacttagttattcaagacaagacgtaaccggaataatagtaaaccagaaagttaacatccctgtcgactactatgagacagtggctgccatgtgccaccacctgttcatggacggcgcttgtttcaccaaggttggtggtgtcagacatccgttcccccttaagcggctccgtggtcgcttggcgtacatctatcaagtgagagggaaaggacctaagcccaagacggtcgatgaggcaggggagcccaaaggcggagcaaaattttgggcgagcaccaatctgttcgaaagattcctgaattacgctgacctgtacggcgctgaacgcccggtgctgctgtgtgagggggtcacagacaacatttatatccggagtgcccttcacgctctcgcagccaaatatcccacaatgatcactcccgcctctgagctcaaggtaaaattgtttaagtacaccaagactagcgcagcaatccagcagttaggtggaggatcaggagagctagtcaaactgctgcgtgagtacagaaaaagaacggcgaaatttaagagtggtgcgaagcatccattgatactgatcgctgattctgacgaagggtccaaggaattatttaaggaggtgactaagcggaccgggcacaaggtggatggtacccatgcctggtataggatcatgaccaacttgtacgtagtgcccattcctaaggtgggagcagccgatacccccatcgaacgcctgtttgagcaggtggtgctggacaaaacatatgatggcaagaaatttgacatgacaaattccgaaaccgatggaagtaaattttacgggaagaaggtctttgccactaaagtggtggccgcgaaccgcggcgctataaagtttgatggattcgaaccgctgctaacagccattgccgaggttattgaggactataaaacaaaggtggcacctgtgctcgctctgattcctgcagcagctgccccagctccacctgcaccagtacccgcttga

SEQ ID NO: 8135 - RNA, 1788 nt, synthetic construct
  source 1..1788: mol_type = other RNA
atgacaattgtctctctgaaactcgagcagtataagaaagctgatacattgacagacgtcgctaggattttggacctgaaacccgcccacatttcttacgccctctacaaactatctaacactagcaagtatgatgagtttaccgtacctaagaagtccggaggggatcgcattatccgcgctcctcacaaaacactcaaggctgtgcaaaaaagactagcgaaggacctccttctgatagagcaggaattggaggcaagcagagtgaaaaagaggaactgcatcctggcccacggattcaagaagaagctgtcaatcatcaccaacggggaaaatcatcgtgatcagaggtacgtattcaatgtggacttgaaagatttcttccctgcaatcaattttggccgggtgtttggctttttcacgaaacataaagacttcgccattaaacggaaggtggcagccgtgttgactcagatcgcttctttcgaaaaccagctgccccaaggttccccctgctctcccgtgatctccaatctgatcgctagcgtgatggatatcagactgaacgaacttgcccggcaaaatcactgcacttatacacgatatgcggacgacattacctttagcactagcgagcagcttttccccagtccgatcggtaggagagtcaacggttcaattaatctgtgggaggccggccctaaattagtgaagatgatagcccgggccggttttgagttaaaccacgcaaaaacaaggatgcagtactattacagcagacaggacgtcaccggagtggtcgttaaccagaaggttaatatcgcgtccgactactacgctacagttgcggccatgtgccaccatctgttcatggatgggtcctgtcatgtgaaggtcaacgggactaaacagccatttagtctagccaagttacgcgggcggctggcctttattcaccaggttcgagggcggggcccaaagctttgtcaagtgcccgatgaaaaggacgaacagaccaaagcaccaccacaaaaggtgtgggcttcgttcaaactcttcgagcgatttcttaattacgccgatctctatggtgccgatcgtccggtcgtcctctgtgagggggtaaccgataacatctatattaagtccgcactgcacaacttggccgcgaagtaccctgctttgacctctccagccggcgaactgaagatcaagctcttcaagtataccagaagtagtgcagcagtccagcagctcggcggcggatgtggtgaccttacgaaactggcaaggatgtactcagctcgcataaaaggctttaagtcagggggaaagcatcccgtgattatggtggtggatagtgacgagggcagcaaggatctgttcaagcatgttcaacacgtcactaaaaagaaggtggacggcaccgactcgtggtactttctcgagagcaatctgtatgtgatccctattccgaagatcggcggcgcagatactccaatagaaaagttatttgagcaggccctgctggacaaaccttacgaaggaaaaaagttcgatatgaaactgaaggaaaccgacggagcaacacatatttccaaaaagacgttcgcgtccaaagtcgttgctgttaacaaggccactataaatttcggaggatttgaaccagtacttaatgctgtagtggaggtgatcgaggactataaaaaacgcgtggggtcagtgattccctctgcccctaccgcagccgtagttgctctggccataatcgctgggggcccccagtga

SEQ ID NO: 8136 - RNA, 1758 nt, synthetic construct
  source 1..1758: mol_type = other RNA
atgaccgttgtttccctgaagctagaacagtatagagatgccgaagacttatctgacattgcccacatcctggatctgaaacccgcccacatatcctacgctctgtataaactccccacccaccaaaagtaccgggagttcactgttcccaagaagagtggcggagtccgcaccatcaaagccccccacaatactctcaaagtaatacaaaaacggctggcacaggatctccttttaattgaacagcagctagagcaagcacgggtgaaggaacgcgactgcatcttagcacatggctttaaaaagaaactctcgataatgaccaacggggaaaatcaccgcggccgtaggtatgtatgtaacgtcgacctccaggatttcttcccatccataaatttcggccgcgtgttcggctacttttcaaagaacaatgactttgcacttaagcctaaggttgcgaccgtgttggcccagattgcttgccatgagaatcagctgccccagggaagcccttgttcacccgtgatttccaatctcatcggcaggatccttgatatcagactcaacgagctggctagaaggtatcattgtaggtataccagatacgccgacgacatcacattttcaacgagcgagaaacattttcctatagcgatcgggatgagggaattgggcagcattaatctttgggctgccggtcctaagctgctggacgcaatcgcccgaaccggatttgagattaacccaaaaaaaacgaggatgcagtatcactacagtcgacaggaggtcacaggcgtggtggtaaaccaaaaggtgaacatctctgcggattattatgccaccgtgtctgccatgtgcgaccatctgtttaagaagggggagtgccatattgacgtgggaggaacaaagcaaccattcagtatcagaaaacttcgaggccgcctggcatacatctatcaggtgcgggggaaagggcccaagcacagacagacagccgatgacaaggatgaccaggtgaaggggtcccagcagcggctctggagttccttcaaactttttgagcgattcctgaactacgctgatctgtatggcgtcgatcggcccgttattttgtgtgaaggtgttaccgacaacatctacattaagagcgcaatccaagctctggctgctaagtacccgacgctcacaaacgcggtcggggatttgaaagtcaagctcttcaagtacactaagacttccgcttcagtgcagcagctgggtgggggttctggagaactcctgaaattggtgaatacgtatagcagcagaactaggaagttcaaaattgcaccgaagaaccctctgattctggtggctgactcggacgatggctctaagcctctttttaaggttatcgagaatcgtactggaaagaaagtagatggtagccacgcatggtaccacctggaaagtaacttgtacgtcgtgcctatcccaaaggtcggtgccgccgatacaccaatcgagggactgttcgaacagattctactggacaccacttacgaggggaagaaattcgaccgtacaaatagcgaaaaagacggaacaaagttttacggcaagaaaacctttgcgacaaaagtcgtggcagccaacaaaggatctatcaatttcggccgctttgagcctctgttgactgctataaccgaggtgattgaggattacaaaccaaaaattgctccatcaccggttccagccttagcccccgccctagtgtga

SEQ ID NO: 8137 - RNA, 1755 nt, synthetic construct
  source 1..1755: mol_type = other RNA
atggcccacctaaccaagttgcgggcagcatcttccttgaacgatctcgccttcctgctgggagtgaagccctcttccctggcctacgtgctatacaaaattcctgatgagaagaagtacacccagttccccatctccaaaaagaccgggggcgaaagaatcattagtgcccccgatccaaggttgaaaatgatccagcgcaggctggcaaagctcttagcaaaatgtcagattgaggttgaggaaaagctgaaagtgaaaccccagtgcactctggcgcacggctttaaaagcgggttttccattcagacaaacgctgctaatcaccgtggtcaacggtgggtcttcaatgccgacctccacgactttttcccttcgatcaattttgggcgagtaaacggcttttttgtgaagaaccagtactactccctgaattcaaagatcgcacttctcatagcacagatcgcatgtcatgaaaaaactcttccgcagggtagtccgtgcagccccatcataagcaatattattgctcatctgctcgatatcagactgaacgaattagcctctgcgaatggctgcacttatacccggtacgctgacgatctgacatttagcactaatgaaaagaccttccctacgagcttggctaaaagggaccctgctaatcttaacaaatggactgtgggctctgggttagctaaacgtattgccaaggccggatttatcatcaacagcaagaagaccagaatgcagtatagagattctaggcaggaggcgaccgggctcgtggttaacgagaaggtaaacgtcaaatccgactattataagcttgcccgctccatctgctggcagttgatgaaagaggggaaagccttcacgaaagtcaatggagatagtgtcccactgaaactcaaatcagttcgaggaatgatagcgttcatttaccatgttaaacgatgggacgacgagcgcaagcaggttccaatcgatgaaatcgaaaagcgggcatacttcaggctgtatgccgaattcctgaattacatgtggttctttggacaatcccgcccaactatcgtgtgcgagggaaagactgataacatctatattaagtgtgccatcaggtccctggcacagtcataccccagcctggttaagtctagtggggagaagcggggcctgcttgtgcagctctttggatttacgaaaacagctgaccaggtgcaaaaactttctggcggtgcaccacagctgaatatactgttaagagactaccgcaaaaagacagccaactgtaagggcatgccccagcaaccaaccattctcgtggtggacaacgactcaggccctcaaagcttgtatagtcacctgggcaacatactaaagaccaaggtcgacggtagcgaacctttctattgggcctatgggaatctgtatgtcgtacccgtgcctaagattggaggcgctccgacagcaatggaggaactatttgagcaagaggtgctggccacaaagctgaatgggagaaccctcgatctttcaaacaaagaggccgacggcacaaagttctacagtaaaaacgagttctcaattcaggtcgtccagaaaaagcagaaaagcataaagttcgatggtttcaagcccttgcttgataatctcgtggctgtgcaaaaagactacgcttctaaggtggaggctgcgaagaagctgtcggccgccaaaaaggtagctgccgctccaacagccgcaatgccttga

SEQ ID NO: 8138 - RNA, 1752 nt, synthetic construct
  source 1..1752: mol_type = other RNA
atgactcatttggccaagcttaaggctgcgagctccctgaacgatttagctctgctgctcggagtgaagccctccggcttggcctatgtcctttacaagatccccgatgagaacaaatatactcgctttactgtcccaaaaaaaaccgggggagagaggaccatttctgcccctgatccaagactgaagatgatccagcggagactggccaaactcctggctaagtgccaggtagaagttgaagagaaacttaaagtcaagcccagatgtaccctggcccacggcttcaaaagtgggttctccatccaaaccaacgctgccaatcatagagggcaacgttgggtgttcaacgtggacctgcacgatttctttcctagcatcaacttcggccgcgtccgtggattcttcatcaagaacaaatactacgcactgaattcgagggtggccctgctcattgcccaaattgcctgccatgaaaagaagcttccgcagggctcccccgtgtcaccaatcatatccaatatcatagcgcacttgttggacattagactgaacgaactggcctcagccaatggttgtacttatacccgctacgcagacgatctcaccttctctacctctgagaaatcgttccctacatccctcgctaaaagggacccagcgaatctgaataagtggacagtggggtccgggctagccaagcgaatctctaaggcaggctttgctatcaactcacagaagacccggatgcagtacagagatagccggcaggaagccacaggcctagttatcaatgagaaagttaatgtgcggtcagactactataagctcgcacgctccatttgctggcatctgatgaaagaagggaaggcatttaagaagatagatggggacagtaagccattatcacttaaaagcgtacggggcatgatggcttttgtgtaccatgtcaaacgatgggacgatgagcgaaaacaggtgtccgtggctgaaattgagaagagggcctatttcaggttatatgcggattttctgcactatatgtggtttttcggacagacgaggcccacaatcgtgtgtgagggtaaaacggacaatgtgtacatcaaatgtgctctcagaagcctcgcacagtcatacccgaccctcgttaagactgccggcaagaaaacatctttcctggtccagttgttcggatttactaagactgccacccaagtgctcaaactgagcggaggtgcacctcagttgaataacttactgcgggactatcgccgtaatactgccaattgcaagggcatgcctcaacaacccacgatgctgatcgtggataacgattctgggagccagagtctctattctcacctaggccgaattttaaaaacagatgtagacggatctgaaccgttttattgggtttacggaaacctttacgtcgtgcccctgcctaagattggcagcgggccaacagcaattgagcagctgtttgagaaggaggttctcgacaccgaactggaaggcaggacactagatctgaccaacaaggagacagacggtaccaaattctacagcaagcacgagttcagtatacacgtcgtgcagaagaagcagaaaagcattacttttgacggttttaggccacttttggacaacatggtggctgtacagaaagactacgcatcacgggttgctgctgcagccaaacctcgcacggccagtaaggtcttggccgcggcaacagctagtccctga

SEQ ID NO: 8139 - RNA, 1749 nt, synthetic construct
  source 1..1749: mol_type = other RNA
atggctcacctgacgaaactgaaaagcgccgcgacactaaacgatgtcgccctcctgttgggtgtccagcccgcttcgctggcctttattctatacaaaatacccgagcaccaaaagtatactaagttcccagtacctaaaaaatccggaggggaacgcatcatcagtgccccggatccacggttgaagatggtgcaaaaacggctggcaaaattgctcaaaaactgtcagctggaagttgaggccattctgaaggtaaaatctcagtgcgtcctcgcgcatgggtttaagcctggactgagcatccagactaatgccgccaatcaccgtggacagcggtgggtgctgaacgccgaccttcaggactttttcccttcaatcaatttcggacgagtttatggtttcttcataaagaaccagcattacatgcttaataagaaagtcgccacgattatatcccaaatcgcatgccatgaaaacactttgccccagggatctccatgctcacccgtgctatccaatatgattgctcatatgctagacattcgcctcaacgaactggcatcatccaatcgttgcacatatacccgctatgccgatgacttgacctttagtacaagtgagagagtcttcccctccagaatcgccaaacgcgatccgagcagcctgcacaagtgggtggctggagcaggcctgtcaaagagagtggaaaaggctggctttgccatcaatgggaagaaaacaaggctccagtaccgggacagcaggcaggacgctacaggcttagtggtgaacgagaaagtgaatgtcaagtccgagtactacaagctcgctcgggccatgtgttggcatttaatgacaaagggcagcgctcacctgaaggtgggctctatcccagtccctgtggatgcaaaaaaagttcgcgggatgctggccttcatctaccacgttaaaaggtgggatgacgacaggaccaaggtgccgaaagaggaaatcgaaaagagagcctattatcgagtctacgccgacttccttaattacattagtttcttcggccagccccatatgaccattgtgtgtgaggggaagaccgataatgtctatctgagatgtgcggtgagatcacttgctgctttatatccatctctcatccaagtgaagggaaaaaaaaggaacttccttttgcagctcttcaagttcacgaaaactgccgatgcagtgcagcacctgtcagggggtgccagtcagctgtctaatctgttgagcgagtacaggaagcggatcaaaaactgcaaggggaccccccaacacccaactgtactggtggttgacaacgatagcggtcccgaaaagctgtttaagcatctctcctctcttctcaaaaaggacgtggatggctctgaccccttttacttcgtctacgagaacctttatgtggtgcctgtgccaaagattggaggcgcatttaccgcaatggagcaactcttcgaatcgcacgttcttaaagagaagttaaacggccgaatactggatctgaccaacaaggagcctgacgggactaagttttactccaagaacgaatttagcgttgagatcattcagaaaaagcaggctagtatcaagtttgatggttttaaaccactgctgaatgctttggtagcagtacagaatgactatgccggcaagattgcagcgaaaaaggccgcaatacctgcccctgctccagttcctgctctcgcagcgccctga

SEQ ID NO: 8140 - RNA, 1836 nt, synthetic construct
  source 1..1836: mol_type = other RNA
atgttgggttggattgcccatctgcgttttctgcagtttattgacgtgtcatcttgcctgggagtcagtgcctctagactgccatctggagtttcagtcactgggagcacactgaagaccctccaggccatccagaatctgcacggatttgccgccttcctgggagtgacaccaaaggccctaggacatgccatccatggtatccccgaggtgagcaagtatacaaaattcgagattgccaaaaagtctggcggcaaacgcgagatttgtgccccagtgccacacttgaaaaggatccagcgccgcctggcaaacaaactcaaagaaatcgagatgagcttggagggtgagctcaccactaatgaacacgtacttagtcatggctttaaacccaacctaagcattgctaccaatgctcgcgcacaccggggaagaaggtgggtgttcaatatcgacctggccgatttttttccatccattaattttggccgcgtctatgggtttttcttgaaaaattcccgatatggcgtcagcaaaaccgtcgctacgttaatcgcacaaatagcctgctacgagaatcagttaccacaggggagccccagttctccggtgatttccaatatcgtagctcatattttggacatacggctccacgagctagcggccagtctgaactgtacctacactaggtacgcagacgacctcaccttctctacgaatgaaaagggttttcctggcgccatcgctaaacggtcacaggatgaggacgacgtttggaagatcggaaagaaggtcaagagcattattaagcagagcggctttgagattaaccccaaaaagaccagaatgcaatatcggataagtaggcaggatgtgacaggcttggtggtgaacgaaaaggtgaatgttagagccgaatattcacgaaccgccagagcaatgtgtcaccaactgtggacgaaaggcgctgcttttcagaaagacgggaagctgaaactggctaagactcccgaacaagtgagaggcataatgaacttcgtgtaccatatcaaagagtgcgaggaagtgcggcaatctgatggggccgaattcgatccgtccgcacctcttcctggctatgcgagaatatacgctaagcttctggattacctgtccttctgggggacagataagcctgtgctcctgtgtgagggaaagaccgacaacatctatattaagtgcgctattgagaacttagccgcctcattcccaacactcatcgagtcgtcaggcggagtaattgaacctgctgtgcgcttctttaaccgttcagatgttaaagacactaaagatagcctgacctggaaactgcagaaactcgcagggggcgttacagaactgacatcctttctgggagagtatagggaacgtataaaagactttaagcacgggggcaagtacccgcttgtaatcgttgtggacaatgatcaggaatcgaaaggtatgttcagccacattaagaacatcatcaagtccgcagcccctgtagacgggagtgctcctttctattacatctatgctaacctatacgtggtcgcaatccccaaaataggttccaaggacacatacattgagaggctcttctccgataaggttcttaagaaaactctcgatgggaagacgttcgacgtgaccggtaaaaagaacaacaaaacccactacttcaagtctgactttgccaagaaagtcataaagaagaacaaggcgaatatcgatttcaagcggttcaagccccttttagaacgaatcgcggcagtcaaagcagattacgcgactaggatcaagacaactccctga

SEQ ID NO: 8141 - RNA, 1713 nt, synthetic construct
  source 1..1713: mol_type = other RNA
atgctcttgggcatgaaacccgcagccctggcctatattctgtataaacttcccgcaggagcaaaatacaaaagctttgagatcgagaagaagtcaggcggcgtcaggaagatcatggctccagagccaaggcttaagatgctgcagagacgcttagccgatctgctgctagcctgccagtccgagattgaagcgtccatgaagatcaaagacgattgcgctctggcacacggtttcaagcctagactttccatcttcacgaatgccgagaagcaccgtaaccgtcgatgggtgtttaatgcagacattgaagatttcttccccacaattaatttcggccgagtttatgggttctttcagaaaaatcaccactttgcccttccaaagccagttgctacaattatcgcccaaatagcttgccacgagaaccaattaccccaggggtcaccatgttctccggtgatatctaacatcattgcccacatcttggacattcacttgaatgacctcgcttatagacacaattgtacctatacccgctacgcggacgacttgactttttctaccaacgagaaacagtttcctcgggccattgcaaagcggcaagtcggagatatccatgagtggataccgggaagtggcttgaagaaagccctaaagtctaatgggttcaaactgaacgggagcaaaaccaggatgcagtattgtgactcccgccaggaagtaaccggcctggtcaccaatgaaaaagtgaacgtgaaacaacagtactataagcaggcccgggcaatgactcgcgaactggttaccggaaagaaacctttcgttaccgtagcaggcaaaaaagtcgaggtggccagggatcatctccgggggatgctgaacttcatctacttcattaagagcaaggaaaacaagcgcataggattcacatttgacaaggaaaacgataaactccccactttccacgcaatctacaagcagtttctggattacatttggttttacggaatcgacgagcctactattatctgcgagggcaaaaccgacaacatctacctgaaggccgccattaaggcccgggctgcccattttccagaattagtaaagacagtggaaggtgtcaccaaaatacgacccaggtttttcaaatattcagacacagctgcggagcttcaagacctctccgggggcacaggtgagctcaataatttgctggcgcattaccggaataggattactactttcagagggggcgctaaccagcctgtaatcattattgtggataacgacagcggggctaccgctatattctcgcatatctacaacatactgaatccgaagatcaagagcacgggtggaaaaaaaggaggcgctactcctgctgcccctgtcgatggaagtgaacagttctactacctgtacgaaaacctttatatcgtgcccgttcctaaggtggctggggctgagacacccatcgagagattatttgaccccaaactgctgaagacagtgtggaatgggaagcagctagatctgacgggcgacaaggacccagccaagtactattttaagaacgatttcgcggttcatgtcgtgaaggagggtggcgcaggtgtgaagtttgatgactttgatccactcctcagtgccatcgtggctgtcaaagccgattatgccaaaagagtggcactgctcgcggcagtggcctga

SEQ ID NO: 8142 - RNA, 939 nt, synthetic construct
  source 1..939: mol_type = other RNA
atgaacaccccactctctaaaattaagagctgtacaaaccgatcagacctggccttactgctaggtgtaaaacccgccgcactgtcctacatcctttacaagattcccgatgaaaataagtactactccttctctattccaaaaagaaatggagatcagcgccagatctcagctccaatcccagccttaaagatgctgcagaggcgcttgagtgagcacctgtacgaatgcctgaatgaaatcgagtatctcgaggcggtggatccgcagtgcgtcgtagctcatggcttcaaaaagcacctgtccatcgcaacaaatggatcacatcaccggtccaaaaggtgggtgttcaactgcgacatcgaggaattttttagctccatcaacttcgggagggtgaaggggtactttgaaagaaacagacactttcaactgcaacctgaggttgcccttgtcgtggctcagatttgttgtcacgagggagttttgcctcagggcgcccccacgagtcctataatcagcaatcttattggctctattctcgacgataggatcagtcggctggcgaatgagctgcggtgtacctatacacgttatgctgatgatttgacttttagcaccaacatggcacacttcccccggcagatagctgttgccgacgaaaagtctcctagccgctggaggattggggacaagctccttagtcgcgtcgcacaggccggtttcagaataaatcatgagaaatctcggatggcaatgccgaactcacgacaaacagtgacagggctaacggtgaataagaccgtcaacgtggccactacctattacaagatgactcgagctatgtgccatcatctctttactaccggctcctattcgagcggtggcttgaacgacgcccccaaaggaagagagctcgcggccctggaaggccgttga

SEQ ID NO: 8143 - RNA, 1740 nt, synthetic construct
  source 1..1740: mol_type = other RNA
atgaaggtggagatctacaaatttgggctaaaggagctgaaagcatgcgtggatctgagcgacgtggcatttctccttgacgttgaacccaagttcctgtccaaacagatctacaaaacagacgccgctgttaagtaccacagcttcaccttgcctaaaaaagacggaagctcaaggctgataaacgccccgaacaagaaccttaagtttatccagagccggctgagtaggttgctataccagtgttatttcgacattcatgggaagccagagttcccgggacgggtcattagtcacggctttcagaaacaacgggacctttcaatatataccaacgccattagacatatcgggaagagacacgtattcaatgtcgatctggaggacttttttccgtcttttaatttcggcagagttagggggtatttcatcaaaaatgagcgctttgctctgaaccccaccgtcgccactgtgttggctcagactgcgtgccacgacaatgtactgcctcagggagcccccacgtcacctattatttccgagctcatttctcaggtcttagactatcgtctgcaggccgtggcctccaagtacagatgcacctactctagatatgctgatgatatcaccttctcgacaaacctccccgagtttccacaccagatcggcagtcaggatgccggtgtctggaccgcaggactgtctatcgaaaaggcagtatcctcctgtggtctgaagctcaatgcagataagacccggatgcagctcggccagcagcgacaagctacaactggcctcaccgtgaatcgaaaagtcaacgtgggacggcactactacaaaggggttaggttctgtgctcatgccatgatgacgaccggcaaagcagacgccccttcctatctcaaaatccccgagaagcagctgaacagtcatcaaatttggggtatgctgtgccacatcgatgatataaaagggcgcgaaaacaaccatgcacccattagacacttttcttccagccatccagcgccacattacctgcgactgatgcgcgatttcttccacttccatcgcatccacactaatcctaaacccgtaatcatctgcgaaggtaaaactgactacatctacctcaaggaagcgattcgctggaacgttggggatcctatggtggctacattgcttgatgtcgtcccacatacaaaaaagagcaagggcgatcactggaatgtcgatttcgtgaggcattcggacactgctggtgacctgcttgaactggctggcggcgggggagacttacccaaatttgccgagtaccacctcggacgtgtggacaagctgtataatggtgaagccgccaaacctgtgatcataatagtggataacgatgggggctctgacggaatgtggacatggattaagcgggttactgagtcagcgacaaagattgacggctcaaaaccatattaccacattggcaaaaatctctatgtggtgcctattccctccggaggccaagcagatttttatatcgagaagttattcccacaaccatggctaaatgccaagcttgggaccaagacattgaagctgatacagaagaagggggacaagttgagtcctaatgaatatggtaaaggcgaattcgctacgaaagtgattcgtgccaacaggggaaaggtggactgtagcagcttccttcccttgttacataccctgtttgagatcatccacctgaagtga

SEQ ID NO: 8144 - RNA, 1557 nt, synthetic construct
  source 1..1557: mol_type = other RNA
atgaaggaaaagatctacaagttcggattaaaggaactgaaatcctgtatcgacctgtccgacgtagcggttctcctcgacgtggaacccaagttcctttcaaagcagatctacaaaaccgatgccgctgtgaaatatcacagttttgccctgcctaaaaaggacgggtcgtcacgattgataaatgctcccaataagaacctaaagttcatccagtcccgcctgtcacgcctcttgtaccagtgctacttcgatattcacgggaagcctgagtttcccgggagagtgataagtcatggatttcaaaaacaacgcgatctctccatttatacgaatgccatccgacataccgggaaacgccatgtgttcaatctggatcttgaggactttttcccaagctttaacttcggccgcgtccggggttactttattaaaaacgagcggttcgccctaaatccgactgtagccaccgttctcgcacaaaccgcctgccatgacaatgtacttcctcagggcgctccaacttcgccagtcgtttctgagctgatctctcaagtgctggactataggctgcaggctgtcgctagcaagtacagatgtacatactctaggtatgcggacgacattacattttctacaaacctgccagagtttccgagccagattggctcccaggatgccggtgtctggaccgcaggaccttccatagagaaagcaattagcagctgcggtttgaagctgaacgcagccaaaactcggatgcagcttggccagcaaagacaggccacaaccggcttaacggtgaacagaaaagttaacgtcggcaggcactattataagggcgtgcggttctgcgcccacgcaatgatgaccactggcaaggctgaagccccaaaatacctgaaaatcccagagaaacagctgaatagccaccagatatggggaatgctatgtcacatccacgacatcaagggtagagagaataaccacgcccccatcaggcacttcaataacgggcatagtgcaccccattacctgaagttaatgagggacttttttcatttccaccgtatacacactaaccccaaaccggtcattatttgtgaaggcaagacagactatatttaccttaaggaggctattaggtggaacattggcgatcctatggccgcacccctcttggatgtggtgcctcacacaaagaaatctaaaggagatcactggaacgtggatttcgttcggcataccgataccgcgggggatcttctggaattggcgggcggaggagggatctgcagatccctgcgaaatacaatctgggctgatctcaagtcttcaacaatggcaatgcagcagtcacagagcagtctcagctctatcactatcgtgggagtgaaggcctgtggggtgggctccaggtcaagtagaaacccccggcgcagatcaatggacaggtcccgtactaccactctggctaagacatccaccctgttccctagccgtgtccggggtaaagctacctttacgtctcgaagcagttttccacataatgggtga

SEQ ID NO: 8145 - RNA, 1740 nt, synthetic construct
  source 1..1740: mol_type = other RNA
atgactaagaagatttatcggtacggactgaaagaactgaaaagttgtatcgatctgtctggggtcgcttttctcctcgatgtggaacccaagttcttaagtaagcagatctacaaaaccgatcctggggtgaaatatcatatattccaggtgcccaagaaagatggttcttctcgtcttattaacgcaccgaacaaaaatctcaagttcatacagtcacgcctctcaaggctcctgtaccagtgttattttgacatccacggaaagcctgaatttcctgcaagagccatcagccacggatttcagaagaaacgagacttgtcgatttacactaacgcattcaggcacaccgggaagcgtcatgtctttaacgctgatttggaggacttctttccttctttcaattttggacgtgttcggggctactttgtcaagaacaagcatttcgcgctcaacgacaccgtcgccaccgtattggctcagacagcttgtttcgacaatgcactgccgcaaggggccccgagttctccaatcattagcgaactgatctcccaggcattagattatcgcctgcaagcgattgcacggaaacatagatgcacatattcgagatatgcagacgacattaccttctccaccaacctaccagagtttcccgagcagatcgggcttgctgatgccggtggatggatagccgggagtagccttgagaaggccgtcacatccagcggcttcaagctcaatgccaaaaaggttaggatgcagttcggagatcagcggcagtcaactacaggtctgacagtgaatagaaaggttaatgttgggagacactactataaaggcgtgcgcttttgcgctcatgccatgatgacggccggaaaagccgaggctccagcaattctgaagctgccagagaaggagctgtctagccatcaaatatgggggatgttgtgccacgtgcacgacatcaagggtaggcagtccgatcacgccgcgatccgatcctttacaaaatcccatccagctccccactatctaagactcatgagggatttctttcactatcatcggatccacacgaatcccaaaccccttgtgatttgtgaaggcaagacagattacatttacctgaaagaagccatccgctggaatatcactgatcccaaggtcgcgaagttgctgaacgtaagccctctgaccaaaactagtaagggagatcattggcacgttgatttcctgcggcacactgatatggctggcgacctcttagaccttgcgggcggaggcggcgatttaccaaagttcgccgcataccatctggaccgattcgagaaactgcacaaggctgaggccaccaagcccgtgatcattatagtggacaacgacaatcagtccgccggtatgtggagctacattaaagaagccattggctctaagggtgtaatcgacgggtcacaaccttattaccacgtgggcaagaacctgtacgtggtgcctatcccatcagcaggcaaaaaagacttctacatcgagaagctgtttccccctaagtggatgaaggagaaacttgggaccaaatcctttaagatcatgcagaagaaaggagagaaactaggcccagacgaatatggcaagggcgagttcgctaccaaagtcattcgcgccaacaggggtaaagtggactgcagcaattttttgcctttgctgcaaactctcagcgacatcacggacatagaatga

SEQ ID NO: 8146 - RNA, 1755 nt, synthetic construct
  source 1..1755: mol_type = other RNA
atgactaaacagatctacgagtatggtctggcagacctaaagctttgcaacgaccttggtgacttggcacgactgctgcatgtgcgcccgaaattcctgagcaagcagatctaccacacacccgatagcgtgaaatattccgagtttgaattgccaaagaaagatggctccaagcgctccatatctgcgcccaacaagaacctgaaatttatccagagcaggctttccagactcctttaccagtgctacttcgatatccatggagtgccagagaatacagggcgggtgctgagtcacggattccaaaagggtcgggatctctcgatttataccaatgcaaagaagcacattaaccgcaggtacgtgtttaacaccgacatcgaaaatttcttcccctcatttaacttcggcagagtaaggggctattttatcaagaatcagcacttcgacctgaaacctaccgtcgccactgtcattgctcaaacggcctgtttccagaatgcattacctcagggcgctcccagttctcctgtaatcacggagttaattacccaaactctggactacagattgcaggcgctggcccgcaaataccggtgtacatatagtcgttatgctgacgatatcaccttttccaccaatttgaaagagttccccgcagccattgccttcagacctgaaggagaaaacacatggcgggaaggaccttcactgatcaaagccgttgagtctagcgatttaaagattaaggtcacgaaatcccgcatgcaacagagctatcagaggcaggccacaacagggctgactgtcaatgacaaggttaatatcgctgtctactactacaaaggggttcggttctgtgcttacgctatgatgacaaaaggcaaggccgtcgcaactaacaaactactggtgtcgaagaacggagatctctccaaacagcagatctgggggatgatgtgccacgtgaacgacattaagcgacgagaactgccttatgaggccctgagggccttcaaacccgccccaataccatcctacctcaagctcatgaaggacttctaccatttttacagaattcacaccgcggaaaagcccctcattatctgtgagggcaagacagattacatctatctcaaggaagctatccggtggaatgtgagcgacacccgtgtcgccaaaaccctcctaaacggtcccccattacagaatgtaacaagcgataagggagatcattgggcggttgactttgtaaaccacagtgaaatggcaggcaatctgttggatcttgctggaggcgggggcgacctaccgaagtttgctacctatcatctggagcgtgtgcagaaactgttttctgagaagccacccgtgccagttattatcatcgtggataacgatagccaatcagccggtatgtggacgactataaagaaactgactgaggcctcaaagccaatagacggatctgcaccttattatcacgtggggaaaaatctctacgtggtgccaatcccttcaaacggcgctaaggacttttatatagagaaactgatacccaagaactggctcgatcagaaattggacgggaaaactcttaagctcaatcagcaaaaggatgaaaagctgaagcctagtgagtacgggaaaatggactttgcaaccaaagttattagggccaatagaggcaaggtggatttgagctctttcctgccgcttctgcataacatttgcgacatcattgactctgcctga

SEQ ID NO: 8147 - RNA, 1755 nt, synthetic construct
  source 1..1755: mol_type = other RNA
atgaccaagaagatatatcacttcgggcttgccgagctcaccagctgcgtcgatcttggggatctggctcgacttttggaaatccagcccaagtttctgagtaagcaaatttaccacactccatacggccagaagtatacacacttccctatgcccaaaaaagacggtagcaccagaaacatctctgcacccaataagaacctgaaattcatccagagtcggctgagtcgacttctgtaccagtgttattttgacatccacggagctcccgaatttccaggtcgcgccctgtcccacggttttcagaagggccgcgacttatccatttttaccaatgccaagaggcacacaaatagacgttttgtgttcaacaccgatatagagaactttttcccaagctttaactttggcagagtgcggggttacttcattaagaatcagcatttccagctgaaacccactgtggcaaccgtgatcgcccagaccgcatgttttatgaacatcctccctcaaggagctccctcttcacccattatatcagaactgattagccaaactctagattataggctgcaagccctggctcggaagtacagatgctcatactccaggtacgcggatgatatcacattttctaccaacctcaaggagttcccaagcgctatagccttttgtccccctggagaggtgaactggagagaaggacctagcctggagaaagcggtactttcatccaatctcaaattgaacagcaagaaagctaggatgcagcaatcctaccagcggcaggcaaccaccggcctcacagtgaatgataaggtcaatatttccacctattactacaagggagtccgcttctgcgcgcatgcaatgatgacaaaagggaaagccgttgctaataataaattgtcagtagccccaaatggcaagttaagtaaataccagctatggggtatgctctgccacatcaacgatatcaaagggcgcgagttaccgcataaagctctcagggccttcaagtcttctcctgtgccatcgtacctcaagctcatgaaagacttctaccattactatcgaatccacactgcagaaaagcctctcatcatctgcgaaggcaagacggactatatttaccttaaggaggcaattaggtggaatgtgtccgacgcccgggttgttaaaaacctgattagcggacctgccctgataaatttcacgtccgataagggggaccactggggcgtggatttcgtaaaccattctaatatggccggaaatctgttagatctggctggcggaggcggggacctaccaaagttcgctacatatcatgtggagcgcgttaaaaaactgtttgcggagaaacctcccatgcctgtgataattgttgtcgataacgacaaacagtcggaaggtatgtggacaacgatcaagagtctgacaggcagcccgacacctattgacggatctgccccatattatcatgtcggggaaaatctgtacgtcgtacccatcccctccgccgggaaaaaggacttctatatcgagaagctgatcccatcaaagtggttgaagaagactttgaacgggaaaaccctaaaactgaaccagaagaaggacgagaagttgaagccgactgagtatggcaaaatggactttgccaacaaagtgattcgtgcaaatagaggcaacgtggacttgactagtttccttccgctgctgcacactatctgtgacatcattgaactcccatga

SEQ ID NO: 8148 - RNA, 1761 nt, synthetic construct
  source 1..1761: mol_type = other RNA
atgaccaatgcgatctataagtacggaattaaagaactcaagacctgtgtggacttgtccgacatcgcttttttactggaagtcgagcctaaattcctcagtaagcagatttacaagacgtccgatgaaatcaaatattacagctttgagatccccaaaaaagatggaagcaagcgggctatctacgcgcctaacaaaaatctgaagttcatccagtccagactgtccagactgttgtaccagtgctactttgatctgcacggagaacccaagtttcctgctaggtctatcagccacgggttccaaaagggacgtgggctgagtatatacaccaacgctattaggcacaccgggcggaaatatgttttcaatgccgatatagaggacttctttccaacttttaacttcggacgagtcagaggctactttatcaaaaataaacacttcgagctcaacgagacagccgccaccgtcattgctcagatcggttgcttccagaatatgctcccgcaaggcgcaccctcctctcccattatttctgagttcattacccagcatctggactataggctccaggcattggcaaaaaagcaccgctgtacctacagccgatacgccgacgacataacatttagcacgaatctgacggaattcccagcccaaattggcgtgctgtcaaccgatcaagaggcctggaccgcaggcgctggtttcgaaaaggccatcagcagctgcggcttcaaacttaatgtgaagaaaatccgcatgcagcagggttaccagcgccaagcaacaacaaacctcacagttaatcgcaaagtcaacatagggagccactattataaaggagtgcggctctgcgcacatgccatgatgacaaaggggaaggctaccgctcctggcaaagtgtctactccccctggggatgaattaaacagtcaccggatttggggaatgttatgtcacattcacgacatcaagggcaggggactgccacatagagccctgagaaattactcacctactcatccagctccccactaccttaggctcatgcgagacttctttcattatcatcggatacatacctcgcccaaaccgctggtgatctgtgaaggtaaaactgactatatctatctgaaggaggccattagatggaacatggccgatgagcgcgtgggaaagctacttgtgaaggccgatcagcttccgcacttgaagaaatcatccaaaggtgaccactggttagtcgacttcgtgaaccattcggacatggccggagatctgcttggcctagcaggcggtggtggcgacttgcctaagtttgcagactatcacctggataggattgggaaactgcatgccgacgccccaccaggaccagtaattataatagtggacaacgattcccagagtgaggggatgtggacatttatcaagaaagcgactggctcaactactaaggtcgatggctctaagccctactaccacgttgggaagaacctatatgtagtaccaatccccagtggcggagcaaaggatttctatatcgagaagctgtttcccgacaactggctcaaagaaaagctcgcggggaaatcatttaagatcattcagaaaaagggcgagaagttggggcctaacgattacggcaaaggtgatttcgctacaaagatcattaaggccaatcgtgggaaggttgattgctctaattttctgcctctgctgcatactctttgtgacgtgatccagggcaagtga

SEQ ID NO: 8149 - RNA, 1755 nt, synthetic construct
  source 1..1755: mol_type = other RNA
atgacaaaacgcatctatgactacggactggaggagctgaaggcatgcggtaacctctctcaccttgcatttctgctgggcgtcgaaccaaaattcctgagccggcagatttacaaaaccgacgatcagttgaagtaccattccttcgagatcgccaagaagaatggcaccaaacgtaccattaacgctcccaataagaacctgaaattcattcagtcaagattgtccaggctgctctaccagtgctacttcgacattcacgggaagccagactttccagcaagagctacatcacatgggtttcaaaagaaccgcgatcttagcatctataccaatgcagtgagacacatcggtaggaagtatgtgctgaatgccgacatcgagaattttttccctacgtttaacttcggcagggtccggtgctactttatcaagaacaaacatttcaccctaagtgagacagtcgccaccgtaatcgcccagacagcttgtttccagaatgctttgccccaaggggcaccttccagccctattatatccgaattcatcacccaggctctggactacaaactacagtctttagcgaaaaagtatcggtgcacctactcacgctatgccgatgacataacattttcgaccaacttaagtgaattcccctctcatatcggattcctgagtcccgatacggagaattggtcagtgggcaagagcttcgaaaagtccgtcctcagctctgggtttaaattaaacgctacgaaaatccgaatgcaacaacagaatcagcgtcaggccacaacaaacctgactgtgaatcgaaaagtcaacatcggctcatattattacaaaggagtgcgctttgccgcttatagtatgatgaagaacggtaaggccattgccactggaaaactctctctcactgccaaagagttgaatagccatcagatatggggcatgctctgtcacgtgcacgatataaagggcaggggccttcaccacactgcgttgcgcaactatactaatgcgcatcccgccccacactacctgagacttatcaaagatttcttccactaccacagaatccacacatccgccaaacctatcgtgatctgtgaaggtaagacagattacatatacctcaaggaggccattaggtggaatgtggcaaaccagcggattggaaaactgctcgttaagtctggaaagctgtccgaccttaagaacactaagggcgaccactggctagtagattttgttaatcatagtgacatggctggagatctgctggatttggccgggggtgggggagatctcccaaaatttatgacctaccatctggacaggttcgataaactgcacagtgatgcgccgcccaagccagtgattatcattgtcgacaatgactcccaaagcgatggaatgtggtcgacaatcaaacggatcactggcagcaaggcagccgttgacggaacgaaaccttattatcacgtggggaagaatctgtatgtggtacccatacctgccgggggtgcaaaggacttttacattgagaagctttttccggaccattggcttaaggaaaaattgggcgggaaaagcctcaagatcatacagaagaagggcgaaaagcttaccgctgatcattacgggaagactgacttcgctaacaaagttattaaggcaaaccgaggcaaggtggactgttcagcttttctgccgttactcctgaccctgtgcgatattattgagtctaaatga

SEQ ID NO: 8150 - RNA, 1743 nt, synthetic construct
  source 1..1743: mol_type = other RNA
atgtctatttaccgctatggcattaaggatttgaaaggctgcgcagatctcggtgacctcgcaaggctgctagaagtgcaaccgaagtttttgagtaagcagatttaccatgtggatgatgcggacaagtaccacgtattcccgatccccaagaagaatggttccctgcggcaaatccatgcccctaactcaaatctgaagttcatacagtctagattatcacgactcttatatcagtgctatttcgacctccatggaaagcccaaaaacctgagcaaggtgctctcccatggcttccagagagacagggaccttagcatctttacaaatgcaaacaggcacaccaataaacgctacgtgttcaacgccgatatagataatttcttccccagcttcaactttggccgggtacgtggctactttatcaagaacgaacacttcaagcttactgaaactgtcgccaccgttattgcccagacagcctgttttcagaactcgctgccacagggtgcaccttcttcccccatcatcacagaatttattacccaagtgctcgattataggctgcagagcattgcgaaacgaaatcggtgtacctactctaggtacgccgacgacctcacgttttccactaatctgggggagtttccatctaagattgggtatccattccccttacccgaggtatgggttgcagggcccggattggaaagagcgatcgccaaaagtggcttcaaattgaacgagaaaaagattcgaatgcaacacgcccagcagagacaagccactactaatcttaccgtgaaccagaaagttaacgtggggtcatattactacaagggcgtccgcttgtgtgctaatgctatgatgaggcacggtgctgccgtccggccgaaaaaagcaattgagcctggaaccccactgacggcgaatcagattcttggaatgctagcccatgtgcacgatatcaagggcagagagttggagcacaaggctctccgtaagtacggcaagtttcagcccgctccccattatctgaggctcatgggggacttttatcactacaaacgcatccacatcaatcctcgacctatcgttatctgcgagggtaagaccgattacatttatctgaaggaggccattcggtggaatgtggctgacccaagggtgtcaagccgcctggtggatcctgtccgtctgctggcacccaccggtaaaggggaccagtggctgatagactttctgaaacacacgaagacagctgataatttcctaggacttgccgggggcggaggggatctgaaaaacttcgtgaacattcatctggggcggatcaagatctttcatgataatcctctgttgcagccagtcatcatcgtcgtagataatgactctcagtccactgagatgtggagcacaataaaaaaagcctcaggctccaccaacaagatagacgggagcgagcctttctatcacgttgctaagaacctttacgttgtgcctataccatccggaggcaaaagcaacttctatatcgaaaagcttttcgacgatagttggctaaaagaggacctgaacggcagaacatttaaagtgctgcaacggaaagacgaaaaactcaaggacacagagtacggaaagggagaattcgctgacaaggtgatcagagcaaaccgcggaaaggtcgattgtagtagttttctcccattactgcacactatatgcgatatcattgacaaatga

SEQ ID NO: 8151 - RNA, 1767 nt, synthetic construct
  source 1..1767: mol_type = other RNA
atgacaaaaatctataattacgggttggctgagcttcagcagtgctctgatttgagcgacatcgcccatttgctgggggtcaagcctaagtttttaagcaagtccatctacaagacacccggagagaataagtaccaggcctttaagattaagaaaaaaaacgggaccgatagggaaattctggcccccaaccccgatctcaagttcatccagtcccgcctgtcaaggctgctgtaccaatgctacttcgatatatatggggccccaaagaaccccatgcgggtgctgtctcatggtttccagaagaaacgcgacctttccatttacacgaatgcttgccgacacactagtcgaagatttgtgttcaacaccgacctggaggatttcttcccatcttttaattttggcagagtgcgaggatttttcttgaagcacaacaagttcaagcttggcgaaaaagcagccaccacaatttcacaattagcttgctttgagaatagtctcccccagggagctccaagtagccctataatctccgagttcctggcccagccattagacgtggcactacaaaagctagcaaaagatcatcggtgtacttatagcaggtatgtcgatgacatttccttttctacaaatctcagagagttccccagcaaaattgcttttcctttccccattcctgaaaagtggattgtggggccaaagctcgagcatgagatcaatcggtgtgggtttaaaatcaatacatcaaaaacccgcatgcaagcccgtactcactggcagagtgtgacaaacctgaccgtgaaccagggcgtgaatatcaaaaagcactactataagggagcacggttttgtgcgcacgcgatgatgactaacggcaaagcatacgccggtaacaaactgaacatagcatacaatgagttgtcgtccgatcaaatctgggggaaactgagacatatttgcgacgtgaaggatagatctggcgccgtccagcccctaaggaactacaatggtagtaacccggcgccgcattacttaagactgagcggcgattatttccactatcacaggatccatatctcgccaaagccacttgtcatatgtgaaggcaaaactgactatacttatctcaaggaagccatcctgtggcacaagggagacgctcgtgtggccgccaacctcgtggacatttcccggttccctacaaaatggaagaaaaccaaaggcgaccactggggtgtggatttcgtaaaacactcaaaatccgctgaccgctttctggacatcagcggcgggggaggcaacctcgtaaaattttgcaagcttcacattgagcggactaagaaatttcattcagttacgggacagaatccagtaattgtcatcgtcgacaatgacaaccagagcgaaggaatgtggtctttcataaaggatgagacgaattcatctaccaaagttgatggctctaagccctactacaaggtgagtaataacctgtatgtggttcctataccgaagccaaagggcttcgcgggcgacgtttacatcgaaatgttgttccctgatccctggctcaaatacgaaatcgacggacgcaaactgaagatcaagcagaagaaaggggaaaaacttaagcctagcgagtatggtaaaggcgagtttgctgacaaggtaattcgcgccaacaggggttccgtcgattgtagcgcattcgcacctctgctggggaccctctgtgatatcgttgacggaaccgctacctga

SEQ ID NO: 8152 - RNA, 1884 nt, synthetic construct
  source 1..1884: mol_type = other RNA
atgttcatagtgatggtgggcaggaacgcaggacagatctgctcgtcctcttcgttcgcagtcctcagaattgtcgaaatcctggcctgcgttcgcgtccctgagggctacttcctggaggtggagctagtgaacaagctcgtccagctgcaggctacaaaaagcagaagcgatctggcacggctcatcggagtgaagccaaagcacctttcattcacactatataagattcccgagaacagtcgctacacccagttcaccatcccaaaggcctctggcggaacgcgagacatccatgctcccaattctcacctgaaggctattcaaagtaggacatctggcctcctgtacgaatgctaccacattatttaccctaagaatgacatagcaaacttggagcttagccacgcattccaaaaaaatagaggcctgagtattgctagcaacgggtccaaacaccggaataagcgatttgttttcaatatggacctcaaggatttctttggtagctttaacttcggcagagtgaggggctttttgctgtcaaacaatcagtttggactgaacgctgaagtcgccacaactgttgcgcagatttgttgtcacgagaataagctaccgcagggagcacccacgtctcctatcgtgaccgaattcattacccgcattttggacatcaggctgtctaaaatcgctaagaggaatgggtgtacttattcccggtacgctgatgatctgaccttctcgaccaataaacgcgagtttccagtggaggtcgcttttctcgggcttgatggccaatggactgctggttcagccatcgccaataaaatacatacctccgggttcgagattaatcctaacaagtatcgaatgcaattcgccgacagccgccaggagacaaccggtttagtggtcaacaagaaggtgaacgtatccaaaaactacaccaagcaggtgcggtatatggcccactccctgtttcagaaaggcgagtgttttatccaggaaccccagacaaagttgcctattatggtgtctaaccatgttctgggagggaagcttgcccaccagttccatatcaaatcccaagaatacttagattccaaggggaaagcctttccagtcgctaggtttgaaaaggaagggaaaaaggcccccgcatactatcgtaaatacgcagatttcatctacttccagaacttctttcatagcagcaaaccaacgatcctctgtgagggcgtgactgataatatctatatcaagtgcgcgattaagagcctttacagtaaggtgccctcccttggatatgcatcaaaagccgcctctaagatacaactcttgtgcggcttttataattattctcccactgctcaagccgttaccaagttgactggaggggccaaccccttaaaaaccttcattgaaacgtatggtatcacttttgcgcggtttaaggcggctagcatcgaagtaccagtgattgtagtcgttgataacgatgcagctaataatggtctgtggaaaatgctgcaggaaaagttcggtatagccggcgccgacggatcccatgacttctaccacgtgactaaaaacctctatgtggtaccaattcctaagataggaggcgcagacacattcatcgagcatctgtttgacgccaaaacactggcaagtcagctcaagggtaaatcatttgactttgggcagaaggggaaaaaaatcgctccgaacaagtacgggaaaatggccttcgcgaaagacgtagtcagaaagaaacgtgccagtatagacttctcaggctttttacctgttctggtgaatgtggagaaagccctgagcgagcacaagaaaatgctgtcaacccagaaggccacaagttga

SEQ ID NO: 8153 - RNA, 1728 nt, synthetic construct
  source 1..1728: mol_type = other RNA
atgagtaaactagccagtctgaaatcagtgcgcacccgcggcgaacttgccgacttgctcaactactccaggtcagcactggcctatgccgtgtacaaggtaccggaggaacagcggtataaggagttcaaggtggccaagagatctggcggggagagaattatacacgctccttgtcccgaactgaaaggtctgcagaagcgacttagtaactacctttatgattgccatcgtgaaatctggccacctcttgaatttccacggcacagttacagccatggctttcagaagaaccgtgggctgtcgatcttctccaacgcatggaagcaccgcaacaagaggttcgtgttcaacgtagatttgaaggattattttccatccttcaacttcggccgagtcaggggctattttcaaaagaaccggtcttttgaactgcatcaggatattgctacgctgattgcacagattgtgtgttacgacaacagcctccctcagggagctcctacttctcctattgtttcagaactcattacctccattctggatcagagattaggtaggctgtctaaaaaacatcattgcacctatagtcggtacgccgacgacataactttttctaccaatcaggccgggtttcccgaacccatcgcagacttttccccccaggcagatggagcctggaaggctggatccgagctggtcggactggtggaacgcagcggcttcgaaataaaccccaataagacaagaatgcaactcgcaacatccagacagtctgccaccggcttagtcgtcaaccgcaaagttaatatccccaagcagtattatgacgacgtacgcgcgatgagcaacagcttattcaaaacaggtgtctgccatcaccctgacactaaggaggccgctagcctggccgttcttaaagggaagttggagtttgttcttgcggctaagacgtaccccaaagggctagtgtcctttagtgacctggagctcgccagcaaggcacctggaggtacaccggtgcctagccactacaagctctaccgacgtttcctggcttatgagaagtttcatgcaaatgcccggcctctcgtaatctgcgaaggcaaaactgataatacctacatcaggtgtgcgatcgcaagcctgaatagcaaattcccattgctccagccaactaccgatgccgagggctctgttcggcaagctttatcattcttcaaacacagcgacaaacacgctaagttgttgtctataagcggtggtgccggcgagctgcacaagtttgtgggaaaatatgggtcgctgctgaaagattttcactccggaggcgagcagcaaccagtgatcgtcatcgtcgacaatgataatgccgccaagcccatgtggtcagtgattaaggagaagatgggatcagaggacaaagtggacgggtctgcgaacttctaccacgtgaaaagaaatctattcgtcgtcccaatccccattaaatccggcaaattcgcaagtattgaggatctgtttgataaaaagaccctagcgacagttaataaggggaaaaagttcaatccacatttgaagtcgcaccagactacaaatcaatacggcaaggaaatcttcgctaaatgggtgatcgaggctaacgctgaaaatatcgacttttcagggttcgagccgcttctgggaaggctcgaggaggtgctgaaggtggagctccaggggtcctga

SEQ ID NO: 8154 - RNA, 1725 nt, synthetic construct
  source 1..1725: mol_type = other RNA
atgacactatcctcttttcgggcctgtaaagacctggccgaccttgcccacctcttgcgagtctcgccaaaaggcttgagctacatcctgtacaaaattccgtcacacctgaaatatacccacttcgagatccccaaaaaatcaggcggagtcagaaccatttcctcccccgaccgccgtctcaagttcgtacagtctcgcctcgcagaattattatacacctgccagcgcgagattctgcctgtggaaaagaacatcaaaaaggtgctgagccatgggtttcagaaaaatcgagatctgagtatccataccaacgcatataagcacacaaacagacgtttcgtcctaaatctggatcttgaagacttcttcccttctcttaattttgggcgagtgagggggttcttcctgaaaaaccgcgattttcagttgaaagaggctctggccaccgtggttgcacagatcgtatgtcacgggaacgaactgccacaaggcgcccctacctcccctataatttcagacctcatggcacgcgtgatggacgtgcacctctctaaaatggcggctagctacgggtgtacgtatagcagatacgtggacgatctgacttttagcacaaaccttgccgagtttccaccggcgctggcgactgaagatccagcaaccggtgcttggagtgccggagctgagctgaggagtagaatttggaggcaaggctttgccttgaacaataagaaaaccagaatgcaggccagaaccagccggcaggaagtgacgggactggtcgtaaacaagtttgtcaacgtccgcactgaggtggaggcttccaataggatactcgtccacactcttgtgaagaaagggaactgcttccaaaaggatccagtgtctggtacgaccaaggccctctccttggagcagatcggaggcaggctgtcttaccagttccagactaaagccgcaagacattctttccgaagtgcgagggagtttgaaaaagcgggggagcccatcccccgtttctatcgcgattacgcaagctatatcaattactgcagtttccacgccaatgacttaccaacaatcgtctgcgagggcaagactgacgtgatttacctgaagaccgctattagagttctatacgctaagttccccaaactggcaggcatctccgctggagagtatgcctcagacgtgcggttttttggccattccaggcatcatacggccgctacaaagctctctggcggcgctggagacattcagcaattcgtgagagaatactcaaagattgtgcacccgttccaccctgggggtcagcttaggcccgttatagttttcgtagacaatgataaggcaacaaatggaatctggagttttattaaggaacggacaggttcaaagacactgatagacggcagcgcacctttttatcatatcgagcggaacctctatgtagtggctgtgccaggaaaggttggcactacagaacggattgttgaggacctctttgacgccaagacaaaaagcatgacctggaatgggaagactgtggatttgaagcaaaaacggggtcatcctcccggaaagggtaagatgtcgaaggagcggtttgccaccaaagtcataagggatcagcgagataacatcgatttttcaggcttcgaacctgttttacaggctttcagcgacattatcgatatcaagctgcccgcctccacttga

SEQ ID NO: 8155 - RNA, 1725 nt, synthetic construct
  source 1..1725: mol_type = other RNA
atgacattgaagacctttcgggcttgcaagaatctgtccgatcttgcccatcttctgcgtgtctctcccaagggcctgagctacattctgtacaaaataccctcacacctgaagtataccaagtttgacgtcccaaagaaatcaggcggcactcgcacgatctcatcgcctgatcggagacttaaattcgtgcagacacgactcgctaaactgttgtacgcctgccaaagggagatcgtgcccgtggagaacaatacgaaaaaggtgctctcacacggatttcagaagaaacgcgggctctctattcacactaatgctaacaagcacaccagccgacggtttgtcctgaacgtggacctggaaggcttcttcccatctgtaaacttcggcagggttagagggtttttcatgaaaaaccgggactttcagctgtccgaagcctgtgctactgtagtcgctcaaattgtgtgccatgataacgagttacctcagggagcccccacgagtcccatagtctctgacctgatggcacgagttatggatgtgcatctgagtaagatggccgctagctacggctgcaagtattccaggtacgttgacgacttgacattcagtacgaatttggctgaattcccaaccgccctcgcagtggaagaacccaggaccggaacctggtccgctggttcagagctaagagggcggatctggcgtcaggggtttgcccttaatgaccagaagactagaatgcggcgccgaacttctcggcaggaggtgaccggcctggtggtgaataagttcgtaaacgtgcgagctgaggtagaggcgagtaatcgcgttctagtgcatacccaagtaaaaaaagggagttgttttctgaaagatcctaaaagcggagcaacaaccccactctctctcgaacaactcggtggtcgcctgagccatcagttcgaaaccaaggccgcgaggcacaacttcatgtccgcccgtgagtttgagaaagctcgcgaagccatcccaaagttttatcgggattactctgcgtatatttactacagaaacttccacgtgaatgacctacccactatagtttgtgagggtatcacagatgctatctatttgaaaacagccatcagggtcctccacgcgaaattcccgaatctggccggaacatcagccgggaagtacgtatcggatgtgagattttttggatattccagacaccataccgcagccaccaagctgagcggaggagcaggggacgttcagcattttgtcaaggaatatggtaagattgtgcatcctttccacgccgggggccagctcaagcctgttatcgtgttcgttgataacgacaaagcaactaacgggatttggagctacatcaaagaaaagactgggtccaagactcctattgacggcagtgacccattttaccacatagagaggaatctttatgtggtcgccgtgccaggaaaagtgggaggcgccgagagggtcgtcgaggatttattcgacgcagcaacaaagtccatggcatgggagggtaagacagtggatctgaagcagaagaggggccaccctcccgcgaaaggcaagatgtctaaagagcgcttcgcaacaaaagtgatcagagatcagagagacaagattgatttctccggctttgaaccggtcttagaagccttcagcgagatcatcgacattaaattggctggcagcaaatga

SEQ ID NO: 8156 - RNA, 1725 nt, synthetic construct
  source 1..1725: mol_type = other RNA
atgacactgaagaatctgagagcatgcaaggatctgtctgacctagcacaccttctttcggctagccccaaggggttgtcttatatcctgtacaagatcccccctcacctgaagtacaccaggttcgaagtgccaaaaaagagtggcggaactaggacaatctcctccccagagagacgtctgaagttcgtccaatcccgtttgaccgaattactttacgcatgtcagcgcgagatcgtccctgttgaggagaatattaagaaagtcctgagtcacgggtttcagaagaagcggggtctgtccattcaaactaacgcgggaaagcataccaaccgaagatttgtgctgaacgtggatctcgaggacttcttcccctcactgaatttcggccgggtgcggggtagcttcctcaaaaatcgcgattttcagctgcccgaacctgtggccacagtcattgctcaaatagtgtgtcatgataacgaattacctcagggggcccctacgagccctattgtctccgacttaatggcccgagtcatggatgtgcacctatctaagatggcggcagcgcacggctgtacctatagccgctacgttgatgatctgacattttcgaccaatttggcagaatttcccccagctcttgccctggaaaacccacttaccggaaagtgggatgccggccatgagcttagaggacggatctggcgacagggttttaccattaacgatcaaaagacgagaatgcagactcgggccagtaggcaagaagtgactggtttgatagtgaacgagtttgtaaatgtgagaaccgaaatcgaggcacgaaatagagtgctcgtccatgccctaatgaagaagggtacttgcttccagaaggacccaaaaagtggcgctgctactccaatgtctttggaggaggtgggaggccgcctgtcacatcagtttcagatcaaagctgccagacacggcttcaagagcgccagggaatttgagaaggccggagacgacatccctaaattttaccgtgactatgcacattacatcaactactgctctttccacgtgaatcccgttcccacaattgtgtgcgaagggaagacggacgttatctatctcaaaacagccatccaggtgctccacgcaaaattccctaagctgggcgggttaagcggggggaagtatgcctccgatgttaggttctttggccagtcccgacaccacacagccgcgacaaggctgagtggtggagctggcgatgtacaacattttgtacgcgactataacaaaattgtgctcccctttcatgctggtggccagttgtcacctgttatagtcttcgtggacaacgacaaggccaccaatggaatttggagcttcataaaagagcgcacaggctcagccaccccgattgacgggagcgacccgttttaccacatagagcggaacctcttcgttgttgccgtacccgggaaagtcggaaatactgaacgcatcgtggaggacctgttcgacgcagctactaaagctatgacatgggatggaaaaaccgtagacctgaaacagaaaagggggcagccacccgccaaaggcaaaatgtccaaagagaggttcgctacgaagattgtccgggatcagcggtcaaaaatcgacttctctggcttcgagccagtgctcaaggcatttagcgatatcattgatactaaactcaccccgtctaagtga

SEQ ID NO: 8157 - RNA, 1716 nt, synthetic construct
  source 1..1716: mol_type = other RNA
atgctggacgatctgaaatcatgcaccagcaggtctggcttagcagtgctactcggcgtgaaaccttcagagctgagttatacgctctacaagatcccggatgccgccaaatatactagtttctgcatcagcaaaaagtcagggggaacaagacagattcaggctccctgtccacctctgaaatggctgcagggcagattgctggacctcctgtaccagtgtgaagatgatatcagtgccgcttctgggctgaagcggaatctgcactctggatttaggcgtggcgtaaatatttatgagaatgcaaacgcccataggggaaagaggtttgtgttcaacatagacattgagagctttttcgaccagtacaactttggacgcgtgcgggcttttttcattaatgaccgagacttcgcgttgcaacccgcagttgcaaccacgatcgctcaaattgtgtgtttcaataatgtcctccctcagggttctcccacatcgccccacatcgcgaaccttctgacccagtttttcgataaccgaatggctcgatttcttcgcccccggcgttgcggatacacacgctatgccgacgacataactatctccaccaatgtaagagaatttcccgctgatgtggctattatgacaccagctgacccccagggctggtctatcgcaccagaattggctgccatatttggccgagcaaatttgccgcctaacccctcaaaaacaagaatgagcgcgtactccagccggcagactgtgactgggctggttgtcaaccaacggcctaacgtgaccagagagtactatctccacacacgggccatgtgcgatcgcttattcaagactggcaccattcagattccagatataacgagtagctacggaaagaactgtccagtatcagacgatgctgagcctgaagccgatgtggacccactcaaggtccttgagggcaggctgtcccatatccaccatatcagagagaaaagtgaccttcgtaatattcaggagaaacaggacaatcccacacaattctggaacatgttgcaggatttctttctgttcaaatacttcgtcgcaaactcgaagcctttaatattaaccgaaggccctagcgatatcttttatcttcggtctgcaatcattaataacaccaccctgctggtgccggagctcaagaaggtcgtgagtgggaaaccagagattcttcccacgtttttcaggttcaatacagtcgctgccaaggtgattggcctgactgggggggcgggaaacattaagcgctttctgtacctctaccataagcaggaaaagaggttcaatcgctccctaagacacaaacctgtaatcattatcatcgacaacgattccggcggtgcggacgtgataaacatggttaacggaatctataagaccaatatttctctcagcgatccgataatggcccacaagatcacagacggtctgatcctcgttaaaacaccacatgtggggtccaagactcacaccgccatcgaagatctgctgccagcctccgttaaggccgttaagctaaatgggaaatcatttagcgccgcaaagaaattcgacgctaccaaacactttggtaagatagcattgggttcctatgtgcaagccaatgcctccagcatctctttccaggggttcgatgactttatcgtcgccatcaacggcgccattactatgtga

SEQ ID NO: 8158 - RNA, 1710 nt, synthetic construct
  source 1..1710: mol_type = other RNA
atgctcgacgatttgaaggcctgtcggaaccgatcagatctggcacatcttctaggggtcaaaccgagcagtctggcctatacactatttaagatcccagatgtcagcaagtacagtaaattttgcatctccaaaaagcgaggaggcacccgacagattatggctccttgcgtgcgcttaaaaaatctgcaaactagattgttagcgatattgtatcagtgcgaggatgacatagagaaagcatccggcatccaccgctccctccatctcgggtttaggagggaggtgaatatttacgacaacgcacgtctgcaccgcaagaggaggtatgtgttcaacattgacattgagaagttctttgacaactacaatttcggccgagtgagatcgtttttcatcaaggatcatgatttttctctgcacccagacgtggctactacaatcgctcagatcgcctgcttcaataatgtacttcctcagggatctccaacatcacctcacattgctaatttactgtcccagttttttgacaatcggatgagtaggtttctggggcacagacgttgtgcttatagccgctatgcagatgatatcacaatcagcaccaacttgaaagaattccccagcgatattgccagcgttacgaccaccgttccccagggctgggtgattgccccagaactgctgtcaatactgactcggagtgggctccctccgaatcttgccaaaactcggatgtccctcaggtccagcaggcaaatggttacggggctcgtggtcaataaacacccttcagtgcctagggagtattacctgcaaacacgcgccatgtgtgactatcttttcaagggtaagattcctcacatcccggacatcacaagtgactacggcgaaaactgcccaagtagcctcggccataagaagaagaagcccgattacatgagagtcatcgagggacgtctgtcttacatctcttacattcgcaaacggagcgcaaagttttccaccgaatacaaaaatgacaagaactcccagttcaacaatctgttcatcgacttcttgatcttcaagaacttctacatgaacgaaaaacccataattctgaccgagggtccatccgatatcctctacatcaaatcagccattagaagcagtactctttcgttgccccacctcaaaagaatcaattccggaaaattggagattataccccggttcttccggtttcacagtgcttcttctaaaaccctaggcttaacaggaggaaccggcaacctaaaaaacttcctgaatctgtacaagaagagatcaagcaaatttagagtgagccccaacgagaataagatcattattgtcgtggacaacgactctgggggaaaagacactatctgtgcaattaacagcctctataagaagaacattcagatctctgatccaaccataatccataagataactgagaagctgaccctggtaaagacaccccatgtggggattaaaaaagaaaccactatcgaggatctccttcctgacgatgttaagtccgtcactattaacggcaagacattctcagccgaaaaaatactggacgaaaccaagaatttcggtaaaataaagcttgcttcctatgtgcatgataacgcctctgtaatcgactttacagcgtttaatgatttcctgtctgagctggactcaggttttacgacgtga

SEQ ID NO: 8159 - RNA, 1710 nt, synthetic construct
  source 1..1710: mol_type = other RNA
atgctttccgacctcaaagcatgtcaggaccgtaagggtttggccatcttactgggagtttctcccaaggagtttgcttataccctgttccatattccaggagatcagaagtatgagagcttttgtgtatctaagaaaaacgggggcactaggaatattctggcacccgttccaagactcaagtggctgcagaggcgtctgctagagatactataccaatgcgccgaggacatctcagtgagtgctggagagtcccccaacctgcattttgggttcagaccccaattcaatatatacgaaaacgcattcgtccataggcggagacggtttgtgctgaacttagatatcgtcgattatttcgaccagtttaactttggtcgggtccaaggctttttcctgaaggacaaaaatttcgagcttgtgccggctgtagcaacagccattgcccaaatcgcatgctttgataataaactcccccagggatccccatgttctccccacatagccaatcttgtctcccagttttttgacaatcgcatggccagattcctacgatcacgtcggtgctcttactcaagatatgccgatgatattaccatcagcactaatctgagagtcttccctagtgacgtggcggaggcgtcagattccccacagggctggcagatttcaccaatcttgacagacattttccagcggtccggattcgctataaatgatacaaaagtgcgcatgggagtgttccactcaagacagacagttacgggcctgaccgtcaataaacaccccaacatttcacgagacttttacctgaattccagggctatgtgcaatagtcttatcaagagcggcagtttcatcgttcaggatattagcggctccttcgggaacagctgtaacccagatctccctcctcccatcaaaagtccattaatggtgctggaaggtcgactgagccatatccacaatatcaaggaaaaaaacgatgggcgcgacctcaagtacaaacaggccagccctacccagttttggaagttgctgcgcaagttctaccaatacaagtacttcgtcattaacgactatcctttgatcatcactgaaggcccatccgacatattttatttaaagtctgcgattcggaacaccaaactcctggtacctaacttgtatgctgacgaaaaagggggaaggaggattctcccgcaattctttaacctgtcgaacctacccagtaaagtgctggccttgaacgggggggcaggcaacatcaagaagtttatccaccagtacagtattgagatgcgcaacttcttcacactgaatcggactaatcccgtggttatggtcgtggacaatgactctggcggcgaggatgtgttcggacagatcaaaaaatctttcggactgtctgttaagacgtccgataaggattgcatggtgaaggtgtcagactacctctaccttatcaagaccccgcacattgggcctcaggacaaaacaagcgtggaagatatgctccctagcgctgtaaggggcgtggcgctgaatggtaaaaccttctctactgcttccaaatttgacacctcgaagcactttgggaaggtggctttggccagctatgtgcatgccaacagcggcagtgtcgacttttctggttttgatcctctgcttcttgcactcgaccgcgccatagccgattcgaagagctga

SEQ ID NO: 8160 - RNA, 1710 nt, synthetic construct
  source 1..1710: mol_type = other RNA
atgctgacagacttgaaagactgtaccaccagagctgcgcttgcctccatcctgggggttgaggcaaaggaactggcctatgtgctttacaaaatcgaccagggctcgaagtacacttctttctgcatatcaaaaaagaacgggggtacccggcagatccaggcaccaattcccaagctgaggttcatccaatcacgcctgcaacaaatcagtatggcttgctgtgatgatattgccgacctgggaatctacaagggaaagctcagttttgcttttcaaaaggaccgtaacatatttgagaacgctagaccacatgtaggcaaacgatttattctgaaccttgacatccgggatttctttcaccagtgcaactttgggagggtcagagggtattttattcacagcaaggaatggaagctggatcccgcagttgcgaccgtgatcgcacagatagcatgtgttgatgagggtttaccccagggctcgccttcctcacccattattgctaatttattggggcaaatcctggatgtccgcctcacaaggttcctccatcctcggcgatgcacctatacgaggtactgtgacgatattactattagcacagacatgcgcgtctttccgcgggacgtggctgtccaggatgactcttggccatctggttgggccctggctgcaccactggaggatatctttgtaagagccgacttccccatcaactataacaagctaaggatgagttttgactgtagtaagaaggtggtgacaggtctgacggtaaataggttcccaaacattgaccgtaaattttatagagacacccgattgctgctggacaggtacgcccagaccagcagctgtaaatacatcgaattcactggaaatttcggcaacaattgcgataacactgagacaaaaaataagaacccgattcttcggctcgggggccggttagcgttcatccaccacattaaaagccgaacctccttgataggatacccgggcatcgtgcaccctcagaacccccagttttacggcatggtgcagacttatgcgttcgccaaagactttgtgtttaattctattcctaccgtcgtgacagaggggccctcagacatcatccatctcaaagccgccattcgtgcaaacccagcctgggcccctcacatatttgactccaaggaaaatcgcttcctggtcaaattcgcccgccatgatggcctcttcgcaacagtgttgggcatgagcggcggtacaggaaatatcggcagatttttggacctatactatagcaggttcaaacggatcaattacaagattcgcacacagccatcagtcatcgttgttgataatgataagggcagccacggaatactcaagagactctctaacatacataagatgaaactgagtaccggagatggtctggtggtgaagaagctacagccttttttctacatctgcaaaacccctcaattagctggcaaagctgaaactgccatagaggatctgctcccttccgcaatcacagggatggtggtgggagggaaaacgttcgagcccgataccaaaaagttcgaatcctccaaaaatttcggaaagattttccttgctaagatggtagctacgcagcactctgcaactgcgtatgccaatttccagcagttcattactgggcttgatgacgccgtggccggagttgccaagtga

SEQ ID NO: 8161 - RNA, 1335 nt, synthetic construct
  source 1..1335: mol_type = other RNA
atgctcattgatctcaaggcatgcaaggataagagagacttggcgcacctgttaggatttcagcttaagaccataacataccagatcaatatcgccccagacgccgagaagtacaagaagatttgcatcagcaaaaaaaacggcaacagcagaaccgttttttcccccaacccgattcttaaaagtatccagaattccctactggagataattacctcttgctacgaccagatccacggaggcatgaactatccggtgagtttcggcttcatacccaatttgaacatctacgacaatgcaaagcgccatattggaaagaggtgggtcttcaacgtagatataaaggactattttgactcgatcaactatggacgagtgtggcgttacctgcagaaaaacaaaaacttcctgctcaatgccgaaattgccaccatgatctcacagatcgtttgttttgatggtcgactgcctcaaggggcacccacgagccctatgatggctaatttggtcagcgggagtctcgactatagattaagatcacttgcctctgaacataaatgtacctatagtaggtatgccgatgacattactttctctaccaacctccgggatttcccagaggaagtcgctcgatacgatgagccttccggttcctggcttcccggcaaaggcctgttatcttgcgtgagccgcgcgtggtttagtttaaatgatggcaaaacacgaatgagctacaggaggtcaaagcaagtagtgactggtctgatagtgaataagaaggtgaatgttgatagagaatacttcaagctggtacgtgcaaacattcaccatctactgacaggcaggccagtcatactccaggagttttgtgatccatacggagagaattgcgacgggaaggaggtgaaaaataagaacgggatgtcactcattgagggccgcattaacttctgttttgaaatcaacgaccaaggggatgaacggacggacaatgccaagttttttaaaccatcttcagtcagaaagacataccgcgacttcctgatctataaatatttcatccacggggatcggcccatcctgatcaccgaaggtgagtctgacattgtctacatggctgcttacttgaaagcacggagcctgcctcttgctaatttggtggatgtgtccccccccgacaaccggaagatcctgattgacttctatcagtttccaaaacggccttccaaaatcattggcatgactggtggcacttccggggtggctttcgccctgaagtgggttggagagatcctccctcgtctgggaaaaaatgtgagcaggcgcaagttttga

SEQ ID NO: 8162 - RNA, 1842 nt, synthetic construct
  source 1..1842: mol_type = other RNA
atgacggagccaaagaacttagaaaagctgaagagcatcacaaaacgggaggaattggctgaccttctgggcctctcccgtcgcagattattctgtactttgtatatggaacccatgtcctcaaagtataacactttcagcatcccgaaaaaaagtggctcggacttgagaataattaaggcacccaatagtcacctgaaattcattcagtggaggttagccaagtacctgagtgaatgtctggaggagattaaaaaaaaggaaaagtttccacacctctcttttgcctttcagaagaaactgtcaattaaggacaacgcgctaaaacatatcaacaagcggtgggttttgaatctggacatcagcgatttcttctctagcatatcatttaatcgggtgaacaggttctttctcaagaataagttctttcagctgaacgatgagatagctaccacaattgcccagatcgcctgcgacgaacaggcactacctcagggatcaccgtgcagcccaattatctccgagttcatcacccaaagcttagatgttagactcctgaagctggccaagcaataccacctgacgtactctcgatatgcagatgatattaccctatccacaaatcagaaggtcttccctcgcgaggttgcttatcccgatagctccgccgagaatggatggcaggtcagtgaaaccctgagatcaatcattcaacggtccggatttaagatcaacgaagagaaaacgcgtatgcagaaaaattgcgtccggcaagtggccaccggtcttgtaattaataaaaaacccaatgtcgccgataattactaccgcacggtgcgctccatgtgccatcacgtgttcgaaaaaggggcctactataggagtccagaggacaaagacaatcctacctgtgaccttaatcccctagcgggcaaacttaacttcattcacgacatcaagaagaatagcgatgagactaatagttcctctctccgcggcggaaacaacctgaccctgagcgggttcgatggcctctacaagaagttccttttctatcgtctgtttctttgtctgaacaagcctatgatcgtgacagaggggaaaactgaccctatatacttgcgctgtgctattaaacatgggaacaaaatcaagaatgcttatgggaagaccgtcggcaggtacatcacacagtcgattctgttcttttcaagggagcggtcttatgcagaggcgtttaacttcaaggaaggtgggtcgaataatctcctcgatatcataaagctgtacaaagaatacctgcatagctctaaaaaacgacaaatccagtccagaccctgcgcttttcctgtgattttacttttcgataacgatgacggtataaaaaccactagcagctacgtgaaaaagaactttgacattatcttgaccacagaaacaactgacgatttctactacctgttcgataatctctatatcgtaaaaaccgtggagaagaaatataacaccgagtatgagaagaatgacgataaaaaccaccagtatgacaatatcaagaacaaggtgaagaacaagaagaacctcatcaaaaattctgagtcttgcattgaggactgtttttttaagaagacactcgaaaagacactgcatggcaaaaaatttaccaagaacaacaacggacattccaacacagaatactctaaggataaatttgcaactgagattgtttccgccgagccctggtcaatcgacttcagtggctttgacggactgttggataggataagaaaggtgatcgaagactacaaaaagctgcacaatcacccaactataaaccgatga

SEQ ID NO: 8163 - RNA, 1707 nt, synthetic construct
  source 1..1707: mol_type = other RNA
atggctctgaaggctgctacgaaccgacacgatctggcggcactgctccggttccagacaaaaatgatgacaagcattgtatacgcgactcatgagtctttaaagtataagaccttcaaggtcccgaagaaatccggtggagacaggacgatagcagcccccatacctcagcttaagctcctgcagcggagattagccgacctgttgatggattgccatgccgccatcatggatacgcaccctcataggaaaggacttcaattcgggtacctgccagagctctccgtggtggataacgcttatcgccaccgccgacggagaatggtacttaacgtggaccttgcagatttcttttcgagcattaactttgggcgcgttcgtgggttttttttatctgacgcagcctttcagctgcacccagtagtggctacaactattgctcaaatcgcatgttggaataatgagctgccccagggtagcccctgttctcccataattagtgggctaataggaggaatcctggatcgaaggctcggcgcccttgcgagagagcacggatgtacttattcccgctacgttgatgacctgacctttagcaccaatgcggatactttccccaacgaattagccgcacttgacccagctacaggaaggtgggcagtcggtggcaagttgagccacgccgtcggcaaggccggatttttggtcaatcctgacaaaaccaggctgttcggcatgacaggacggcagacagttaccggcttagtcgtaaacgacaaggtgaatattaatagagactacgaaatgcggaccagggctgccgtccatcattttatccgtaaaggtgtttacaccgtgccagccagtctggaaagtgtggctgccggcaagccgccagagaaggaaacctctccccaccgcctggaaggcatgctgcagtggatttactccgtgagagacttttcagacgaccggaaagatggctccaagagacatcacccaaccagtttctccaaggtgtatcgagaatttctctttgctaaacacttcctgttcatggataaacctttgatcctatgcgaagggaaaactgataacgtgtacctaaactcagcactgaaacgccttgctgcctcttacccttccctcggatcatgggtgggtgccgatttcaaaagcaacctcagactgttcaggtacactagtaaatctctccaaatcctccatctcggcgggggatgtggcgatattgtgcagctagtccgggactatcgtcggctgtggactagattggtgcatcgccagatcgcccaaccagtggtgctggttgtcgacaacgacgagggtggggctagcgtgtttaaagccatcaaggaagttgggggccctgatattaagattgccgagcctaagatcctcttccacgtgttccacaatctgtatatcatcaagaccccctgcgggagcgggacaccgaaatcatgcgtagaggatttgtttgacgcggcaactttgggccagaccctgggtggcaaaacattcaatcccgcctgcgatgaggagacggccaagcactatggcaagaaaatcttcgcagagggcgtcatcaggcccaattggaagacaatcgacttcgcagggtttcattcgatactggcctcactcgaggacgctattaagggatactatggcatgctggttccttga

SEQ ID NO: 8164 - RNA, 1941 nt, synthetic construct
  source 1..1941: mol_type = other RNA
atgtcccagcttcagcagctcaaaaactgcaagtccctaagtgactttgcccttctgttaggttacaatgctaaaggcctgtcttatatcttgtacaaaattgacgacagcgctaagtacactagtttccagattgataagaagtccggtggcaagaggactatatctaagccgtgcctgaagctgaaaatgttgcagagaaaactcgcgaatctgctttatgattgcatagaggagaagaagcctaatggggaacgcttgactgattttaaagggtctgacaagaccctgcccaagcggaaacgcgctgccaaatcgatcagccacgggtacgaaaagggattaagtattgcaacgaacgctgaaatgcacatcaaaaaacggtacgtatacaatatcgacctggagagtttctttccctcctttaactttggccgcgtacggggctttttcattaagaacaagcagttcaaactccacccgaaagtcgcaactatcatagcccagatcgcctgccatcaaaaccaactcccacaagggagtccttgctcacccgtaatatctaacatgatctgtaagaaccttgactactacctgctgggaatagccaaagagaacggatgtgtgtacacacgatatgtagatgacttaacattcagcactaataagaagaagttccctgttgccattgctgagaataggctcaagttttttgggaaacagtcctggtcactaggaaaagaggttgaagaagcaatcctgaaggccggtttcaaggtgaaccgaaagaagtgccggatgcagacctcttattcaaggcaggaagtgacaggactgactgtgaacaggaaggtgaacaccagcagcgcctactatcgcaatgtgagagcaatgtgtcacagtgtgttcaagcacggatactacacactccctcaacagaaggaaccaccaaagaagcagggctggctctcaaaactgacttccatattcggcctgaaaattggggtcaatgaacctaacatcgcccagctggagaagcagacatcattggaaagccttcagggtaagctggcacacatctacaacattaagtcctataggaataagttctcccgccgtggctataggccgaccaaacatgatggaatcagaaccaataattcgaaaaacccatttcctcccctggacagatctgagacatataccgatgacaatcatatcgtcgctctggacgggattaaaaacctgtatggcaagttcctatttttcaagcacttctacgccaataagaaaccaactattatctgtgaaggcaaaaccgacaatatctacctcaaatgtgcactggagtcacttgttgctaagtatccccgtctaagcaaagataagaacgggaattttcaagtgcacttcttcaatcgtacggaaacgtccagtgaaatgctcaaattggtggagggatctcccggtctggtctatttggtggagatctataaacgattcaccaaactctttaactcaaatggtcaagagtatcctgtcattattgtcgtggataatgatgatgcgggacggggcgtgatcaaaaaggccgacaaaatacgccaggaaaatagaaacgcaaagagcatcaagaaagtcagaaggagcgactacttcttcgagaacttatacattgttaaggttccctctacagcgggcgagaaggataaggagattgaggatctgtttgatcctatcttattgcagaccaaactcaatggcaagacctttcatcggaataacaccggcctggaccccaacaaacattttgggaaagctcattttagcgagtatgttgtgacacccaataaaggatccattgattttagagggttcgagccactccttgatatcattaacgacatcgtgaacaatttcaacccaaacgacctggactga

SEQ ID NO: 8165 - RNA, 1962 nt, synthetic construct
  source 1..1962: mol_type = other RNA
atgagccagcttgaagctttgcgcaaatccaaatccattaacgacttagcccctatcctgggttataaaccaaagagtctcgccttcatcttattcaaaattcccgatcaggacaagtatacgtgttttaacgtggctaagaagtccgggggaaaacggaccatctctaagccctgcgacaagctgaaggcactgcagagaaaactggctgacctgctttacagttgtagcgacgaactaaagccgatcaatcaaagcatcaagagctttaaaggcggaaacaaacagatacctctgtccgagagagctaaaaaaagcatttcccacggttatgagaaaggcctgagcattgcctcgaatgcttccatgcatacaaataagaggtatgtctacaacattgacatcaagtcttttttcccgtcgtttaatttcggacgagtgcggggcttcttcataaagaacaagaactttaggctgcaccccaaagtcgcaacattaatagcccaaatcgcctgctttgagaatgagttgccccagggatcacccgcttctccagtgatcagcaatctgatctgtaagagtctagacattgaacttttgagtatcgctaaacgttatagctgcatttacacaaggtacgtcgatgatctcacatttagtaccaaccagaaactttttcccaaggaaatcgccataaaacctagattcggcttcggacgggaaaattggagactgggcaaagaggttgaggctaccatcatcaaatcagggttccagatcaacactaaaaaatgccgcatgcagtataagacgtcatcacaggaagtgaccggcctaacagtcaacaagaaggtgaatgttagaaatctgtactacaggaatgtccgagcaatggccaactcactctttaagtacggtttttactacagacccgcaccatcaactagcaagatccgcgacgaatccaagaaatccctctatcagaggatatactctattttcttccggcgcgttgtgcgtgctgccccaaccaagaagaaggtaaaacagattgaaagtgcggacccactcatcggaatgctcgcctacatattcaacattaagagctatcgaaacaagttcgtgcggcgcgggtttcggccagacatacataatggcattcggaccaaaagcaatgggtccatcacatttccaaccgtagataggtcagagagttacgaagatgataatcacgtcatagccctcgacggcattaagaacctgtatggcaaggtgcttttctacaagtatttctatgccttggagaagcctctgatcattggagagggcaagactgataatatttatctcaaatgcgcgatagaaggccttgctaacactttcccacaactcgcaaaaaactcctccggatcacaacaggtttctttttttaatcgcacacccaccaatacggatatgctgagactggccgaagggacccctgggctggagtatctgatatctatctataagaggttcatgtctttctacaaatgtgagggtaagcagcaccctgttatttttattgtggacaatgatgacgcgggtcgcgggtttatcaataaagcaagcaaaatccgagatcagattcgtagcgcgaaaaaggtgaagactcaaaggcataagtactattacttcgaaaacgtctacatcgtgcctatccccaaacagaaattcaacggcaataaagtgaaggatattgaggacttgtttgacgattctgtattagcagagaagctggaggggaagagtttttacaataacaacaagggattggatacttctaagcactatgggaaagcatacctctccgagtacgtgatcaaaccgaacaagaacaagattaacttcaatgagttccaacctattctggccgatatcgccgacatcatcaagtcttacgataataacaacctggactga

SEQ ID NO: 8166 - RNA, 1956 nt, synthetic construct
  source 1..1956: mol_type = other RNA
atgtctaagttaacacaattgaaacagtcctccagtctgagtgatgtcgctagcttgctggggtacaaaccctcggcactggcttttattctgtaccgcatggacgacgttgacaagtatttcactttcgatgttcctaaaaagtccggcggtcatagggtaatttgcgctccatgtgataagctcaagaagttgcagcggaaactcgccgacctgttatacgactgtatcgaggaagataagccatctgaggagacactgggcgagtttcgaggcgagaatagtgacctgccactccgaaaaagggctcgtaaatccatgtcccatggctatgagaaggggctgagcattgcaacaaatgcagaaatgcatgtggggaaaaggtttgtgtataatatcgacctcacctcttttttcgactgctttaactttggcagggtgagaggatatttcttaaagaactctaggtttcgtcttaattctaaggtggctacgatcctagcacagatcgcctgcttccagaataagctccctcaaggatcaccctgctcccctgtgattagcaacctgatcagcaaacacctcgattatcatctgctttccatagctaaaaaccatagttgcacctacacacggtatgtcgacgatctgactttttctaccaaccagaaagcctttccaaaggccatcgccaagcggcgcttcctaactctagagaaagggagctggagactcggtagtgccgtgaagggcgcaatcgagaatgcaggatttagcgtgaacgagaacaagtcaagaatgcaatatagggattccagacaagaagtcacgggactaaccgttaataaaagggttaacgtgtcgtcatctagctatcgccagatacgcagcatgtgtcactcaatgttcaagttcggatattactttaagagttcagcccgcaccgtgagcaagcctaaaactaactccatactcacacggctgtacaataaattcgccctgaagtacttcagggtgcacacccaggatgacgaattaggagacactcaggggcaggaatgtactagcctggcctctctcgacggcatgctggctcacatttatcacatcaaatcctaccagaacagattctccagaaaggggcaccggccgtctagccacgatggcataagaaccaagttcaatgaatcttcctcttatcctccgatcgtccggggcgacacttacgcgtctgacaaccaccgtgtcgcgcttgacggtatcaagaatctgtaccgcaagttcatgtttttccggtacttttactataacgagaagcccttgataatatgtgaaggcaagaccgacaacatttacttaaaagccgccattagtcgactcggtaatgcctaccccgagctgtatgatgcaacgaccaaacgctgtagaatttccttcttctctaagagcgatcggaacttggaaatcctgaaaatggctgaagggacaagcgggctgtcatatctgattaagagctacaagcgcctgtgcagcaaatacaaaattaaagggggctcgcatcccgttatcgtaatcgtcgataatgatgatgctggaagaggtgtcatcaagaaagctgagaagattaagaatgacacaatcaagagcaaggggatcgccgcaaactataggcttgattactttttcgagaatctttacatccttgccgtgccatcaggcgctggcgatgcagatatagaggacctgttcgactcatcagtattgaaccgagagctgtcaggaaagaagttcagtcgaaagaataaaaagtccgacggtagtacctacggaaaagcctggtttgcagaacgggtgattaaagcggagagggaaaaaattaactttgccaaatttgccccccttttggaccaggtgcgtgacattatcaaagcgcacgatagtagaaatctcatctga

SEQ ID NO: 8167 - RNA, 1944 nt, synthetic construct
  source 1..1944: mol_type = other RNA
atgaccacgtcgctcaatagcctgaaaaagtgtagttccctgaatgatttcgcgctgctgctgggataccagccgaagtccctcgcatatgtgctgtataagatcgaagacaagaagaaatacacttcctttgagatacctaagaaatctggtggagtcagggtgattcaaaaacccaatgtgaagctgaagttgctccagaaaaagctggcggtcttactgtatgaatgcattgaggagttaaagcctgaaggtgagaagcttgttgactttaatggagggaaaaacaaactgcctattcgtaaaagagcaaaaaaggccctcagtcacggctatgaaaagggcctatcaatttccaccaatgctgaacaacatatcaacaagaagtacgtctacaatattgacatcgagagtttctttccaagctttaacttcggccgggtgcggggtttttttcttaaaaacaagaacttccggctgaaccccaaggtggctaccgtcattgcccaaatcgcgtgcttcgagaattgtctgccacaaggctccccgtgttcacccgtaattagcaatctaatcgccaaaaaccttgattatatgctccttagcattgctagacgcaattcatgcacctactctagatacgtggacgacttgactttcagtactaatatgcgagagttccctaaatccattgcctatcagaggatcctgacactgcggaagaatccatggatcctaggccacgaggttgagaatgccatcaaagatgccggctttaagattaaccccaagaagtcacgcatgcaaatgaaccattctaggcaggaggtgacggggctgacggtcaataaaaaagtcaatatcagctctggatactataaaatggttcgagccatgtgtcatcagttttttatggaggggtacttttacaaacctcagaaagagaaaaagaacatctctaaaagctacttcaacaaactcatcgacatcttcaagaaagagaggtttgaggttatcaatgatgagtccattgaacgcgtaaaactggactcacccgacatcttacagggcatgctcgctcacatatataacgtgaagtcttatcgtaaccgtttcgcacgcaggggctatcggcctactagacacgatggaatattcaccaaacataagaatccctccccattccccccattagaccggtgcgatagctacacagatatcaatcacattgtggcccttgacgggatcaggaacctttatggacgatttttgttcttcaagtacttctacctcctaaaaaaacctctcatactgtgtgaaggaaaaacagacatcacctatttgcggtgcgcaatagaccagttggcaacatcatatccctaccttagaaatgataagggcaacaaccaggtaagtttctttaacaagaccaagattaacgttgaaatgctcaaactggctgaaggcacaagtgggttgacctacttgatcgatatatataaacgcttcagctcgcagtacaaatgcgagggtcagctgcaccctgtgattctgctggtggattgtgatgctgccgggaacggggtgttgaacaaagctgccgctataagggattccaatagaaaggcgaaaaagatcgaaaagcagcgccatgccgactactactttgagaacctgtacattgtaaagatcccagcaaagaataagggcaagactgacattgagaatctgtttccagatgaggtgctgaacatggaactcaacaagaagaagttcaaccccaagaacaagggtgccgactctgatactgaatacgggaaagcctatttcgcagaatacgtggtcagagctaacaagaacaagattgactttagcggatttaagccgctgctcgataatatccaggacatcataacaacatatgaccacaatgaacttgattga

SEQ ID NO: 8168 - RNA, 1944 nt, synthetic construct
  source 1..1944: mol_type = other RNA
atgacaacatccctacatagcctgaagaagtgctcttcattcaatgattttgcgatccttttgggctaccagccatccagcctcgcctatgtcctatacaagatccaggagaaggacaagtatacgacttttgaaattccaaagaagtcagggggagtccgcacaatccaaaaacccaaccccaagctcaaactgttgcagaaaaaactcgccaatctactgtatggatgtatagaagaactgaagccccagggtgagaaactggaagaatttaaggggagttttaagtcccctcctctccgcaaaagggctaagaacgcattgagccatggatatgagaaaggtcttagtatttcaaccaatgctgagagacacgtgaacaaacggtacgtttataacattgatatcgagagcttctttcctagtttcaacttcggacgcgtaagagggttcttcctgaagaataaaaactttcggatccacccaaaggtggcgaccgtcattgcacagatcgcatgtcacgataatcaactgccccagggatcaccatgctcacccgtcatcagcaatctcatcgcaaaaaatctggattacatgctgctgagtatagctaagaataatagctgtacctactcccgatacgtggacgacttaacttttagtaccaacctcaacgaatttcccaaagccatcgccagcaagtctgtgctgactctgagacaaaacccgtggttactggggaaagaagtagaaaaagctatctctgacgcaggcttcaaaatcaatcctaaaaaatcccgaatgcagcttaacaactctcggcaagaagtgactggcctggtggttaatcgtaaagtgaatgtcagctctggctactataaaatggtgcgggccatgtgtcatcagttgtttaccgaggggtatttttacaaaccaaaggaagaggttaagctgacaaaaaaaacgctcttttcccgcctgatcaggattctgaagacgtctaccgcagagaaggtgaaggaggagatcgaaaccgtgaaactggactcgccggatatgctgcaagggatgctggcgcatatttataacgtacgttcgtacaggaatagattcgcccgaaaaggctaccgtccaacacagcatgacgggataaacaccaagcacaacaataacaataagtttcctccacttgacagatgcgatagttatactgacgttaaccacgtgctcgccttggatggtattagaaatttatacggtcgcttcctcttcttcaagtacttttatttcctcaagaagcccctaattgtatgcgaggggaaaaccgataatatctacttgaagtgtgcgattgatagccttgctaaggattacccaatcctctgcaagagcaaggaaaacgataaccaggtttccttcttcaacaaaacaaagactaactctgagatgcttaaactggccgaaggcactcctggccttacctacttaatagagatctacaaaaggttttcctctcagtacaagtgcgagggacagcactttcccgtgataatcctggtcgactgtgataaggccggactgggagttttgaggaaggctgcctccattcgggataataatcggaaggcaaaaaacatcacacaggccaggcacaaggactattatttcgagaacctttacattgtgaaggtgccttcagaggacgagaagaaagtggacatagagtatctcttcccggacgaagtgctcaaaaaagaactgaacggtaagaagttcaatcctaataacacaggcggcgacaatgagcacgagtatggcaaggcttacttcgccgagtatattgtcaaggctaacaagaaagacattgatttttcaggcttcaaacctttgctggacaatattcaggatatcataacttcctacgaccccaccaagttagactga

SEQ ID NO: 8169 - RNA, 1764 nt, synthetic construct
  source 1..1764: mol_type = other RNA
atgagctccctgtcccgcctaaaatcgtgtaagtctctttccaacctggcccatctggtcgggtacgaacctaagaagctctcctacatactgtacaagattcccgatgaagccaaatatacagagttcgaaattccaaaggctacgaagggggttaggaaaatctctgcgccgatccccgaattaaagctggcccagtcccgcctggccaaggtgttacagaactgcctcaccgagatcgaaaaagagcaggctaatggagagaattgtattctgagtcatggtttcaagccgcatctctccatttctaccaatggtgcccagcacgtcgaccgcaagtgggtcctcaatttcgacctgaaggatttttttccaagcatcaactttggccgggtacgtggtttcttcatgaagaacaagcactttatgttggaggagaaagtcgcaactattatcgcacagttggcctgtcacaacggcagccttcctcaaggggccccaacctctcccgtgatttcaaatcttgtcgctaatcacctcgatattcgactgagcaggatttctggcaagaataggtgcacttacaccagatatgcagacgacataactttttcaactaacaaaagcgagttccctgagggaatagccgcaaacagggatgatgaaaacagcgcgggcgattggaagctctcaaaacgcatcagaaccgaggtcaaacgctcagggtttgaaataaatcctgacaaaacacggatgcaatatagaaggtctaggcaggatgtaaccggcctcgtggtgaataaaaaggtaaacgtgaagagagaactgtataagcaggtacgggcacaggtgcaaaatttcattaagaatgacacttgctccaaaaaggttaaaattgggggtgtggagagcgaggttgaagttacagaagctgccctgcaaggatttttgagtcacatattctgggtcaaaggagccgagtttgaatacaagcggcttaacaaggcaacaggacccgccgagccaggcttctataaggagtacaggagattccttgattataagaccttcgttgcttctcagcagcctgtggtgctgtgcgaaggggtgacggacaacatctacctgcagtgtgccatcaaacgtagcaaaaccgctcgacccaaacttcaagattcaggcagttccaacgggctggctgtcaagctgttccagtaccctaagattggaagcaagctccgagtgccgtcaagtgtgcagcacctaaacgggggcacaggagacttaaaggagctcatccataaatataaggtaagaaccgccgacctgggaaaacgcggatttatctctcccgtgatcctcctagtggataatgaccaaggtagtcgggacggattatggggcgccattaaaacaacttccggctccaagaaaaacgttgacgggaaaaagaagttttaccacgtgaccaagaatctgtatgtcataccaacaccaaagctggctggcggcaaagatagcatgatcgaagactttttgccacctgcagtggtgagtcaggtcctggggggtaaaacgtttaatcctgacgagaaaactttcgataaaaagaagcactacggcaaaagaatcttggcagagaaagtgagtaaggatcaggcgacaatcaacttcgatgcgttttcgcccatcttggacatcatggaggagattcttgaccatttctcagctctgcccaagaaacagggccgggtggttttctga

SEQ ID NO: 8170 - RNA, 1764 nt, synthetic construct
  source 1..1764: mol_type = other RNA
atgtcctccctgagcaggtttcgctcctgtaagaacgtctctgacctggcttacttggtcgggtaccagcccaaaaagctgagctacatcttgtacaaaatccctgacgaatcaaagtatatggagttcgaaatacccaaggcaaccaagggagtgcgaaagatctcagcccctattccagaattaaaacttgctcagagccgccttgcccacgtcttgcaggattgcctagccgaaatcgagaagggccaagccagtggggagaattgtattatatcgcacgggtttaagagacatctcagcatctctactaacggggcacgccacgtgaataggaaatgggtgttaaactttgatctgaaggactttttcccatctattaactttgggagagtcagaggattcttcatgaagaacaagcatttcctcctcgacgagaaagtggctactattgttgcccagctggcctgccacaagggagcgttgcctcaaggtgcccccacaagtcccgttatttcaaacctgattgccaaccaccttgatatcagactgtctcgagttgctaccaaaaatagatgtacttatacccggtatgcagatgacattaccttctctaccaataaaaaggatttcccaaagggcatagcagccaatagagacgatggatccccctcaggcgactgggaactgagtaagcggatcagaagcgaagtgcggcggtccgggtttgaaataaacgccaagaaaaccagaatgctcttcaggaggtcacggcaggacgtgactggactcgtggtgaacactaaggtcaatgttaaacgcgagctctacaaacaggtgagggcccaggtccatagttttatcaaggacgacgtgtgctttaaaaaggttaagatcggaggcgtaaaacgtgaggtgaaggtgagcgaggctgccctagaggggatgctgagtcacatcttttgggtgaaaggcgcagaatttaactataagcgactgaatcggcccacaggccccaatgaaccaggtttttatcgggagtaccgtcgatttctggactacaaaaccttcgtagcatcgccgcagcctgtggtaatttgcgagggcattacggatagcatctacatcaaatgtgccatcaagcgctctaaagcagccagacccaaattgcaagacgcgaaatctctctctggcctagctattaaactgttccagtatccgaaaatcggttccaaattgcgagtccctagcagtgtccagcaccttaatgggggcactggcgacttaaaggagcttatacacaagtataaggtcaggaccaacagcctggccaacaggggattcgtgtcaccagtgattctgctggttgacaatgatcaaggatcacgcgagggcctgtggggagctgttaaaacggcttcgggcgctaccaaaaaagtagacggaacaaagggctactatcacgttacaaagaacctgtacgtggtgccaacaccgaagctgacaggtggtaaggattccatgatcgaggattttcttccttccagcgtggtcacacagaagctggggggtaaattcttcaatccagatgagaagacgttcgatcggaagaaacattacggcaaacgcatcttagcagaaaaggtaagtcgtgatcatgctagcatagactttgcgtccttctcccctgtactcgacaggattgaggaagtgctcgatcatttttctgcgttccctatggtccaggggagggtgaagttctga

SEQ ID NO: 8171 - RNA, 1707 nt, synthetic construct
  source 1..1707: mol_type = other RNA
atgaagtctatcgagcagctcaaggcagctgcaggactgagtgacatcgcacacatcatcggcttcaaaccaaagagtctggcctatgttctgtacgtgttaccaccggcctccagatacgcccaattttccatacctaagagctccggtgggaccagagatattctggcgcccgtcccacagctgaagttggctcaacgccgactgtgtgaacacctccagaattgccttcacgatatcgaggctcagttaaccgtaaagagcgattgcatcctggcccacggtttcaaacgtgacttgtccatcgtgaccaatgcctcgattcacgtgggccgtagatgggtcctgaatctggatctcaaagacttcttcccatccatcaactttgggcgcgtccgggggtttttcatcaagaacaaacacttctgcttgcagcccgatgcggccaccgtgttggctcagattatctgtcatgataaccagctgcctcagggagctcctacctctcctgtggtcagtaatttgatcgcaggccttctggacatacgcctcaataaaatggctacgcagaatagatgttcttatactcggtatgccgacgacatcaccttttctactaatactagggatttcccacagtcactcgccaagattgatcaggacggtgtgtggacacttggaaatcggctgcataaacggattaagcagtccgggtatgcaatcaacagcaagaaaacacgcatgcagttcaggcgaagccgtcaagaagtcacaggcttgaccgtgaacactgaggtaggtatcaagcgcgagagactgaaaaacactagggcacaggttgataatctggtgcggaacggcgtctgtcatgcgcgaggtaacccaatgcagcccgtaggatctgtttcactccagggccaccttgcccatatagcgtgggtaaaaggccgctatgttgaccacagccgctccgatgggcattggaagagagaacctgcatacgtgcaaacatacagaaaattccttgaccatcagacatttgtcgctagtccgcaacccgtgatcatttgcgagggcaaaacagataacacatactttcggtgcagcattaaccggatagcgggggccccagcaaatctcaccgataaagccaatcccaccggactggccgtcaggctgtttcaatttacaagaacgacgagttgggtgcagaggctaaatgggggcacaggcgacattaaaaacttcattgagtggtacgccgaaaggatgagggttttatcagctactaagttcatttctcctgtggttctcgtggtagataacgactcaggcgtgaaaaagggaggactgaactctttggtgaagagcaagaccaagagcgccgtcgctattgacggcagctccgatttttaccacgtggggcaaaacctgtacctggtgcacacccctaaatcagccactgggggcgacacaatgatagaggacttcttaccggccgccgttaaagggcaaacgctcggaggtaagactctagagctggacgaatcgaagttcgaccccaagaagaactatggaaaggtcccccttgctgaaaccattgtgaaaaggcagcaggataagataaattttgacgcttttctgcccctccttatgcgagtgagtaaggcactagaccattttgataagtcagctttcaaagcatga

SEQ ID NO: 8172 - RNA, 1692 nt, synthetic construct
  source 1..1692: mol_type = other RNA
atgtcttcactggctaagctgaaaagttgtagcagccggagcgatttggccaagttgctggaaatcgaactgaagcattttacatacctcctgtacggactgagcgatagtgagaagtactttgaattctcaatacccaagaagaccgggggactccgagaaattgtcgctccaatcgatgagctgaaagatctgcaaaagaagctcagcaatatcctccaggagtgcctgtctgaaattgaggccaagagctcacggaaaagccccagccacggtttcaagaaagaaagaagcatcattaccaatgctaaaagccacacccgtaagcggtacgtaattaacattgacttagagaacttcttccatacctttaatttcgggcgcgttaggggctttttcttaaccaataaacacttcgaactgaatgaagaggttagtacgtctatagctcaaatcgcatgttataagcggcacttgccacagggcgcaccgtcttcccccgtgatcacgaacctcatttgcaacatccttgacgtgcgccttagtaacctagctaagaagaataaatgcaagtactccaggtatgctgacgatatcactttttcttctcgttcaaaagtgatcagcaaagagttggtgagacaagagaatcacaaatggtccgtatccgggaaactgaaaaaggagattaaacgggccgattttatagtgaatgataaaaagactcgggttcagtacaaaaattctaaacaggacgttaccggccttgtcgtgaacgagaaaatcagtattccttctaagtattggagaacggtaagggctatggtggataatcttctgtattgcggccactttactataactaagagagttctggaagaagaggagttaaaggaggtcaagatcgaaggcaaaattgagcagctcaacggtatgttatcatacattgacagcgtcgacctgcacaacgcgaaaaagggttcagtccaggtggacctgaaccaacgcgagagaacctaccgcgactttctctattttaacaagttctacgccaataacaagcctacaatcatatgtgaagggaagactgatcatgtgtatctaagatgcgcccttaagaagcagtaccaggatcataatatcttgattgagaagtcaggcgacgatttggtgagtaaggtgagtttctacaagtatacagagctcgagactcgtctgctgggggtgacagggggatcttcgcttctgaaagcctttatagcaaactatcctaaggtcattcgaaagttttccgtgccagccagcaacaaccctgtaatcattttgatagataacgacaagggagccaaagagatcttttcccagatcaaatccatcacagattccaggtccaccatcgacggatctgaactcttttacaaactgtacgacaacttctatgtcatcgcaacacccgcagagaagggtaagatgtccatgatagaaaatttcttcccaaaatcactgcttaagacagagctcggcggcaaaaccctggagctagacgaaaaaaaattcgacaagtcgaaacattacggaaaagcctatttcgcggatcgcgtgatcgcaccgaattacaagaagattgactgttccgaattctccaaaattttctatcgcattgaggccgccatcagggacagtaggcgatga

SEQ ID NO: 8173 - RNA, 1689 nt, synthetic construct
  source 1..1689: mol_type = other RNA
atgtccgatctagccactttaaaggaatgtcaaaccaagttcgacctggcaaagctgctgcagattgaacctcagaacctcacatatctcatctatggcctcagcgatgaggaaaagtacaatgagtttaccattccgaagaaaactggaggggtccggcgcattcatgctccaattaaggaactgaaagacctacagaggaggttgtcaaacatcttacaaagctgcctaatcgaaattgagtctgaatctaaacggagccccccatcccacgcatacaaaaaagaatgcagcataatcacgaatgctaagtctcatacgagaatgaagtgggtgcttaacctggatttggaggacttttttccttctctgcattttggcagagtgcggggatatttcattactaacaaacacttcgagctcacagaagaggtgtccaccattatagcccagatcgcctgttatgacaaaaagttgcctcagggggctccctgctctcccgtgattacaaacctgatctgcaatatccttgacgtgcggctgagcaagcttgccagggaaaataagtgcaagtattcccgttacgcggacgacatcacttttagtagtcgcagtggcgatatcagtaagaacatagtgaagaataacgatcacctgtgggagattagcggcaaactgaagaaggagatagtccgagccgggttctcgataaataagaaaaaaacgagggtccaatacaagaactcacgccaggacgtgacaggtttagtggtcaatgagaaagtcagcattccaagcaagtattggcggactgtgcgggctatggtagataacctcctgtactgtggattcttcaccataaacaaaatcgttgaggaggagggagagagaaaggaggtaaagatcatggggaaactgtcacagctggaagggatgctgtcacacatcgaaagcattgactcttacaacaagaagatcaaccctacaaaaacacttaatcaacgcgagaaaacttaccgagatttcttatactacaagaagttttacgccaatgacaaaccagtgattatttgtgaaggtaagaccgaccatgtatatctgagatgcgccctgaagaatttgtctctcgatttcccaaagctcattgagaaagttgacggaaagctgagatcaaatctgtcgttttacaagtactccgacctggagatgaaactcctgggaataaccgggggctccgatttgcttagggcctttattagcaattatcctaaggtcatcaagaagttcagtgcaaaagcatcctccaacccggttataattgttatcgacaacgataaaggcgctaaagaaatcttctctcagatcaagtcaatcacccgatctgcatcacccattgatggcagcagtaacttttaccagctctatgatcgcttttatgtgatagccacccccgcagctaagaaatccatgtccatgatcgaggatttctttcccaaagctttgctcagaaccaaacttaatggtaaaacattcgagcctgacgaaaagaagttcaacaaagacattcactactccaaagcttatttcgccgatcacgttgtggccaggacctacaaaacaatcgactgtagcggctttaaagcgatcttcaatcgtatcgaggcggcaatcgaacatagtaagacttga

SEQ ID NO: 8174 - RNA, 1809 nt, synthetic construct
  source 1..1809: mol_type = other RNA
atgtctaagctcgctgcgcttaagtctgccaatagcgtgagtgatctcgcgaggttactgaaaagtaagcctgatacctttgcatacttcttatacaaagtacctgagaagaacaaatacacaagcttctcaatccccaagaaaaccggaggcgagcgaaagattgacgctccttcagatcagctgagttatattcagaaacaactcgccaaatacctgcaggattgcattgaagaaataggagaactcgagaaacaaaagctcgggaagaagaagtttagctctgcggcacacggcttcactaaggatcgttctataatcacaaatgctcgcccacacagacggaaaagatgggtgctgaatcttgatttgaaggactttttccccagcattaatttcggcagaatacgcgggttcttcatcaagaacaagaacttcaatctggatccagacgtcgcctctgctatagctcacatatgctgttacgagggtaagttgcctcagggatccccttgctcgcccatcatctccaatctgattggtcacttacttgacgtgcggctaatcaaaattgccaagaagtatagctgcacatataccagatatgcagacgacatcactttttccagcgatctgcggaagttccccaaagagattgcacataagaagctcttttcaaaaaagtcctgggaactgtccaacagcatcaaacaggaaatagagaaatcaggttttttcgtcaacgaaaaaaagacgagaatgcagtatcaagagtcccgacaggatgtgacttcactcgtggtcaataaaaaagtgaacgttaagcgggagctgtacaagaccctgcgtgcccagtgtcatacactatttaggactggcgggtgttatgagattgcctaccagaggccagaaaacgaaaagatcagctacctccaacggatcttggataagatattctaccgacctaagaaaatcaaggaaaagaaagaggatcgtaaatacaaaactctggatcagatccagggcatgctgaactttgtttaccaggtcagacacgacagagacaagaagctgggcatcgccgagcgcaaggagattgaatcctctattaagtcactctatcgcaaattcctcttcttcatcaacttctactatatagaccgcccgttgatcatttgcgaaggcaagaccgatcccatctaccttaaatgtgctttaaagagtctgcacctaaagtaccctgggttgatcgagaaaacctccgagggctttgactttaggattaagtttttcacctacagtgacacaaccctggatatcttgaatcttggaggtgggtgcggggatctagccaagctgatcagggagtataatgagtcttgtactccatacaaatgcagtggtcttctgcacccagttatcatcattgtagacaacgacaatgaaccaaccgaaaagctgtttcccgcaattaagggcataacccatagtaagactcccattctgggcgacaaaccattctatacagtgacacggaatctgtatgtcattcccattccccaaaaaaatggaaaaagcacgtgtattgaacactattttgaggagtccgtgtttgataaagacatcaacgggaggaaatttcatcctgacaaaggaccggccgacgggttctcttgctctaaaaacgatttcgccgagaaaattatctgtaagcagcagggatccatcaactttagcatgttctcggacatttttgacaagatcgtggacgttacgatccattataggacccgccgaagctcaccgtga

SEQ ID NO: 8175 - RNA, 1713 nt, synthetic construct
  source 1..1713: mol_type = other RNA
atgaacgaaaagaagattgagcagctaaaagcctgcgttgaccggaaggacctggctcggctgctgggatttaaacccaaagcattatcctacattctgtaccagcgtactccatgccaaaattacaggacttttaaaattcccaagcgaaaggggggggagagagttattgatgccccgaatccagaactgctttttctgcagaagcgggcatctaatctgctccaggattgcttggatgagattgtccaggacgaagggcacaagcgcaccatacatcacggttttcagcgtaagaaatcgattatcaccaacgcaagggtacatagagctcggaagtttgtgttcaatgtggacctgactgatttcttcccctctgtgaactttggacggatcctgggattcttccagaagaaccgacactttacccttgaaagagaagtcgcggttaccttggcccaaatctgctgttacgacggacaactgccacaaggcgcgccgacttcccctgtcgtgagcaatctgatatgtcagcctctggacatccgtctgtctcggttagccgaaaagtttggctgctcctattctagatacgccgatgatatcacatttagtacctccacaaggaagtttccccgagctatcagcagaaagtctctcatctcatcaaaatggtactcagggcgcatactcaaaaaggagattaagtctgccggcttcgctataaatcccaaaaaaacacgcatgcagtacgctcagagtaggcaaactgtaaccggcctcatcgttaatgataagattaatgtgcctgctgattatacaagactgtgtcgggctatggtcgacgcttatgtaaagtccggcacatatttcatccggaaggagaaattatcgaaaagcggaaaggtgaaagtgaccaaagaacccggtaccgacctgcagctgattggtcgctatagcttcatccacaacgtgaagtcaagcaacttttcaaaggaaaaccccaggcctaaggatttgtttagctatgagaaggactacaggagactccttctcttcagcaagtttcacttcagtaaaatcccactcattctgactgaagggaagacggatacgatttacattaaggcagccttaaggcgccttcataaaagttatccgaccttgatcacaaaaaaagggaggtcctttgagtataacttcgacttcttcaaattctctcctacaaatcgccgcatactaggcattgacggaggcacatcccacctagcaggctttctatctacttatagaaaagaggccaagagtttctgtcctatactgaatcagaagcctgtgatctgtatcatcgacaatgacaacggggccaagaaattcttcaaatggaccgactccagcgggaacaagatcaatcgagatggcgaggtgtaccacctgtttgagaatgtgtacctccttctcaccccattgaagaacggtacagaggattccaagattgaagatttcttcacgaaacatacattgaatgagaagatcggtggaaagagttttaacccagagaacgtcggcgtgactgaagcagagtacggaaaagcctggttcgcgagcaaagtcgtttggcctaagaaatcaaccatcaacttcaacaactttaagccactgcttgacctcatagagaatacggccatgaaagtccataaccccaaaaaatga

SEQ ID NO: 8176 - RNA, 1671 nt, synthetic construct
  source 1..1671: mol_type = other RNA
atgacctccaagcttacaagcctacgctcagcaaaaaccgtttacgacctcgcctcacttctcggattttccccctcgtcaatcacgtttatcctctataatctgcctccagctactaagtacaagacctttagtatcgcgaaacgatccggcgggacacggttaatatctgctcccgagccccgcctgaaaagtctgcagcgccgccttgccgacttgttgcaggaatgtcgcgatgagattaatgcactgccggaaaataagaaatcccggagccatggtttcgaaaggcaacggtctatcctcactaacgctaatattcacaaacggaagaggtatgtgttcaatattgacctggagaactttttcccctctttcaatttcggtagagtgaggggctttttcatcaagaacaagaaattccagctcgaaccaaaaatcgccacgttgatcgctcagatagccatccacaataatgaattgccccagggaagcccttgctctccggtcatctccaacctggtggctgacgcgctggaccgtagactcgacagactcgcgaggcaaaacaggtgccggtactcacgctatgctgatgacattacctttagcgccagggtcagagacttccccgcagatattgctgtgcccaccggcgctaacttcgatccatctgctgtcttacagtctatcattgctagtagtgggttcgcaataaatcctaacaagactcgcatgcaatacagcatgtcacgtcagatagtgaccgggcttgtggtgaacgagaaacctaacatccgaaaggaatacagacggactctgagagcccaggtcgatagctacgcgaagactggcagctttacttatgttgattcctccgggacaccaatccctggaagagccaggcaactcgaagggaaaatatcccatgcctgtgccgtgaaaatgcataacgcaggcccattgaacgacagcatgcgagtaggagagatctttaaaatcgcccgtaagttctggctttcccacttgtttgcgagaagacttaagccagttatactatgtgagggcaaaacggacaatgcttatctgcgagccgcactcaagtcgctggccctgcagtatccctctatggtcgatagcagtgcacgtaacgccacctttaaggtcgagttcgttaacctgaatagcctagccgccgaggtgattggactggggggaacagccaatctgtgcaagctgattcataattacgacaaggaggtactcaagttctctaggagtcggcctctgcacccactgatcattgttgtagacaatgattcaggcgcaaagggcgtgtttggtaagattaaagaggcaaccggcaaaactgtggatatcaacacaaaggaacatttctaccgcattaaggacaatatgtacgtagtgaaagtccctgaagggcggcttaacgaggaaagggccattgagcacttattcgacccacctgttctgaacacacccctgcacggtaagattttccaccccggcgataaaaactttgatcctaccaagcactatggtaaagaggcatttgcccagaacgtggtgcggccgcaggctaacacattaaattttcgaggattcgtcccactgctggacaggatcgaagaggtgttgaaagattactga

SEQ ID NO: 8177 - RNA, 1524 nt, synthetic construct
  source 1..1524: mol_type = other RNA
atgctgggcagaaacaacggcgactcagcatccgataatcaggcgaaaaccttttcccaagtctcacacggttttaagcgaaagctctccatccgtacgaacgctagaaaacacaggaatcggagatacgtctttaacattgaccttactgacttctttggatccatcaattttggcagggtaagaggtttcttcatcaaagataagcggttccgccttaacagcaaagtcgcaaccattttcgcgcagatcgcttgtttcaaaaagtctctcccccaagggtcaccatgctcccccgtgatctctaatctcatcggcaatatcctcgacacacacctcgtccggctcgctgctcgaacagggtgtacctacacacgctatgctgatgatcttaccttttctaccaataaacggtgcttccccaggtctatcgccatccaatcagacgatgacaaccatgtctggattcctgggccagaactgttgagattagtgaaccagagtggcttcgaaattaaccctaagaaaacacggatgcagtatcacagcagccgacaagaggtgaccgggctggtggttaataagaaggtcaatattaggcgtgaataccgacataacgttagggcaatggcgcaccgactgtttaccaaagggtctttcttgctcccaatatacgagaaggatgagaacggggattatcttctggagatgaagcccggtagcctgaaccagttacacgggagactgggttttattgacggcatcgacaggtacaacattgagattttgtcagcatctaaagaatcgcagattaagagcaaggagactatctatcggcggttcctgttttacaaagaattttacgccgcttcaaaacccgtgctgatttgcgagggatggacagattacgtgtacattgaaaacgcattgctgaagctggcccctaattatccaagtcttgtgagcttagatgacaatggaaaaggcagttttctgatcaagcgcttcaaatatagccggagtcatactactaagattctgggcatcaaaggaggagtaggagatttcatcaatttcatcaacagctacaagagagagttcgagagattctccgtgccgggcatgagggagccggtcatactattgattgacaatgatgacggcggtaaaaaggtgtttaactgtatacgtagcattctaggaaccgacctagaagagatgcgcaaggccccttatatacacgttcatcgcaacctgtacctgatatctacacctctgcagggcaatcagcagaagtcccagatcgaagatctcttcgacttctctacgctggaggttaaaatcgatggaaagtcgtttgaccgcagtgacgaaaaggtaactgagacgacttattccaaggccgtgtttgcccaaaaggttgtgaaagagatggccagcagtatcaattttcaggggttcatgccactccttgacaggatagccaaggtgatagaatcccattatgcccagcgcaaagaatga

SEQ ID NO: 8178 - RNA, 915 nt, synthetic construct
  source 1..915: mol_type = other RNA
atgagcgctctcaaaaaactccgggatgccgaatctatcgcagacgttgcttctatcctggggttcagaactaaggcactttcctacatcctgtatgtgcagcccgacagtctgaaatataaagagttcgacatccccaagaagtcaggaggggtaaggagaatcgccgcaccccagagtcgtctaaaattgctgcagaagaggcttgcagatctcctgcaggattgtcttgatgagattaatggagacagcgcttcagacaaccaagcgaaaacattttcccaggtgtcccacggcttcaaacgaaagctgtctatcaggacgaacgcgcgcaaacaccgcaacagacggtatgttttcaacatcgacttgactgattttttcgggagcatcaattttgggagagtcaggggtttttttatcaaagacaagcgctttcgtctgaatagtaaagttgccaccatattcgcacaaattgcctgcttcaagaagagcctcccacagggtagcccatgctctccggtgatttccaatctgattggcaatattctggacacacatctcgtgcgcttagctgcccggaccggctgtacatatacacgttacgccgatgatttgacgttctcaaccaataagcggtgctttccaagaagtattgctatacaatctgacgacgataaccacgtgtggatccctggacccgagctactgcgattagtgaaccagtcaggatttgaaataaaccctaaaaagacccggatgcagtaccattcgtccagacaggaggtcactggcttggtcgtcaacaagaaggtaaatatacggagggaataccgccataatgtgagggccatggcccaccgactgttcaccaagggcagcttccttctccctatttacgagaagatgaagtga

SEQ ID NO: 8179 - RNA, 1758 nt, synthetic construct
  source 1..1758: mol_type = other RNA
atgagcgcgctgaaaaagctcaaggacgctaccactatcgcggagatcgccgatatactgggatttaaaactaaagctctcgcctacatcttataccggcaacctgatagcctgaagtataaggagtttgacatcccgaagaagtctggcggcgttcgacatatagccgctccacaaggagggctgaaactgctccagaggcaactggctgatgtattgcaggaatgtctcgacgagatcaataatgccacggtcggggatcaagcgaggccattcgtggacattagccacggcttcaagcgcaaactttccatccgtaccaacgccaagaaacaccggaacagacgatacgtctttaatgtggatctcatcgactttttcggcagcattaacttcgggcgggtcagggggttctttatgaaggacgcacggttctgcctgtccccaaagatcgccacaatcctggcacagatagcatgctttaagcagagtcaccctcagggttctccctgctcaccggtgatttcaaatcttattgggaacgtgttggacatgcatctcgttaaactcgccgctcgccgcggctgtatttatacaagatacgcagacgatcttaccttctcgactaataagagatgctttcccaaatctattgcagtacagagcgatgacgataatcatgtgtggatacctggttctgaacttttccggttggtgaaacactccggctttgaaatcaatcccaagaagacaagaatgcagtatcattgttcacgtcaggaggtaactggacttgtggtgaacaagaaagtgaatatcaggagagagtatcgccacaatgttagggctatggcctaccgcttgttcaccaagggaagcttcttgctgcccgtctacgaaaagaacgccaatggtgactactctctggaaatgaaacctggcaacctgaaccaactgcacggtagactcggatttatcgacgggatagatcgctataacattgagcgggtcagtactgctaaggagagccagattaagagcaaagagacaatttatcggcgatttctgttctataaagaattctacgccgcttctaagcccgtgctgatctgtgagggatggactgactacgtctatattgagaacgccttgcgaagccttgcctccaactacccatcactaatctccctcaatgacaacgaaaaggtgaacttcctgattaaatgcttcaagtactccaaatcacatacaaccgagattttaggcatgaatggtggcgttggcgacctgaaaagatttattcccctgtataagtccgagtttgaaaggttcagtgccccagggatggaacagccgatcatcttgctggtcgataatgaccgggcagggaatgaggtgctgggcgtcgttaacaacatggtgaaagggaacaaaaggacaaagaccaaggtcgataacaatgagccctacgtacacatccatcacaacttatacctaatcctgacccctttacagccaggacagagtgaatcccagattgaggatctgtttgatgcttcgacgctcgcgataaaaatcgacggcaaaagtttcaataggagcgacgagtctgtgacggaaaccacatattccaaggccgtgttcgcacgtaaagtggtggaggaacgcgcatcaagtatcaactttgagggatttgcccctctacttgatagaatagctcaggttattgaatctcactatgcaaagggaaaaaagtga

SEQ ID NO: 8180 - RNA, 1740 nt, synthetic construct
  source 1..1740: mol_type = other RNA
atgttcttcctgcatagcctgaaatccgcgactagcctcaaagatgtcgccgaccttctgggttttaaagccagcgcgctagcgtatattctgtacaagaaggatggggcttcaaaatacaagagcttcgaaattcccaaaaagcacggtggaatacgcaagattttggcaccttccgatgagctcaaactcatgcagcgtcgccttagcgatcttctgctggattacaacagtgagatcaaagcacatgacggtctgaagaatcaaatctctcatggcttcgaaccggacaagtccattgtgaccaacgccgagtgccatcgcaatagaaggtacgtcttcaatgccgatataaaggactttttcggcaccattaactttggccgagtacggggattttttctgaaggacaagaatttcgaactccacgagacagttgccaccattctcgctcaaatcgtctgtcacgacaactccctgccacagggctcgccgtgtagtccagtgatttcaaatctcatcgggcacgtcctggacgtccatttcgtgaagctggcagcgagaagtggttgctactataccagatatgcagatgatcttacttttagcacaaacctgaagactttccccaaggccatcgctaccaatgtggatggggagaatcactcctggatacccggcaaagagttagctagactgattaagcactgtggattcgaattaaaccctcagaagacgcgaatgcagtaccgcgattctcgccaagaggtgacaggactggtggtaaataggaaggtgaacatccgaaatgaatacagacatcatgtgagggccatggtgcaccgtctcttttcaaccgggaacttcgactttgaacagacagtggtcgacgaaaaagggaatagtacaaaaacgaaaacccccggtacgctgagtcagttgcacggcatgctgggctttatacatggcattgatgtctacaacaaagatagactacacaccccccattacgaccaccagcatagtaagctgcctagatcaaaagagacgatctaccgtaggttcttactttttaaggagttctatgccgctagcgctccagtgatcatctgcgaaggcaagacagacaatgtctatcttgtacacgctattcggcggcttgcttccgactttcctaaattagcagcaatcgagaaagacggtgccatcaaactgatgacacggatctttaggtattccgacacttccactggaaaaatcctgggcattaccggcggaggcccatgcttgaaaaacttcataaacttgtatcgggccgaaatcaagcagttcaccgcacccggacggtttcacccggtgatactcctggtggacaatgattcaggagccaatgagatttatagcaccttgaagcaaatagtgaagccccccccatctcgcaacgaccccttcgttcacgttttcggaaacttgtatgtcgtgcctactccattgctacctggggggggacagtctatgattgaagacttttttgattctgggatcaagtcgtctgttgtttctgggaagacatttcaccctgattccgacgccgatacagagactcattacggcaaggttattttcgcacacaaagtgatcaggactaacgccgacaccatcgacttcagcgggtttaaggagatcctcgctaacctcacagccgtaattgatgagcacgctaaaaggttcccatcatga

SEQ ID NO: 8181 - RNA, 1761 nt, synthetic construct
  source 1..1761: mol_type = other RNA
atgactcacctggatgggctgcgcagtgctaagtcttttcacgacatcgcctccttactcgggttcaaaccccgcgctctggcctatatcatctacaaaattccagtcgaccaacggtatgagagcttcgacataccaaaaaagcgcggtggatacagaaagatctcagcccccaatagcaaactaaaacttgtccaacagcgacttgctaacatcttgcagaattgtgttgaagaactcaacaaatcaaagcggattaacgatcatataagccatggcctgaaaaggaagcgaagtatcctgaccaatgctaagaaacaccgaaatagacgctatgtctttaacatagacctcaacgattttttcgggtccattaactttggcagggttagggggttcttcataaaagacaccaatttcaaactcgagcctaacattgccactattctggcgcagatctgctgccacgatcatagcttaccccaaggagcgcccacgagtccagtgattagtaacctaattggacatatcttggacattcacctcgtgaagctcgcaagtaccaatgggtgttcatacactcgctatgctgacgacatcacattttctaccaacaagagaaacttccccgaaaacatagccaaacaggagaatatcaatatacatgattgggcacccggccatgacctcgaccaacttatcaaaatctcagggttcacagtaaatcctacaaagacacgcatgcagtactgcgacagccggcaggaggttaccgggctgatcgtcaataaaaagattaacgtgaggagcgattacagacataccgtcagagcgatggtgcaccacctgttcactcacgggttttactatctgccccagaataagccgccgaaggagacggaaattagcgaagagaataagggcaccatggatcagctccatggtatgctgggattcatcgactcagtagatctgtacaacaaaaagaacgctagttccgcagtggtgcctcggaccgaaaaacagaagctgacatctaaagagtccatctataggaggtttttgcttttcaagttgttctataaggctaaggcaccagtgatcatctgtgaaggcaagaccgataatatttacattactcatgccatccgttctcttgccaagaatcaccctaatctggcatctattaacaatgatggctctatacagctgaaagtgaggctatttaagtattccgagacatcgacaggccgtattctcggaattaacggaggaactggcgagttaactaagttcatccctttgtaccacaatgagactaagaaattcaaggccctgggctgcgatcagcctattattatcatcgttgacaacgattcgggctctaatggcaatggaagaacgtttaacgctgtgcgggccataaagaaagatgcagacccaaaacacgccccattcacacacatcacccaaaacctgtacctgatagcgactcctctttcattggatgggagcgactccatgatagaggatttttttaccccagagacgctgtctatcgaggtgggaggcaagacatttaaccggggtaacggtatcaacctgaataaagagtacggtaagaacatctttgcccagcatgtggtcaagacaatggccgactccattgactttagaggtttcaatcccatcttaagcacaatcgaaaccgtaattacgacccacgcaaaaaccattacttccgaatccgaagaaacctga

SEQ ID NO: 8182 - RNA, 1719 nt, synthetic construct
  source 1..1719: mol_type = other RNA
atgtctctgctagcagaattaaaggaagctacaactatccacgatatcgcatcactgttaggcttcaagaccgccgctttgtcctacatactttatgtaaaatcggatgccagcaaatacaagacatttgacattccaaaacgtagtgggggcgtcagacagatttctgcaccctactcagacttgaagttactgcagcgaagactggccgacctgctccagaactgcgccgatgaaatcaccaagaatcaagggaggggtgacgaggggaaaaaccccgacaggatttcccacggatttcgccgacggcgcagtattatcactaacgccaagcagcattgtaagcgccggcatgtctttaacattgatatcgagaacttcttcgggagcatcaattttgggcgggtaagggggtttttcattaaggacaacaactttgaccttaatcccaaaatcgctactatcttggctcagatcgcctgcacaaacggcagcatacctcaagggtccccctgttcaccggtgatctctaatttaatcggacatattctcgatacccatctcgtgaggctggcaaaaagggccggatgcacctatagcagatacgctgacgacctgacattctccaccagcctccgggacttcccagacacgattgcaacgaggtgtccagtgaatgagcacgattggcagccgagtcacgagctggaaaggatcataacacagtgcggattcagcctcaacaatagtaagacacgtatgcaataccaggaggctagacaagaggtgactgggctcgtagtgaataaaaaagtgaatgtgaggtcagcataccggcgcaccgttcgggcaatggtccaccagctgttcaccactggtaagtttcacatccccggaacccctgagactcaaggttctctgaatcagttgcacggcatgctaggcttcgtcgatggcatagatctgtacaacaggagcctgcgagcgaaaaactccggctcgctcggagacaaggaaaaaatgtacagacagttccttctgttcaaagagttttatagtgcggacgtcccagtgttgctgtgtgaaggtaaaaccgataatgtctatattacgcatgcgataagatctctggccgataagtaccctaaacttgccacaaagaagaccgacggctctgtaaccatcgatttccgcagatttcgcttcaccggcacttcaacgggacgaatactccggctacagggcgggacccctgacttgaaggcgttcgctgaactgtatcgcgaggagtccgttagatttaaggctccaggaatgaagcatcccgtgattcttctcattgataacgatgatggagcccgtcgaatctatggtttcattcagggcatcaccggtaagcggcctgacggatccgagagcttcgttcacgtctttaagaatttttatgtgtgcgcaacacctctgctggcgggcgcaaaggaatccaaaatagaggacttctttgatccaaagacactggatactaagattggggccaaaacatttaactctaagaatgagatcgacacagccatgcactacggcaaggccgtttttgcctacaaagtggtggaagctcatgcagacaaaattgactttagcgccttcgctgctatcttcgataacctcgttaaaatccttgactatcacgccgccaagtttgtgactgaaactgcttga

SEQ ID NO: 8183 - RNA, 1818 nt, synthetic construct
  source 1..1818: mol_type = other RNA
atgagtcagctgacagctctgaagtctgcttcgacgcttcacgatgttgccgctatattggggtttaagcccagtgcactctcttatctgctgtatgtgtgttccgaagccaccaaatacaggacattcgacattcctaagagatccggcggcacaagacagatcgcagcaccagtcggtcctctcaaactccttcagcgtaggctggccgacgtactccagaattgcgtggacgaaatcaaccgaactaataaacgctcagatgacgacaaacaacccgattgcatagcccatgggtttaagagaaagcggtccatcatcacaaatgcacgtcaacaccgtaacaagaggttcgtctttaacctcgacctggaggatttcttcggcaccattaattttggccgagtgcggggtttctttttgaaagacaaaaactttgccctgcaacccaaagtggcgacaattctcgcccagatagcgtgctatcagagagcgttgcctcagggcagcccctgttctcctgtgatcagcaacctaatcggccatgtcttggatattcatttggtgcgcctggcaacactgaccggttgcacatataccagatacgccgacgatctgaccttctcaactaataaacaggccttccctagtatggtggccaggagcgctgtcggcaacgagcatgtctgggagccaggaaaggagctaggcaggctggtcactaagtcgggattcgctattaatacaaataagactcggatgcagtatcgggatagcaggcaggaagtaacaggcctggtggttaactccaaggtaaatgtgaggcaagagtacagacacacggtgcgagctatggtccatcgcctgctttcaaccggtagcttcgatttcgagtataccactacggatagtgccggagttaagtccactattaaaaccctgggtcgccttacgcagttacacgggatgctcgcattcatcgatggagttgacctttctaacaagtccgtgcttcctaaagcttctgggatcagcctcactagcaaagaactgatgtaccggcggttcctcttatataaggacttctatgccgcgaccacccccattgtcatgtgtgagggaaagactgacaatgtatacatcgcacacgcaatccgatccctggctactctataccccaaactggccaccgtggggagttccggtaaaatcacactgaccatcagacgcttcaaatatccaggcaaaaaaactagaaagcatcagtctcgcaatgccgggaactcaacagggaggattttgggagtgaacggagggtctaacgatgttggcaacttcatgcggacctacgctgctgagattggacgatttagggcccccgggaagcttcacccgatcatagtgctgatcgacaatgactccggtgccgccccggtgtacaatacgattcagagattaaccgggacaaagccaaccggcactgaacctttcatccacattataggcaatctgtacgtagtgcccaccccgctgttaaccacaaaggccagcatgattgaagacttttttgactcagccacacgggcgattcaatacaagggaaagccctttgatccatcaaacaagtttgatagcaagacccactacggaaaagctgatttcgcatacaaagtggttcagccaaacgcagacaagatcgattttaatggctttaaggcgatcctcgatcgctttagtgacgtcatcgaccagcacgccaagactcataacgctgtgccattgtctatacctgctgttgcagccgccgcagctccatga

SEQ ID NO: 8184 - RNA, 1809 nt, synthetic construct
  source 1..1809: mol_type = other RNA
atgagtcagttaaatgccctaaaaaccgctaccactttagccgacatcgcaaaattgctcaacagtgaagcctctggcttagcatacgtgctgtataaggtcccagaagctctaaaatacaaagagttcgacgtgcctaagagatatggcggaactcgcaagatctcagcgccttctgacgcactgcggctgctgcagcaacggctgtctaaccttctccagaattgcctgaaggagatcgaggagtcgggaggccggagacatgatgtttcccatggtttcaagcggggcaggagcataatgtcaaacggggagtcccataggaggaagcgctacgtattcaatgtagacctcaaagacttttttcctagcatcaatttcggaagagtgagaggattctttattaaggacaagaacttcttgctgtcgcccaaggccgcaacatttctggcccagatagcttgttacaaaaacgccctccctcaaggatcaccgtgtagccctgtcatctctaatctggtgagccacgtgttagatacccacctagtacgtttggccgctaaggaagggtgtcggtacactaggtacgcggatgacttaacgttctccaccaataaaacagaatttcccaagagcattgctaaaagaactgatggcgcaccacacgattggattccaggagccgctctggtgaagctcgtggaaaaatctggtttcgcgatcaatccttccaagacaaggatgcagtatcacgactcacggcaggaagttacggggctggtcgtgaaccgtaaggtgaacgtacgctccgactacagacgcaccgtgagacagatgacgcataggttgatgaccaaagggaactttgagagtgtccacaaaatggtgaactcagacggcacaaagagcgtcaccaaaatccctggaactgtgccaggtctgcacgggatgctggcctttatagatcagatcgacttgtataacctgaaacaggttgaaaagggcctggctgatagtgataaggtgaaggagagaattaagcttgcaacaaaagagtccgtgtatcgaaggtttcttctgttctcacagttctacgccgcccccaagccaatcgttctgtgcgagggttcaaccgataatgtctacctggttcatgcaattcgatctttggtggcggacctgcctacactagctaccaaacttccctctggggagattgagatcaacgtccggttctaccgatattttaagcgtcgcaagaagaaactcgcgaacgagcacagtaaggcaattagcagtaccggtcgcatcctggatttgaaaggcggaagcggcgaactgctcaaattcgccaaggtgtacaagacccatctggctaaaatcacagctcccggggcataccaacccgttatacttctcattgacaatgataaaggggccaacgatatgttcggctatattaaaggcgtgacacagatcaaggagcccaagaatgaaccatttgtacaccttcttcgcaacctctatgtcgttcctactccactcacgcccgacaagcccaatgccaccatgatagaggactttttctccgatgattggaagaaaactctcgtggaaggaaagccgtttaatccagagaaggaccatgaagatcacacatgctatggcaaggttatttttgctcacagggtcgtgcgaccaaacgccgaaaagatcgacttctcccagttcaaacaactcctgcttaatatctccagcgtcattgagagccaccggaaaactcatcccccgccggggaaagcctcttga

SEQ ID NO: 8185 - RNA, 1035 nt, synthetic construct
  source 1..1035: mol_type = other RNA
atgtcccagctgaaggccatcaagactgcaaccagcctggccgaaattgccaagctcctggagtttgagacatcttctttagcctttatactgtacaaactcccagatgcactcaaatataaggagtttgatgtgccgaagcggtacggcggaactcgcacgatctccgccccagtagacaggctgcggctagtccagcagcggctgagcaacttgttacagaactgcctttctgagatcgagaataatggagggagaaaacatgatgtgtcacacggattcaaacgttggagatccatcatgagcaacggtgagaaccaccgcaaacagagatacgtgttcaacgttgatctgcaagacttcttccacagcatcaactttggccgtgtgagggggttcttcatcaaggataagaacttcttactcaatgtaaaggttgcaacatttctcgctcaaattgcttgctataaaaatgttctgcctcaaggttcaccatgtagtcccgttatctccaatctcgtgtctcatatactggacacacacgtggttcgcctggcatctaaggagggatgtagatacacaaggtacgccgacgatctgaccttttcaaccaacaagaccaaatttcctgctagtattgcaattcgagctggctcagccccccacaactggattcctggcactactctggtcaagcttgtggaaaaatcgggcttcgccatcaatcagagtaagacaaggatgcagtactgcgacagccgccaagaggtcaccggccttgtggtaaatcgaaaagtgaatgtcaggaatgactatcggagaaccgtccgggccatgactcatcgcttgatgacgaagggggattttgaattcgtgcacaaaacagtgagcggggacgggaccgaatccgtcagtaagattcccggagcggctacccgactacatggcatgcttgcgttcatagaccagttggacttgtataacatgaaccaggtcaagaaaggtctgattgacactgataaagtgacggaatga

SEQ ID NO: 8186 - RNA, 1770 nt, synthetic construct
  source 1..1770: mol_type = other RNA
atgccaaggctggcaattctgaaaggtgctgctaatctgtccgacgtggcacacctgcttgggtttaaaccaagctcgttgtcatatctactgtacaaactgccagcccctttgaagtacaccgagtttgacatccccaaacggcatggaggcttgcggaagatttcagcacccattgactcactcaagaatttgcagcagcacctgtctcagttactgcaggactgtctcgatgagcttgaggaggcgggtctgcgcaaaaacaactccgcccatggcttcacaagacacaggaccatcatgacaaatgcaatggagcataggaaccgcagattcgtctttaacgccgatatcaaggacttcttcccttctattaattttggacgcgtgcgtggatttctgatcaaagataaacacttcgccctgaatccagctgtcgccactgtgattgcccagattgcatgccacaataacgcactgccacaagggagcccaagttccccagtgatatctaacctcattgcatacgtgctggatacgcatctggtaagtctcgcgcaacatacgggatgtcactatacaagatatgcagacgatctcaccttcagtacaaatatgccaaattttcccaacgccatcgctgtgtgcgtgggaggcaatgcccataactgggcggctggccagagcctgacagcaatcgtgagcaagagcggtttctccttaaactccgctaaaacccggatgcagtacagagattctagacaggaggtgaccggactcgtcgtaaacgaaaagatcaacgtgcggagtgagtatcgccacaaactgcgcgctttgacttttaggcttattaacaagggggaattttcaattatccataaaagcgtggacatactagggaatattaccactaatgtcatcccagccacccccgctcaattaaaaggaatgttggcctttgtggacgcagtcgacatagcgcaacgggacgacgccatccggcagtttcatgacaagcaccaggatgggcagatcaaatacgagcgttacaagctggtccgaaaagaaaacacctacaggcgtttcctaatgttcaatgagttctttgccactcccaaacctgtcgtactctgcgaaggcccgaccgatcgagtgtatctgagatgtgccgttaagaggctagctgctgatttccccaccttagctacgattaatgccgcgggcgaagtcagtctgaacttcaggcggtacaagtacgccgattccaatactaaccgaatactcaagattcacggtggcgccagccagcttatgggctttatctctgagtataggtccgcggcagaaaagtttctcgcccccgggccgtttgagccggtaatcgttcttgttgacaatgacgatggtcctgaagagttgttcaagtatcttgccaaagtgaacaaagtcaaggccccgcgcactgaacctttcgttcacgtttgcgccaacatatatgtggttcccacaccccttgggcctaatggcgaacctacctgtatcgaggactttttccctagccacctcttcaaggaagaagtggctggaaagacattcaaccctaagaaaaagcacggcgacaatgagaagttctactctaaggagatattcgctgagaaggtgattgccaagaaggctgggactatcgattttgatgcctttaagcccctgctgtcaaatatcgaaagagcaatcaacacacatcgaaaaaaccaccctaagcccaaatga

SEQ ID NO: 8187 - RNA, 1773 nt, synthetic construct
  source 1..1773: mol_type = other RNA
atgatactgctggctaaactcaggagtgcgaaaacaattcatcacctggccgcaatccttggttttaaggccagcgcactcgcctacattctgtacggcaaaggaggtgcaagtaactacaagaagttcgatatcccaaagagatatggaggagctcgccatattagtgcccctatgcccgaactgaaactgctgcagagccgtctctcagacgtgttacagaattgtctcgcagaaatcaatgaggccgccggcagaagcgacaaaattttcgatcgagtaaattctagggctgaccggatctcccatggctttaggcggcatagaagcatcattaccaatgctcgcgagcacagaaatcgcaagttcgttctgaatgtcgatctgaaagacttcttcggttctattaatttcggcagggtgagagggtacttcatcaaggataagaagtttttgctatccccagaaatcgccacaatgatagcgcagattgcctgctatgaaaacacccttccccagggcagtccctgtagccctatactcagcaatctaatcgggcatgttctagatgtgcacctggtggggctcgctgctaaaaaaggctgcgtgtactcacggtatgcagatgaccttactttttcaacatccaaaccggtgttcccaagttccattgccagctcagacccgactaacgagcacctctggcttcctggcaaggaactggtgaggttagtcgaaaaatctggcttcgaaattaaccctagcaagactcgtatgcaataccggaactctcgacaagaggtcaccggcctgatcgtgaacaagaaagttaatgtgcgttccgaatacagaaacacggttcgcgctatggtacaccacttatttaccaccggcacgtttgagattctgcagcgggtgtctgacggaaaagggggggttactatatctcaggtgcccggcaaggttaaccagctgcacggaatgctggggtttattgatggagtcgacttgtacaacaaaaagctgatcggagtggctaagggagcgtccaatttgccatcaaaggagacaatgtataggcgattcctgttgtacaaagaattttatgccaccaccagccccgtcattgtatgcgagggtaaaaccgataacatctacatactccatgccattcgcagccttgctgccacttatcctaaacttgcaacaacaaacgctgatgggacgatcaagctcaacgtgcgaattttcaagtactcgggcacttcaactggtaggatcctgaagatgcatggagggaccggagacttggggaatttcatgcttgattatcgcacagagtgcgctcggtttaaggcaccaggtcaacagtccccggtcatctttttggtggataacgacagtggtgcgtcttccatctataatattgtcaagcagatcaccaaaaagaaggtaaccgggacagagcccttcgttcatgtcacagggaacctgtatctctgtgctacgccattgatcgcaggcgccacagaatcaatgattgaggacttctttgactcggcaactaaggccataaccatcggcggaaaaacctttgaccccgatttagacgatgagactgccaaacactacggcaaggtggtgttcgcacacaaggtcatcagagccaacgcaaataagatagactttaaggagttcaaccctatactgtccaatatcgtggcggccatcgacgcccactctgagaaagtcgtatccgccggcgtgccttga

SEQ ID NO: 8188 - RNA, 1731 nt, synthetic construct
  source 1..1731: mol_type = other RNA
atgtgggccactcatcccccaccgtttatgacccaattaaagaagttaaaggcagcgaaagatatctacgacataagtacccttttgaattacaaagccggtaaactgtcttacattctgtatgtgatcgacgaaagcgacaagtacagttctttcgaaataccaaaaaagggaggcggaactcggacaataaaatctcctatccccaaactgaaacggctacagaaaaacctgagcaatctactgcagaattgccttgatgagttaaggtcagagaattcttacgttgatcctatgtcacacggcttcgagaagaaacgtaacattatcacaaatgcagaagtccacagggccaagcgatacatcttcaacatcgacatcaaggatttctttggctcgattaatttcgggcgcgtcagaggattcttcattaaggacaatagattcgagctggatcccaagatagcaaccattatcgcccagatttgctgtcacgagaattccctccctcagggatccccgtgttctcccgtcatctccaacattattgggcatatcctggacgttaggctacttagtctcgctatcaaaaatgggtgttcctatactagatatgccgatgacatcacattctccacaaataagaagaaattcccaagctcaatcgcggctaaagacgatgacggacatggatggtctgtaggtaaggagttaagcgatatccttaagactaacaaattctccgagaacaaaaacaagacccgcatgcagtataaaacatcccggcaatccgtcaccggcctggtggtgaacaagaagattaacgtgagatctgagtatcgaaaacaagttagggccatggtgcactcactgtttagtaaggggacctttttcataccaaaagctggggtggccccaatggatgaatttcccgaagggaccctgaaccaactgcacggtatgcttggctttattgacagcatcgatcagaataatgtcttgagacaggggctggaggcggcaagcatcacgcagaaagaaaagacctaccgcaagttcctgctctacaaagatttttacctttctaccaggccaattattctgtgcgaaggcaagactgacaacatttatttgaagtgcgctattaagagcttggccggtcagcatcagttgctcggagaacgtgtaggcgtggattcatttaagatgaaggttcggttttacaagtatgcagagacatccacagggcgaatcctcggcctgagcggtggcactggagacttccctaagtttatcaactcttacctctccggaatctcgaaatttacggctttggagctgaatcatcccgtgattatgatcattgataacgattccggagctaagggcatttacagtaaactccgggagatcctgaatcgccagatcagccccgctgaagagtatatttatgctggcgagaatctctacatagtgcctacccctatagccaagcacggccaacactcaatgatcgaggactgtttcgacaaagacacgaaaaagattctggtggacgggaagaaatttaaccccgacgacaaagccagtatcgatatgttttatggcaagagcgtctttgccactcaggtgattgaaagattcagcgagaagataaactttaacgggttttcagtattcctcagccgcatcgaaagtgcaataaatcatttccacaacatgaagggttga

SEQ ID NO: 8189 - RNA, 1677 nt, synthetic construct
  source 1..1677: mol_type = other RNA
atggcaaccattctaagctttcaaccaaaaacactgtcttatctcctgtatgtcgcctctgatactcagaaatataggagcttcgagctgccaaagaagacgggaggaactagaaccatttctgctcctaccgataaacttaaacgccttcagtcaaatctagcagatttgttacagagatgcttggacgacctgaagatcagtgcggaatactcggattcagccagccacggattccaacgcggcaagagcatcatcagtaatgctgcacaacatcgggctaagcggtacgtgttcaacattgacatcgccaacttttttggagcaatcaacttcgggaggatccgaggcttcctgattaaagacacccggtttgccctgcatccaacaatagccaccattattgcccagatcgcttgccgagaaaacagcctccctcaaggctctccttgtagtcctattatcgccaacttggtcggaaacatcctcgacaggcgattaattgcactggccgcaaagtatggctgcacctatacacgttatgcggatgatttgacgttcagcaccaacaagaaagtttttccaccgcggatcgcctcacgcacgactgatcacacatgggctgccggggaggagctgttagccgttctgcaagcatccagattctcccctaacccccaaaagactcgtatgcagtataaaacatccaggcaggaggtaacaggactgatagccaataagaaggtcaatgtgaggagtgactataggaagagggtgcgcgcaatggttcacagactattcagcacaggcagcttcaatctccctgaaaacccaactcctggcgccggtagaacccgggatgcagagccaggtacgttgaatcagcttcacggtatgctttcctttatcgactctgtggaccagtacaatatccagcgatccaagctcaagctcgatcagctcagtcagaaagaaaaaacataccggaagttcctcctttacaaggacttctatctggccgagcaggccattatcctttgtgaggggaaaaccgacaacatatacttgagaaacgctattaaagggctccccaacgattttcccctgctggggtctaatgatagtccggaccagttcaaaattaatgtccgtttctaccggtatgccgaaagctctactggcaggattctggggttatccgggggcactggagactttcctaactttatcaacgcttacctgacagctttggcccagtttcccgctctgaagatcaggcatcccgtgataattctaatagacaatgactctggtgcgcgccccctgtacagttcactggctcagcgcctgcaccggaagattgacccccgcgaatcctttatacacgtggaatccaatctgtacgtggtagcaaccccgatcatagagcccgcgtccgaaagcatgatcgaggacttttttgatgagactaccaaaaagcttgtggttaagaatcgacactttgatcccagagatgacgcagatcagcggtacttctacggcaaaaataccttcgcgaccgaggtggtcgaacgcttctctgatagcatcgacttttcaggcttctcagagctcctgtgtagaattgagatggctatcagacatttccactcggcccattccccagctaactcatga

SEQ ID NO: 8190 - RNA, 1734 nt, synthetic construct
  source 1..1734: mol_type = other RNA
atgactcagctgcagaagctgaaagaggcaaaaaacttacatgatgtggctacgttgctaaatttcaagcctaacaagctttcttaccttttatacatagccgaagacgaggagaaatataagacctttgaaatcgccaaacgtagtggaggcaccagatctatcgccgcaccagatcctaggctgaaacaattacagagaaacctcagcgtgcttctgctgaattgtttagacgagctccgggagaagaagttgtataaggatgacatggctcatggatttctgagaaagaaaggtattgtcaccaacgccgtcacccacagagctaaacggttcgtgttcaatattgacatctcagacttctttggttcaattaatttcggacgactgcgcggcttcctcattaaagacgaccgctttgagctcaaccctaatgttgcaacaatcctggcgcaaatagcttgccgaaaccatactctgccacaggggtcgccatgttcacccgttatcagtaatcttatcggacatatcctggacgtgaggctcgccggacttgctgcaaaaaatggctgtcggtattcccgctacgcagatgacataacctttagtactaacaagaaggaattcccccaagctattgcaatgcgcgaaccagacagccatgcttgggttgtcggcgccgaactcgaggtggtcctttccgcgaataattactctctgaacaccaagaaaactaggatgcagtactgcgactcccggcagacagtcaccggattggtggtaaataggaaagtcaacgtacgatccgagtataggcggcgggtgcgtgccatggttcaccgtttgtttacgaccggccagtttgcagtgccctcaactaaagtagctgccacagctgccggagcggtatctagcgaggagcctggcagccttccgcaactgcacggtatgctagggttcatagatggcgttgaccagtacaacattcgcaagcatggtctgagactcgaggagctgtccgaaaaggagaagacctaccgcaaatttctgctatataaggatttcttcctggccgagaggcccgtcgttctgtgcgaaggaaagactgacattatctacctgaagaatgctgtgcgccagctggcggctaaatatcccaagctcggggaacaaacaggcgagaacaaatttcagcacaatgtgaggttctacaagtttgcagatagtagcacaggaagaatactcgggttaagcggggggggcggtgatttccagaaatttgcccatgcctatttgtctgaagtggggcagtttcccacacaccctattgctggactcaagcacccagtgattatcatgatggataatgattccggcgccaacgcagtctgcagctacgccttgaaaaggacgaagatctctgtggatcgaggcggcgatttttttcgactcggggaaaacctatatctggtgttgacaccgtttcttcacggcgagaaaccttccactatcgaagacttcttcgatgacgcagtgaagctccggaccgtggagggtaaagccttcgatccaggagacgagcacgacacagggacccactacggcaaggccatcttcgcgaaggaagttgtcgagaagtatgcagatgaaatcgatttcaacgccttcagaggtatcctgagtagaattgaaggggtgatgtcagactattacgccagccggctggccctgtga

SEQ ID NO: 8191 - RNA, 1719 nt, synthetic construct
  source 1..1719: mol_type = other RNA
atgtccaaactggaatctctacggaaggccagtactctgcacgatctagctcgcctgctgggctttaaggcgaaagctctcgcctatgtgctctacgtaatccccgaggcgaagaagtacacagaatacaagattcctaaacgatctggcggagcaaggacaatccaggcacccgtagcagagcttaaactgttgcaacggagaaccagtaatctgctccaagactgcatcggggagctcgctgacaagggtcagcgcagcgatccatttgtgcatggattcagacgacatcgtagcatcatcactaacgcctcaaggcaccgaaaccggcggctggttgtcaatctggatatatccgatttcttcggttcaattaacttcggcagggtgagaggcctgctcattaaggacgatgcctttagccttaatccatccgtggccaccgtgatcgcccagattgcgtgccatgagaacgcactgccacaggggagcccatgttcacccgttctagccaacctcgtggctcgcccccttgatctccgccttctggctcatgccaagcgccgagggttcgtctacactaggtacgccgacgacatcacgttctctacaagactgaaaaatcctcccgctgccattgttcagcacaaacctgggacaggacttcacgcttgggaagcagccccaacccttgtgcgggctatcgaaaaatcgggtttttctgttaatgccagtaagaccagggcccagtaccgtgacagtcggcaggacgttactggcttggtggtgaatagaagggtaaacgtcccacgcgagtataggcggcaggtccgtgcaatggtacacagactcacaaccacaggcgcgtttgaaatccggaaaaatgtgttagccgccggatccaccaccttgcgcgcaataccggggaactttgaggagctgcaaggaatgctgggctatattgcttccatcgatgctgctgcagagcacaaccgtaaagacaatgctattgccgcaagaagccagagagaaacgtaccgacgcttcctgttctacagggagttcttctgtgtggatagacccgtgatcgtgtgcgaagggaagactgacaacgtgtatctcaggtctgcccttcgcaagctcgccccgctgtttcctagtctggcgtcagtcacagcatctggcgaattacggatgaatgtgaggctgtataaggctgacggaaagaagacttccagcttgatgggtctgacgggaggtgccgcccccttattggcgtttctgcgagaatacagaaaggctagcgagacattcgtttcgaaaggaaacaggttccctctaatcgtcgtagtcgataatgacggcgcatcaaaggacatattctcctttatcaagaagatcactggcagtcataagatgattgacggcagcgaaccttactatcggttaatgccaatggtcttcgtggtccctatacccaaacccccttcctctaccaccgctgccattgagtctctctttgattcaagcctgttgagtaccattcataaagggaagatttttcacgggtccgacaaagggttcgatgaggacaagcactataccaaaagcgtgtttgccaaagaggttgtggaaccgcacttcgacaagatcaactttgatggctttaaacctttgctggatgcaatatccgaggtggtcggattaagctcaccatga

SEQ ID NO: 8192 - RNA, 1740 nt, synthetic construct
  source 1..1740: mol_type = other RNA
atgtccaggcttgccgaactaaaggcctcaaccactctgagcgacgtggcgcacctgctcgggtataagcccaaggccgtttcatacattctgtacatgctgccaacagaccagaaatataccacattcgagatttcaaaacgaaatgggggacagcgcacgataaatgcaccagttgagaagttgaaagtactgcagagacggctggccgacctgttgcaggattgcctggacgagataaacaacgctaaaggacttaaagacagggcagctcatggcttcaaacgcaagctttctatcatcacaaatgcccggcagcacagacatcggcgctgggttttcaacgtcgacttagagaacttcttcccatctatcaactttggaagaatcagggggttcttcattaaaaatagagacttccaactccatgagaaagtcgctacagtgttggcacagatcgcatgccatgatcactccttacctcagggcagcccgtgctctcccgtaatcagcaacctagtcgctcatctcctggacatgcggttggtgaagctggcccagatcgctggctgtacgtattctcgatatgccgacgatctcaccttcagtacgaataagaaacaattccccctcgaaattggttggcccgccaccgatcaggggcctgattctcacatctggttacccggcgacgcgctgcgcaaaacaattaacagggcgggtttcactataaaccccaataagacccacctgatgtatcggaccagtcgacagcgagtgactggtctggtggtgaacaagaaaattaacatccgttgggaatacaggcacaatgtgcgggccatggtcaacaagctcgtgaatacgggtgagttcgaactcaacggcatagtgcacaaggatggcaatgtctcaatcgagaaacgccctgggagactgaatgaactgcacgggatgctcggctttgttaatgacattgacgtgtacaactccagacaaaccaatgataagcctcctggatttagttcaaccgaaagagtctatcgtgagtttctcatctatagcatcttctatgctgcacagatgccagtgatcttatgtgaaggtgatactgataacgtgtacattacccatgctatccgctcgctggctcgtgaatttccagatctagcagaggtacgggctgacgacaagattgtgctgaaggttaggttgtataaataccccaaaagttccacatcccatcttctcgggctgggcgatgggggatcctccgtattgagcaaatttatctcggagtacaagaaggagatttctaggtttaaggccccaggacttgctcaccctgttatcattgtttacgacaacgatgatggagccaggagtatccgcaatacaattaagcagatcacaaagagcactcctaaggtcaccaatccatttgaccacgtgactaagaacatgtacgcagtgcctacaccgataccagaaggcgaggcagccagcaagattgaggacttttttggcgaaatgattaaatccaccgtcgtgaacggaaagatctttaacgacggcaataatatagatgccactcaacattacgggaaacgggtgtttgcccacaaggttgtacgacctaaggcccagatgatcgatttcactggcttcagacaactgcttagcaacattgtggaggtcataaaataccacaaagcagcggtcgtgatgcccccgccctga

SEQ ID NO: 8193 - RNA, 1749 nt, synthetic construct
  source 1..1749: mol_type = other RNA
atgtctcgcttggcatccctcaaggcagcaacttcactgtccgatgtggctaaactcctggcattcaaaccaaaagcggtgagttatattctgtacaagcaaccggccgccactaaatatagaacctttcagatccctaaacgtaatggaggcgaaagaaccattaaggcccccgatgaagccctgaaattgcttcaaaggagactgtccgagttgctgcaggattgcgtcgacgaaataaacacagtgaagcagcgaaaggatagaacagcccacggttttaagcggaaacgctccatcataaccaatgcacggcagcaccgccatagaaggtgggtgtttaatgtcgatcttgaggatttcttccccagtatcaacttcggtagggtacgaggtttcttcctgaagaaccgtgactttgagctgcacgaagacgtcgcaaccgtgattgcgcagattgcatgccacgagaatgctctcccacagggtagcccctgctcccctgtaatcagcaatctggtggcacacctcctggatatgcgactcgtacggcttgctagcgacgccggctgtacatattctcggtacgccgacgaccttacctttagtacaaacaagagggagttccccgcaaacatagctgttagctctgggaatgagggagatgcctctcacttgtggttaccaggggaagcgctgcgaaaggtgataaagagaacgggattcaggatcaacgctaagaaaactcatcaaatgtacagggctagtcgccagaacgttactggactggtcgttaataagaagatcaatgtgcggtgggaataccggcataacgtaagggctatggtgcactcactcgtccgcaccggggcgtttcagatacttggggtaacgtctaaggatggccacgctgtgctggagaagaggcctggcgatttaaacgagctgcacggcatgctgggattcatttatagcatcgacgtgtacaacaagacacatccgtcggacgcctttgccgagggtatgtcagccagcgaaaaagtgtaccgcgagtttctcatttactcaaccttttacgccgctgaggcccctattgttatctgtgaaggcgagactgacaatgtctatctgacacatgcaatcaggtcacttgctgccgaattcccaagcctggccgaagtgagatccgatggaaaaatccacttgcgcgtccggttatataaatatccccattccagcaccgcccgattactcgggctgaatgacgggggatccggggttctaagtaaattcatcgctgcctacaaaaaagagacaaagcattttacggcacctgggttgaccgatgccgtcgtgatcctatatgataatgatgcgggagcaaaaggcattagacaggccattaaaaacgtctctggcgtgaaagcgactggggacgaaccgttcgttcacgtcatcaagaatctgtacgccgtttcaacccctgtggaggctcccgctactcagagtaagattgaggacttcttcgacgctacaatcaaggctactgtcatagacggcaagatgtttaacgagggcgacggctttaacgccgatcagcattacggaaagaaggtgttcgcccagcaagttgtgcggagcaaggctgacattatcgacttcacgggctttcgtgccctcctaacaaatctcaccgaggcaattaactcgcacaaagcctctgtggtgccacaaccacccgaaccttga

SEQ ID NO: 8194 - RNA, 1731 nt, synthetic construct
  source 1..1731: mol_type = other RNA
atgtctagactggccgccttaaaggcctcaacaagtctgtcggatttggccaggctgctggattttaagccacaagcgctggcctacatcctgtacaagcagccggaagctaaaaagtacactaccttccaaatccccaagagaaatggtgggcagcggaccatcaaagctcctgtcgacgcactgaaacttgctcagcggagactgtctcatctactgcaggactgcctcgaagagatcaatactaatcaaaaccgcaaggataggactgcccatggtttcaagcggaaacgcagcattatcaccaatgcccgtcagcatagacaccgacgctacgttttcaatttagatctcgaggacttctttcctagtattaatttcggtcgcgtgcgggggtttcttattaaaaatcgcgatttcgctctgcatgaacacgtagccaccgtgattgcccagatcgcgtgtcatgaaaatagcttaccacagggatccccctgttcaccagtcatcagtaatctggtggcacacttgttggacatgagacttgtctcccttgcctctgcggcaggctgcacttattcccggtatgctgatgatctgacgttctctacaaataagaaggagtttccgacagagatcgccgtcccgttgggaacagagggaggtgaatcccacctgtgggggcctggagacgagttacagaaagttattgaacggatgggcttcagaataagtgcagctaaaacccatttgatgtatagaacaagccggcaagacgtcaccggcctcgtcgtaaacgaaaaaatcaacgttcgatgggaataccgccataacgtgagggcaatggtgcacaggctgataacaactggggcttttgagatctatggggtgacccaacgagatggcaaggctgcattagagaaacgtcagggaccactgaacgagctccatggcatgctggggtttattgactccatcgagaattacaacaagaagaacacacacgattcgcccagcgacaggcctagcagcatggagctagtgtacaggcagttcctgatatacaggaacttttatgctgccgaatctccagttgtaatctgcgagggtgacacagataacatatatctgacccacgcaatccggaacctggcagcagagtttctcgaccttgccgaggtgaaagaggggaagattaggctcaaggttcgactctttaagtaccctcattcatctacagcgcgcatccttgatcttggcgacgggggcagtggggtactctcagactttattggcacgtataagcgggagattggccacttcactgccccctccagccagagccctgtggtaattatttatgacaatgactcaggagcgcgtggcatccgatcagccattagaagtgtgtccaaagttcagccaaccggcaccgaaccctacgtccacgttgtgaaaaacctatacgccctcgcaacgcccttggtgggaacgaccactgaatctaagatagaagactttttcgacgatgctattaaagccaccgtgattgatggaaagaccttcaacgataagaacaaaatagacgccgctaagcactattccaaaactgtgttcgcccacagggtcgtgcgccccaatgctgatacaatcaactttagcggcttcagacctctcctgactaacctggtggcagtgatcaatgcacacaaggcctccatcgctgtctga

SEQ ID NO: 8195 - RNA, 1773 nt, synthetic construct
  source 1..1773: mol_type = other RNA
atgagtcggttggctggcctgaaggctgccactagcatatccgaccttgctaccttattgggctttaagccaaaagccatttcttacctattgtacaaacaacccagcgagtataaatacacaacattccaaattcccaagagatcaggtggacagagaaccattcaggcacccgttgagcggctgaagctgctgcaacggagattgagtgatcttctccaagattgccacgacgagattaatgcctcggctaaaaggaaagaccagatcgcacatggattcaagcgggatcgctctattatcaccaacgccaaacaccatcggaacagaaggtgggtgtttaacatcgatctggaggacttcttcccaagtattaatttcgggagagtgcggggctactttcttcgcaacagggacttcatgctccaggaacgagtagcaacagtgatcgcccagatctcttgtcatgagaatagtttaccacaggggtcaccatgttctcctataatctccaacttagtgacgcacgtcctcgatatgcggttagtcaaactcgcctccgagtgcggctgcacttactcaagatacgctgatgatctgactttctccacgaataagaaagacttcccctttcaaatcgcaggaccctccgctataagcgcggaccgggctcatttgtggctccctggtgagccgctgaaacaggttatcgagcgtacaggcttccgtgttaacagcaagaagacaagaatgatgtacagagactcacgccagaatgtcaccgggctggtagtcaacaagaagattaatgttgcaagggaatataggcataacattcgagccatggtgcaccgcctggtcactacggggcagttcgaaattctcggccctgttacccgcgacaagaaggtggtgctcgagaaacgacccgggacactgaacgaactccacggcatgttgggcttcgtcgattcggttgaatgttttaatcactctaggaccgacgaatattcagcatctttgaaagccacatatcgccgattccttttttacagcaccttctatgctgcctccgcccctgtgcttatctgcgagggcgaaaccgacaatgtgtatctgacacatgcaatcgtaagcctggcgtcagagtttcctgagcttgcggagctggcaggagccggtaagactaggctcaagatcagaatatataagtacccaaggaccagcactgcccgcatcctgggtctgaaagatggcggttccgccgtcctctgcaactttatcaaggattaccccaaggaagtagccaggttcagtggcccaggcctagctcagccggtgatcgtaatctacgacaatgatgaggggtgtaaaggaatacgttccgtgattgctaatattagcaaagtgaagccaactggaactgagcctttcacgtatgtgtacaaaaacctgtacgccgtccctaccccgctacaggaaggagtcacatccagtaagatcgaagacctgttcgaagcacgcatcaaggagacaatcattgagggaaagacctttaacgaaggaaattctctggaccctcataaacattatgggaaaaaggtgttcgcgcacaaggtgatacggcccaacgccgataaggtggattttaccgggtttagaagcctgctgacttttccccgttttcaccgacacctttataaagaagaatttgacgagattggtgggcagcacgagcaccaggaccagaccgctgtttatggcagggtgtga

SEQ ID NO: 8196 - RNA, 1740 nt, synthetic construct
  source 1..1740: mol_type = other RNA
atgtcaaggcttaacaacctgaaaagtaccgcaacactgagcgatctggctcgccttctgcagtttaaaccctccgggctgtcttacatactctttaaacagccagctgccacaaagtataagacattcgagatcttaaagcgaaaaggcggcacacggactatcaaagccccctctaatcccctaaagctggtgcagcaaaggctgagtatactgttgcaggactgtgtcgacgagattaacaaggccaaaaaccggaaagaccggattgcacatggattcaagcgtaagcggagcataataactaacgccagacaacacagaaataggagatacgtgttcaacatcgatctcgaggacttttttccctcaatcaatttcggccgcgttagggggtatttcatcagggaccgatcattcgcacttaatgaagatgtggcaacagtgattgcccagatcgcttgtcacgagaatgctcttcctcaaggtagcccatgttcgccggtgatcagcaatctgattgcacacgtcctagatatgcatctagtcaggctcgcttccaaggttggatgcacctattcccgctacgcagacgacttgaccttttctaccaataagaaggacttccctgctgatatcgctaagcctagcgaaacggaaccacatttgtggctcccgggagccgaacttcagcggctcattgcccatgcgggctttagaatcaataccgccaagactcatatgaagtaccgcacttcccggcaagaggtgaccgggctagtagtcaaccagaaaataaatgtacggcgtgagtactctcacaacgtcagagcaatggtccacagcctgttgaaggagggctcatttgaattgtatgctgcaaccgagaaggcgggagctgtaacaatcgagaagcgcaggggtactgtgaacgagctgcacgggatgctcggtttcattgacagcattgacctctataataaaaagaatgctcctgagtccaaagattcaggccgtctctcatccaaggaactgatgtaccgacagtttctgatttacaaggacttctacattgccgaagcccctgttatcatctgcgagggaaagacagataacgtgtacttaacccacgcaatcaggagactggtggccgagttccctgatttagccgaaattacaacccagtctaagatccgcctgaaagtcagactgtataaataccagaggtcgagtacggcccgcattttaggcctgcgggacggaggttctagttgcttgactaaattcatcgaaacctataagaaggagacagacaaatttaccgcgcccggccagaaaaacccagtgattatcctgtatgataatgactccggggcgagcaacatacgaagcttgctcaagcaaacgttcaaacttaccgtgggaaccgaacagttcgttcgcgttgttcgaaatatgtatgtcgtgccaaccccactgctcaacggggccaatgaaagtaaaatcgaggattgctttgatgcagcgactaaagcaaccgtcatcggagggaaaactttcaacgataagaacggccttgacacggccaagcattacgggaaaaagatttttgccgaccaggtggtgcgggatagagaagattccataaactttgagggcttcagacaactgctcacaaatctggtggctgtgattcagtcccacactacagctgtatctggtgccagtgccccccagtga

SEQ ID NO: 8197 - RNA, 1737 nt, synthetic construct
  source 1..1737: mol_type = other RNA
atgcccagactggccagtcttcagagtgccgccactctgtctgaccttgcacgcctactgagattcgaaccctccggactcagctacattttgtatagaaagcccgctgcgaagaagtactcaacttttgagattcctaaacgccatggggggaccaggaccataaccgccccagacgatgacttaaagttggtgcaacagcgactgagcgatctgctgcaggactgtgtggatgagattaatacagccaagaatcggaaggacaagctcgcacacgggtttaagcgtaagagatctatcattaccaacgcgagacagcaccgcaaacgccgttgggtcttcaacctggacctagaagattttttcccttgcataaatttcggacgagtgcgcggcttctttctcagagatcacaattttcagcttcagaaacacgttgccacaactatcgctcaaatagcctgccatgctaacgggctgcctcaaggctccccctgttcacccgtgatctcgaaccttatcgcacacgttatggacatgcacctcgtgaggcttagcagcaaggtggggtgcacctactcccggtatgcagatgatttgacattttcaacgaacaagaaggagtttccccctgaaatagcaaagccaagtgcgacagatccacatctgtggttgccaggacctgatgtccaagctttagtcaaccatgcaggtttccgaattaacaactctaagaccaggatgaattaccggaccagccgccaggacgttactggcctggtagtcaatgagaagattaatgtgaggcatgactatcggcacaacgtaagagccatggtgcatcggctattctccaccggggaattcgaactgtggggcataattgacaagggcggcaccaagacactggagaagaggccaggttcactcgacgaattacacggccgattgggctttatcgattccatagaccagttcaataagaaaatcgcgagcgacgtcaactacacacgttatccggccggtagggagagcatgtacagacagtttctcatctaccgtgacttttacgctgccagtaaaccggtcattctgtgtgagggagagactgacaacgtgtacttgactcacgccattaggtccctcgctgcttcatttccagagctggccgagatcgattccaatggcaaacgccatcttaaagtgcggatctacaagtacgcccggagctctacggcaaggatcctcggcctgaaagacggaggaaccggacacctcaaacacttcatcggtacttattcgagggaaaccgatcgcttcaaagccccaggactgaagcagccggtgattgttctctatgacaatgataacggcgctaatcccattcgaagtgccatccgggaagtgtctaagaaggccgtgaaagccacagacgcatatactcatgttgtgcggaatctgtatgcggtgcctacccccctgctgaacaatgctaaagagtctaagattgaggatttctttgacgctgcaatcaaagcaacagttattggggggaaaacgttcgtcgcagccaatgattatgattccacaaaacactacggtaagaaaatcttcgcccaccaggtagtgaggcctaaagctgatactatcaacttcaaaggctttgggcctttactgacgaacatcgctagaatcgtaaaagaccatgctgccgtcgtcggagcaacagctccctga

SEQ ID NO: 8198 - RNA, 1902 nt, synthetic construct
  source 1..1902: mol_type = other RNA
atgactaaactggagcagctaagacgtgccaccacgctgagggaccttgcagagctgctgggtgtgactgctccgggtctagcgtacatcctgtaccacaagcctagggaccagctttacagagcattcgaaatacctaagcggaaaggaggaactcgcagcatttccgccccagcggacgagttgaagactattcaaaaaaagctgtcctctctgttgcaggaatgctgggccgaaataggggatggcaaaaacagtggaaggcacccaggccgcaagggtagggttgctcacggctttctgcccggccgctctatctctaccaatgcacgccaacaccgtcggaagagattcgtctttaatgttgatctagaggacttttttgggagcatcaactttgggcgggtctttggccttctccgccaggacaataattttaaactccagcctcgagtcgcagctgtgatagcaacaattgcctgctttgaaaataaattaccacaaggttccccctgttcgccaatcatctccaatctagtagcaagaatcttagacgcaaggattgccggcttggccgccaaggtaggcgtgaactatagtcgatacgctgacgacttgagtttttcctgcaatggaaggatattccccccggagatagcgaaaaagattgaaggagatgaccactcatgggtggtcggaaaggctcttaactctgtgatcgaaaaaaccgggtatcgggtgaacttgagcaagacccggatgcagtatgaggacagccgccaagaagtcacaggcctggtggttaacagacgggtgaacgttaggtcagagtaccgtcgggctgtcagggctatgggccatagactctttagcacgggagccttcgacgttcccaaggtcgccctgactaagggcaatgacttcccaatgcagtccgtgcagggcaccatcccccaattgcacggtatgatgagctttgtagcgtcaattgatcgtctgcatcgcgaggcagccctcagtagaggagatgcgatcgaggagacaagcgccgagaaactgtatagaaacttcctgtactatcggttcttctataagaacgacgcccctatcattctttgtgaaggcatcacagacaatatctatctgcgctgtgccattcgagcccttagagagagttatcccctcctcgttaagcccaaagcagagcctggggatctcctgattaaattctacaagtaccgaggggctgcagtggatactgtgttaaaactgaaggatgggggcgccgggaacttacagaacttcatggtagcttacaaaaaagcctgtcagttgttcctgggggctggcaaggagaaccctgtcatccttatcgtcgataacgatgagggtgggcggaaggtcatgggagctgcgaaggaactgtcgggcaaggcttacgatggctcccaggcttatctgcatgtgtttggaaacctctatctcattgccacccatccaacagccgtggtggatggtggtcagaaaaagatggctcagaagggcgccagaccctctgactcttgcattgaggaatacttctcttctgaggtgcgctccaccaaactgaatggaaagaccctgacgctgaagaacgattcctccggagtggctcattacggcaaaatggacttcgccaaacacattgttgagaatctcaggggtgcagactcatttagtggattcgccaggttactcgatcgaatcaatctggtggtaaccgcccacgctagcagctcaacagaagccgctgtgtcaggcgcagcggcatcacagctcagcaatggggggcttggggccgcaatacctccaacaggagaaaccattgccgggttcactgagatcgccgaagcagctgattga

SEQ ID NO: 8199 - RNA, 1782 nt, synthetic construct
  source 1..1782: mol_type = other RNA
atgacacagctcgcggcactgaaaaaagcttccagtttgaatgacgtggctgacctgctgggatataaacctgccgctcttgcttatatcctgtatcaaatcagcgacgaaaataagtacacctcattttcaatccccaaacgttccggtggagtgcgcgaaatcaaggcaccaatcgataaggtgaaggccctgcaaaaaaagctcgccaacgtgctggaccattgcctcgacgagctgaacgcggttcatcagtatcgctaccagtcttcccatgctttccgcaagaataagtctatttttaccaacgcctcgaatcacagagccaagcgatgggtctttaacatagacctggaaaacttcttcactgctattaacttcgggagagtgagaggctactttattcgggatcgacagttcgagttggcgccatctatcgccaccatcctggcccagattgcttgttcagggaacagtcttccccaaggctcaccttgctcgcccgtgatttccaatcttatcggacacatactggatgtacatcttgcaaagctggcagcccgcgtagggtgtaggtacaccagatacgcagacgatatcacgtttagcaccaatgaccctcagttccccagcgctatcgccatatgtgatgtggaggatagtcgggtttggcacattggtaacgagttgcagtgcttaatcgaaagtagcggttttgccgtgaacatcaaaaaaacccggatgcagtttaaagatagccgacaagacgtgaccggcctcattgtaaataggaagattaacgtcaagaaggaatatagacggacggtccgagcaatggtcaaccggcttctgactgttggccactttgagaggaaaaggagagtaaagaacaatgcaggcgaatgggtgctggcggatgtcgctggaacagccgaagagctgcacggcatgctaggtttcatcgagtccgttgacaagtacaacagttctctgcctttaaaaaaaggcgggaaaaggaaggaaggtgaaaaaaccggtgtcgatgagaagcggttaacggcttccacaggaaaggataatttgtacaggcgttttctcttgtacaaagagttcttcgcagccccctgccccgtgatcctctgtgaaggcgaaacagataatgtgtatctgatccacgccatacgctctagggccgcagacttcccgatgcttgccaaggtgagcgagacaaacgaaatcactatcactccccgcttatacaagtacgttaaaacaaattccgggagaatgctcgggttagggtccggaggcaccggagatctgggcaaactaataaagaattatctgagcgagctccaccggttcgttaggcctaagcagcagcatcctttcataattctgatagacaacgacgcaggggctattggcggaggaaggccactcgaggtgctgcgtaaaaaaggcgtggatattgaccggaccgcgccttacattttcgtgatggggaatctgtatttggtgccaactccgctacttggaaaggaggagagcatgattgaggatctctttggccagaatgtactagacgagtctctggacgggaaaactttttgccgcaagaacaaggcagataatggcagacacttcggaaaaactgtctttgcccataagatcgttcgaccaaatgctgaccatatcgatttttcaggtttcgacccactcttgattaacatcacagccgtcattgaggacttctataagaagcacccgagagtcgcctga

SEQ ID NO: 8200 - RNA, 1821 nt, synthetic construct
  source 1..1821: mol_type = other RNA
atgacgcagctggcagctctaaaagcatccacttctcttattgatattgctcacctcttgggctacaaaccatcagcactggcttatatcctgtacaagatcgatgacgaagtcaaatacgcgaattttgaaatccctaagcggtccggtggaaagcgcttagtgtccgcccccattccagagctgaaagccctgcaaaggaaactcgcagaattgttggaaaattgcagcatagagcttaccgaggctggaaagcacgatgataagtccagccatgggttcaagaaggggaagagcattttttcgaacgccaaggggcaccggaacaaaagatgggtgttcaatatagacctggagaacttctttggaacgatcaattttggacgggtccgtggctatttcattaaggatcggaacttccagctttctcccacagtggctacgattatagcacagatagcgtgccacaaaaattgtctcccacaaggggcgccatcttctcccgccatcagtaacttgatcgggcatatcctcgatatccatctgagtaaacttgcagcaaagttcggctgtcactacagtcgatatgctgacgacctgactttctcaaccaataaaccttcatttccccatcagatagctagccctgactctattgatcctcaagcctggacaccaggttccgaactgagcaggctgatagataactcccggttcagtatcaactcgctgaaaaccaggatgcagtatcgagattcaagacaggacgtgactggtctggtcgttaataagaagcttaacgttaaagccgagtacaggcgtttagtcagagcaatggttaatcgcctgttaaccttgggacacttcgagagagagaagcgcctgtccgacgaaaaagggaatctggtgttgaccaaggtgccaggcaaaacagatgagctgcatggcatgttaggtttcattgacagcgtggaccgctataacctcaacctatcaattccggccggcgggaaagtgcatgacgagaagaagaaagccgccgctgacgagaagaataccagacctggcctgacaggcaaggaccacctctataggcgattccttatctacaaggaattctttgccccctccaggcctgtaatcctgtgcgaaggcgatacagacaacatttacctcatccatgctattaggtcactgtctgccaagtatcctttgctcgccaaactgcagaatgagaaactagagatcctacccagaatctacaagtacgttgatacctccactggccggattctcggcctaaattctggcgggactggcgatctcggaaagctgattagaagctatcttgcagagatcaaccgatttatccgcccagccaatcagcacccgttcatcctcctggtcgataacgacaagggagcaataggtgggggacgtccccccgacgtggtcaaaaaagtggtgggaaaggagatggaccgcagtgccccattcttgtacgtagccgggaacttatacctggtgcctacacctctcctggacggaaaattggaaagcatgatcgaggacttttttgacgataagacccgctctagagacatcgatggtaaagtttttaaccccgcgaataaagccgataacagtaagtactttggcaagaaagtcttcgcccacaaagtgatccggcccaacgcggaagacattgacttttcaaggttcagctcccttctggataatattactctggctctcgaagatttttataagaagcatccgcacagcgctacagtagacaaaccagcaaagaaggctgcctga

SEQ ID NO: 8201 - RNA, 1818 nt, synthetic construct
  source 1..1818: mol_type = other RNA
atgacacagctcgcggccctgaaagcagcgagctccctccacgggattgcccacttactcggatttaagccagctgccctagcctacattttgtacaagcttaatgattcacagcgatacaagcagtttgaaatccctaaacggtcgggaggcaagagaacaataaaagctccgaccgcagagctcaagcttcttcagcggaaaatggcatctctgctcgagaactgtatttcagaaatcaacgtggccaataagagggccgacctgttcgctcatggattcaaaaaaggtcggtcgattttctccaatgcgaggccccataggaacaggcagtgggtgttcaatattgacctggagaatttcttcggcagtattaactttgggcgtgttagggggtttttcctgaaggacagagacttcgccttgcaccagggagccgccacgattatagcccaggtggcctgtgtggacaacgcactacctcaaggtagcccctgcagccccataataagtaatttgatcggccaccttctcgatgtgcacctcgccaaacttgccgcgagctgtggctgccactatagtcggtatgcagacgatctgaccttttccacaaatgccccgcaatttccatcccgcatcgctacacgaactcgcggtgccgccggtgatgaatggatgccgggcgcagagctgcaccgaattatccagcacgcccgctttgccatcaatccacaaaaaactcggatgcagttcaaggactccagacaggatgtgaccggcctagtggtgaataaaaaactcaacgtgaagacagaatacagacggtctgttagagcgatggtacaccgcctgcttacccatggacacttcgagagaactaagcgggttgatgatggtgcgggaaatcacgtgctggacgctgtcaagggcaccaccgctgaattacatggcatgctggggttcatcgacagcgtcgagcactataacaggaacctggttctgcctaagggaggtaagccaaaagtcgagaaaaaaaaaaaggggactgagcccaacaaaccccgcgtcgctttgactgggaaggaggtactgtatagacggtttctgctgtacaaagagtttttcgctacatcaaatcccgtactgatctgcgaaggcgaaactgacaatatctacctggtgcatgcaattagatccttggcaacacactttcctcttctggctaccgtggtcaagcccggcgaaatcaagattataccccgcatctttaagtatgttgaaaccagcactggccgtatcctgggtttaggcagcggagggacaggcgacctaggaaacttaattaggcagtatgacaaggagattaagcgcttcgttaggcctgccactcagcatccatttatcctcgtcgtggataatgatgcaggagctgtgggcgcagggcgacctttacaggcatctaaacaagtaacggggttggacgttaaccgtcatgctcccttcaccaacgtgtgcggaaacctgtatctcgtgccaaccccatttctggctggcgccgcccagtctatgatcgaagattttttcacgaaggaaaccttggatgagacaatcgatgggaagtctttctgtgctagtaacaaacaagactcagctaagcagtacggcaaaaaggtctttgcccataaggtcgtgaaagtcaaggctgacacaattgactttaaggggttcttcaagctcctggagaacatcacgctggccatagaggatttctacaaaaaacatccttccgcacctatcacctctgctcaagcaatctga

SEQ ID NO: 8202 - RNA, 1713 nt, synthetic construct
  source 1..1713: mol_type = other RNA
atgagccagctcatcgctctgaagagctgcataaatctgagcgatgtagcggtgctactcggatataaaccttctacactgagttacctcctatacaaaatcggcgaggaaagcaaatacagctctttcgagatccccaagaagggcggggggactagacgcattgaagccccccaaaaagaactgaagctgttgcagaggaaagtggcagatttacttcagaactgcttcgagtccgctgacttgacatccccaaagtataagagcaatcccgtctcctatggattcatcagaggcctcagcataattgacaatgctcaaaatcacagatcacaacgattcgtattcaacatagacattcaagacttctttgggtctattaatttcggcagggtgaggggttttttcataaaagatcgcgacttttcacttcagccccaggttgccaccgtcatcgcacagattgcctgttttaagaacagattgccccaaggttcaccatgttccccggtgatatccaacctggtgggacacatcctagatatgcaccttattaaactggccgcgagaacaggctgccggtatagtagatatgcagacgacctcactttcagtacatcaaagcgggactttccacggcaggtcgccttctacgacgaagagaaggggctttggcacgtaggcgacgagttaaaacgcctgctggagctgtcaggcttcacacttaacagcggcaaaactcgaatgcagaaccgggactctcgccaacaggtgactgggctggttgtgaataaacgagtgaacgtcagtaaagagtacaggaagaccacgagagcaatggttcaccgcttgtttaccaaggggagtttcttttttaccgacgaatccaatttagaagtgaaggctcagaaggaaagttccgatatcggacggctccatggaatgctgggacacatttaccacgttgacaccaaatgtaagacaaagatcgagtcttccaccaatcctcctcagaaaaacgcgagcacctatcggaggtttttgatttataaggaactgtacgcaacgaacaaaccaattatcatctgtgagggtaaaaccgatccagtctacctggtccatgctatccgaagcctgcatagggacttcccgatgctcgcttacagggatgccgagaaccagattcggctgtctgtgcgcctgctgaagtacgctgataaatcgatggcatcgatacttggtcttaacggcggggtaggagatttgcggacttttatagattcgtataggtctgacatcaagcgtttcaatgcccctgggaagtttcatcctgtgatcatcttaatcgataacgacgacggcgccaagcctatcctgtccattgtcaagtcaattaatcccaattccacgtttgatcgcgatagcttttcacatatcgtcggcaatctctacgtggttaaaactccattgctgggtagcgaaaagtcttgcatcgaggactttttcgatggcgatctgaaatcaacaatgatcgatggaaagcagttttctctcgagaaagacgccaacccggaacactatttcgggaaggttgtgttcgcccataaggtggtgcgtccccaggccgacaagatcgatttctccaactttagacacattctcaagtctatgcaggacattattaccgagttcagtagtcagaaacgtatttga

SEQ ID NO: 8203 - RNA, 1758 nt, synthetic construct
  source 1..1758: mol_type = other RNA
atgtcccagctggctttgctcacttccgccacagaactacaccaggtcgcaagtctgttgaatttcaaggccagcgcactgtcttatgtcttatataaactgcccgccgcccagaaatacacgaccttccagataccaaaaagaagtggaggaatgcgcacaatccaggcgccttgtcctcagttaaagatcctccagcataacctttccaatacactacaaaactgcctggaggagattaatgccagagaaaaacgtaagaacagctttagcaacgggtttacccgaaacagatctatcgtggacaatgccgctccacaccgcaccaaacggttcgtttttaatatcgaccttcgcaacttctttgggacaattaatttcggacgagtgcgtggtttccttatcaaagacaggaattttcggcttgagccaaagatcgcaacaatcctcgctcagattgcatgccacaacaacgaactgccccagggctcaccgtgtagtcccgtaatttccaatttaatcggtcacgtgctcgatgtgcacctggttgggcttgcaaggaggtccggctgtacctactccagatacgccgacgatatcacattctctaccaacaagccagaatttccggcagatatcgccactcggactgaaccctcccatcagtgggagataggggaggagctcaaaaggctgattaagttgagtggattcgatgtcaatagcgagaagacccggatgcaatattgtgactccaggcaagaagtcactggcctccttgtcaacaaaaaggtgaacgttagacccgagtacagacgcaccgtgcgcgccatggtgcatcgtctgttcaccactggtgagtttcacattcctgaagtggtcgacgatgggacaggcaaggcgagcatcacgatgactcccggcgaaatgtctaagctgcatggcatgctgggcttcgtagaccagatcgatctgtataacaagaagaaccggccttcaggctcaaataacgataatttgtcgagcaaggagtctatttttcgagacttcctcttctaccgagagttctactcatgcgataaaccggtactgctgtgcgaggggaagactgataatgtttacctcaaacacgcaatacatgcattggctgctcattttcctagcctggcgagcgtgaacgccaaaggagaggttacacgcaatatacggatctttaagtataccgactccagtacaggtagaattctggggatcaacggagggacagcccccctgtcaggctttatgaggacctacgcggacgcaacttctcggtttaaggccccaggcgaaaataatcccctaatcctggtgctcgacaatgacagcggcgtgaaaggaaaaggtaagatttttaatgctgtgaagcagatttgcaaagtggaaatgaccggtgctgagaagttcgtacatgttgccgggaacatgtatgtgactctgacgccattacttccaggcggagctgactctatgatggaagacctgtttgatttgaacaccaaggccacgataattgacgggaagagtttcaatcctaataacaacctcgattcagcctcacactatggaaagcacgtgttcgcccaaaaaattatcgccgcaaaccctcagtctgtcgactttggaggcttcacacaattgctggataatatctcggctgtgattgatgctcacaaaatcaaagtcagcgagaggcagaccgcgaacgctataaactga

SEQ ID NO: 8204 - RNA, 1752 nt, synthetic construct
  source 1..1752: mol_type = other RNA
atgccgaatttggcgaacctcaaagcagcagcctccaggcaagacctggccgaattattgggggtcaaggcaggaatgctgagctatgctatttacaaaatccctgaggcgaaccggtactcgagatttgagatcccgaaacgccatggggggatcagagagatccttgccccaactcccgagcttaaattaattcagcgccgtctttcagttctgctccaggactgtgccgcggaaattaacagcgcacacggccatgcggaagatggcactcggttcggcatagctcacggttttaaaaggcatcacaacattatgaccaatgggagggttcatgtcacacgaaggttcgtgtttaacgtggacctacacgattttttcggaaccatcaatttcggtagagtgcgcggcttcttcctgaaggataaaaatttcgccctgcacgcagatgtagctaccgtgatcgctcagatcgcctgcttcgataacaaactgccacagggttctccttgctctcccgtggtgtccaatcttttagcccacagcctcgatattcagctggtgaggctggccgccaagaacggagtcagttatacgcgatatgcagatgatctgacttttagtactaataagccaagcttccccgcagagatcgcggctcctggtgatacgcattcctggaaacccggagccgacctcgagaggatagtggccaattccgggttttccttcaatccctcaaaaactaggctgcaatatcgtgattcacgccaggaggtcaccggcctgaccgtcaacagaaaggtgaatgtgcctgctacttatcggtacacagtgcgggccatggttgattgtctgtttagaacaggcaagttccagttcatatacaagaagaaggatgagcagggaaaggttgttctcgagctctcacatgctggacggaacgagcagctccacggtatgctgagttatattgaccaagtggacctgtttaaccagaaggtctgtaaggaaaacggacgggagcctgaatctaccaccggacgcgtggagctttttcgtcggtttctgtacttcgacacattctatgccgctcccgagcccattgttgtatgcgaaggaaagacagacaatgtctacctgaagtgtgccatcaaaagtctcgtggctaaataccccaaattggtggccgcagggagccctccaaagctgaaactcaggttctttaagtacgcagagacacgcacgggccaagtgaccgatttgaccgggggcgtaggcgggatctgcaaactcttgaagtcttacgacgaagatgttaaagaagtctttaaggcaccagtcagtaagttccctgttatcgtgctgattgacaacgacagcggagcacatgggatataccaggtgatagctggcatcaataaaaagccaaagccacagggcctggccgatttcattcacgtaactagcaacttgtatgtcgtgcccacaccgtttggcccttccaaatctcacacagccatcgaagactttttcgacaaaccaacccttgaaacaaagttaaatgggaaaacgttcagcagagagtccaagctggacgaaacctcagagtatggcaaggctgcgtttgctcgagacgtggtggctaagaacgccggtactattgatttttctggctttcaagccattctagacagagtcatcaaggtactagacgactacgaaatccgattcaagaatgccaaaaaatga

SEQ ID NO: 8205 - RNA, 1857 nt, synthetic construct
  source 1..1857: mol_type = other RNA
atggcatgcgagatcaaggtacctggatttgcccccagaatatcttccgctctctccgaactgcgccgtttgcggaagagtatccgggagcccttgcctctcagacacatgtcttccttgcagaagctcaaggctgcggccgctagaagagatctagcgatcattttagacgtgtcacccaggaacctcgcctacattctctataagacagcccctgacacgaagtacacccggtttactatccccaagaggcacgggggcgagcgtgagatactcgctccaagcttaggacttaagctagttcagcaaaagcttgcatcagtactgcaggattgttctgatgagattgcccttagccatgtcaagcccgggaacggaaggcggcatggcattgcgcacggcttcaaacgccatcacacaataatgactaatggacgcgtacacgtgacaagacgttttgtgttcaacgcggacctccacgatttctttggcacaatcaatttcggtcgtgttcggggctttttcattaaagataggaatttcgccctgcatccggatgtcgccacggtgatagcccagatcgcctgcttcgaaaataaactgcctcagggatctccctgcagccccgtgattagtaatcttctcgcccacccaatggatattctattatcctcactcgccgctaagcacagcgcttcatacactagatacgccgacgatcttaccttcagtaccaataaccccacatttccaccggaaatcgccgcgctcaacggtgaccacacgtgggttccaggggccgagcttgaccgattggtgagccgctctggcttcgcatttaatccgagtaagaccagactgcagtacagagactcccggcaggaagtgaccgggctgactgtgaaccaaaaagtcaatgtcccagccacctacaggtatactgtacgcgctatggcccactcgctgtttacaacaggcgccttcgagtttgtgtacaaaaagagggatacaaacggtaccatcatcctggaaaatcggaaagctggcgaaaacaagcagctgctgggtatgctgagctatattgaccatgtggaccgattcaatcataagctggcaatcgagaacggacgagaatttgagtctaccgctgggagagtggccctgtttaggcgatttctgtacttcgatctgttctatggactaagagagcccattatcgtgtgtgaaggtaaaaccgacaatgtttacctgcggtgcgcaatgaaggctctgagcgccacttatccttcattggtcgaggcaggggcaccccctaagctgaaggtccgcttttacaaatatgcagaaacccgcactggggaaattacagagttgacaggcggagtcggtggcatctgtaaactcttgaaacattaccatacggatgtgcaacattgtttcaaagctcctgcaccgaggttcccagtgatcgttcttattgataacgataaaggtgctcacagtgtgtatgaggctatcgccgggatcactaaaaagaaaaagccacaaggcttggcagattttatccacgttacgagcaacctgtatgtcgtgcctacccctcgaggaccaaacaactccgagacagccatagaagatttctttgacgaggcgactctgaaggaagagttaaatgggcgcaaatttgacaggtccaaccataccgacgacaagccagggttttatggcaaaggccacttcgctagggacgtcgttgcaaagaaagctggaaccattaatttcgatggcttcactgcaatcctggaccggataattaaggtgaccgacgactaccaggcaaagctggccaaaccttga

SEQ ID NO: 8206 - RNA, 1746 nt, synthetic construct
  source 1..1746: mol_type = other RNA
atgcgtatgattaatctgactaacctcaagagcacaacctcccggcgagacttatcaaagttgctggacgtgaaacccggcatgctctccttcgcaatctacaaaaaccccgaggcggtgcggtatcgaagatttgagatcccaaaacggcacggcggcactagagagattttggcccccgccagtgagctgaagctcctgcagcagaggctctcggtgctgttgcaggattgtgttgcggagatcaccgctgcacgcggatttgctgaagacggggctcacttcggtatcgcacacggatttaagagatatcataccatcatgaccaacggcagagtgcatgtcacccgcagatttgtttttaatgtcgaccttcacgatttcttcggcaccatcaacttcgggcgcgtgaggggattttttttgaaagatcggaatttcgcgctccaccccgaagttgccactgcgatcgcacagatcgcttgctttgaaaacaagctgcctcagggctcaccgtgttcaccggtgatttctaacctgctagctcatagcctggacattcaactggccaggctcgcagcaagacatggcgcgtcctataccaggtacgctgatgatctgactttctctaccaataagcctgcattccctgccgaaatcggtgtgcttgacgatgctcataactgcagtcccggagccgagctcgagcgcattgtaacccgatccgggttcagctttaacccagccaagacaaggctgcagtatcgggattctaggcaagaagttacggggctgactgtgaatcggaaagttaatgtgccagcaagctaccggtataccgtcagagccatggtcgataggttatttaaaaccggtgccttcgagttcatttataagaaaaaagacgctcaaggcaatgtggtcctcgagcgccgagtcgcagccaaaaacggacagcttctcggaatgctgtcatacatcgaccaagtagaccggttcaatcagaagatctgcgaaaccaacggacgtgagcctgaaagcacggccgggagggtggaactgtttagacgattcctgtactttgacactttctacgccactcgccagccggttatagtctgtgaaggaaaaacggacaacgtttacttaagatgcgctattaaaagcctagctgccaagtacccaaatctggttacccccggagtgcagcctaagctcaacgtgaggtttttcaaatacacagaaacacgtactggtcaggtgatggatttgactggcggggtgggcgggatctgtaagctgctgaagagttactccgaagatatcgagggtatatttcgcgcccctgcgccaaccttcccagtaatagtgttgattgataatgacaagggtgcccatggagtgtatgaagtgattgccggcattacaaaaaagccaaagccccttgggctagctgactttatccacgtcacaagtaatctttacgtcgtgcctacacctttcggccccaagaaggcccacacagctattgaggactttttcgacgccttcacactggagacagagcttaacggcaagaaattcaacagaaacaataagctggacgactctaaggagtatgggaaggccgcattcgcccgcgatgtagtggctaagaatgcagcaacgatagactttacaaaatttcacgccatattcgatcgggtcatgaaagtattagatgattatgaggctcgtaggaaatga

SEQ ID NO: 8207 - RNA, 1743 nt, synthetic construct
  source 1..1743: mol_type = other RNA
atgtcgagtttgcaagccctgaaagcagcaagcgcccgcagagatttggccgacctgctcggcgttaaacccgggatgctgacctacgctatatacattaccccggaggctgatcgctatacaaggtctaccatccctaaaaaacatggtggggaccgcgaaatctgcgctcccaataacgaccttaagctaatccagcgacggctgagtacacttctgcaagactgcctggatgagattaatgtggcaagaggccataaagaagatcgcgtgagattcggaattgcgcatgggttcaaacggaatcataccataatgaccaatggcagagcccacattacgaggagatttgtctttaacgccgacctgcacgatttcttcggaactatcaactttgggcgcgtaaggggattcttcttgaaggataaaaatttctccctccagcctgaagtggccacaaccatcgcccaaatcgcctgttttgagaataagttgccacaaggatccccctgttcacctatcattagcaatttcttagctcacccccttgatattcgactcgtgcgactggcagcgaagcacggggtcacttacacgaggtatgccgatgacttgacttttagcaccaataaacccgcttttcccgtcgagatcgcgtctcccatcgacagtcacgggtggattccgggtccagagttagaatgtgttgttaccgagtctggcttttccttcaacccatccaaaacacgcctacagtatcgggatagccgtcaggaagtgaccggcttgacggtaaatcgaaaggttaacgtgcctgccacctaccgttacaccgtaagagcaatggtcaacactttattcaagacaggttcctttgagttcatctatcgcaagcggggggacgacggcaaggtaacaagcgagaaccgagagccgggaaccatgcctcagctgctgggcatgctgtcatacattgatcaggtggacctctttaacgagaagctctgcaaggataatgacagagagcctcagccagtggtgggaaggactgcactgtttcggaggtttctgtacttcgatactttctttagcgctcagaggccaactattgtatgcgaaggtaagacagacaatgtgtatatgaggtgcgcgatcaagtcactggccgctgcgtacccaaggctgatcggtggcgaaaaactactcgtcagattcttcaagtacaccgagtctcggaccgggcgggttatggatctcaccggtggcgtcggaggcatttgtaacctccttaaatcatatcatgaggaccttaagttctatttcaaggcccctatcagtaaattccccgtgatcgtgctgattgacaacgattctggcgctcactcaatatatgaagctgtggccggaataacaaagaagaaaaagcctcagggcgttgcagactttatttatgtgacggggaatgtgtacatagttccaacacccttcggcccaggaaagtccttcactgctatcgaggacttctttgacgcaaaaacgctcgccacagaactgaactccaaaaaattcaaccgcaagaacaagaaggaggacagtgaagacttttactctaaagcagcttttgcccgtgatgtggtggccaaaggggccagcactatagactttggaaactttaaggtcatccttgatagaattgaaaaggtcctggatgactacgcagtccggcgtaagacaatgacttga

SEQ ID NO: 8208 - RNA, 1788 nt, synthetic construct
  source 1..1788: mol_type = other RNA
atgcgtcgtagtatccgggagtcctttttgctgcccatcaaaatgagctccctcaaagatcttaaagccgcaacggctaggcgagatttggcggcactcctacacgtaaagcccggaatgctcacctacgccatctataagtctcctgaggccaatcgctaccgaaaattcgagattaaaaagcgccacggaggcgaaagggagatcctggcgcccgaaaacggcttaaaactgctccagaggcgcctctctaccctgcttcaggactgcatagccgagattaattctttgcacggccatgtggaagacgaaggacggttcgggatcgcccacggcttcaagagaaaccacacaattatgaccaacgggcgggctcatgtagcacggaggtatgttttcaacgtggacctgcacgattttttcgggacaatcaactttggcagagttcgcggcttttttctgaaagaccgaaatttcgcactgcatcctgaggtggccaccgtgatcgctcagattgcctgttttgagaacaaactaccgcaaggcagcccctgttctcccgtgatatctaatctgattgcccatagcctggatattcaccttgttcgcttagcagcaaagcatggtgccacgtatactcgatacgctgatgacctcacattcagtacaaatagacctgagttccccccagagatcgcgaccctgaaggacactcactcatggatcccaggcgtggatttggaacggatagtcacccgaaatggcttctcatttaacccttccaagacacggctgcagtacagagacagcagacaagaagttaccggtttgaccgtgaaccgcaaagtgaacgtacctgcaacatataggtatacagtgcgggccatggtcgacaagctcttcaagactggccagtttgaatttgtccacaaaaagagggatgctcagggtaatgtggtgtttgaaaataggtgcgtgggggagaacaaacagctacttggtatgctgtcgtatattgaccaggtcgatcgcttcaatcataagttatgtaccgacaatggaagggagccagcttccacggaaggacgcatcgcactctttcggagattcttatacttcgatacattctacgcagccagagaaccgataatagtctgtgaaggaaagacggacaatgtgtacctgcggtgcgctatcaagtccctggccacagaatacccaaggttgatcgataagggaacccctccaaagcttgaggtaagattctttaagcatgccgaaactagaacaggccacattgccgacctcactgggggtgtggggggtatctgcaaactgctgaaaaactaccatgaggatgtcaccgagtggttcaaggccccggtatccaagttcccagtcatcgttctgatcgataacgataatggcgcccactcaatatacgaggctattgccggcattactaaaaagcccaaacctgaagggagggctgacttcatccacgtcacctcaaatctgtatgtggttccaaccccctttgggcctaagaagaaacagactgctattgaggattttttcgacgagcataccctggcgactcaactgaacggaaaaacttttaaccgcagtaacaagagcgacgacagtgacaagttttacggaaaaggggcattcgcgcgtgacgtggtcgccaaacaggctaatacaattgacttcactaagtttcgtgctattcttgatagagttatgaaagtgctcgatcactatgaggagagccaaaagaagtga

SEQ ID NO: 8209 - RNA, 1749 nt, synthetic construct
  source 1..1749: mol_type = other RNA
atgccgtctctcaagcagctacaagccacaacatcattgcgggagttagcaccgctgctcgacataaaacctggcatgctgtcgtacctcctttacaagaagcctaaactggatctctataagaagttcaccattcccaaacgtcatggcggagtgcgtgaaatcaatgcaccagaaggggatttaaaattgctccagtaccggctgtccctccttctgcagaaatgtatcgtcgaaatcaatgcggagcacggacacgctgaagatgacgagcatttgggtattgctcacggtttcaagcgttaccacagtataatgacaaatgggcgggctcacgtcactagacggtacgtctttaacgtggacttgcacgatttctttggctccatgaattttggacgcgtccgggcgttcttcttgaaaaacaacaacttcaagctgcacgccaatgtggcaacagttatcgctcagatagcctgtcatgagaacaagctgccacagggatctccatgctcccctgtgatttcaaatctaattggccatacaatggacattcccctggctaggttagccagagacgagggcgccacctataccaggtacgccgatgatctgaccttcagcacaaacaatccttctttttcacataagatcgcagttcagggctgtgatcaaaaatggctgcccggggaaagtctgcagagaattgtaaccaagtccggattctcctttaacgcgcaaaagacccgaatgcagtacagagactctcggcaagaggtgaccgggctgactgtgaatcgcaaagtcaatgttcccgctacttaccgctataaggtaaggagcatggttgacaaactctttaaaactggggagtttgaattcatctacaagaaactggacactttgggtaaagaggtggccttcaattatcagggcaaaaggaagcagctgttagggatgctgagctacatcgaccaggtagatcgatttaacagtaaactttgcgagaagaatggcctcgaacctcaccccacaactggacgcacaactctgttcagacggttcctttattttgatgcttttttcgcaccagtcgagcccataatcgtgtgcgaaggaaagacagacaacgtgtacctgcgctgcgcaatcaaaaatcttgccgccgcctacccgaagctggttgtcgctggtacaaagcccttgcttaaagtgaggtttctaaaatatgcggagagacgaacgtcacaaataacggaactcactggtggggttggcggggtctgtaacctgctgaaacattatcatgatgacgtgagaaccaagttcaaggcaccagctcctaagcaccctgtgatcgtgttcattgacaatgatagcggcgccgactctatttacggagcaattgcagggatcacgaaacagcccaaacccgccggccgagcaagctttatccacgtaatcgctaatctctatgtagttccaactccacttggaccaaagaacaagaagaccgctatcgaggacttctttgacaagacgaccctcgcaaccaaactgagcgataagaccttcagtagggataacaagatggagaacctgaaacattatggcaaggcggccttcgccatcaacgtgattgccaagaacgccaataccgtgaactttaataaatttgcccctctcctggatcgcatggtggccgtcattgacgactatgctaagaggctaaaggtgcctttaaactga

SEQ ID NO: 8210 - RNA, 1743 nt, synthetic construct
  source 1..1743: mol_type = other RNA
atgtctaatttgaaacagctccaggatgcaacatctctcagacagctggcgaagctcttgaacatccagttcggaatgctgtcctacctcctgttcaagaaacccaaatccaagctctacaagaagtttgacatccctaagcgtcacggaggaatgcgggagattcacgcacccgagagggacttaaagctgttacagtatcgcctgagcgtgctgctgcagaagtgtgctgatgaaatcaaggcgagccatggtcatgtagaagacgaaaaacattgggggatcgcccacgggttcaaaagacaccacagtattatgaccaatggtcgggcccacaccgcacggagatttgtgtttaacgtcgacctccatgacttcttcggctcccttaatttcgggcgcgtgcgggggttcttcatcaaggacaagaacttcaagcttcacgagagcgtcgctactggcatcgcacagattgcttgttacgagaacaaactgccacaaggctcaccctgctcgccagtgatgagtaacttgatcggccacactatggatataccgcttgcgcaactggcagcctcagagggagtcacctacactagatatgctgatgatcttaccttttctacgaacaattcttcctttcctgaaaagatcgcctacaaaagcggcaatcatacatgggagctgggaagacagctgctgcgtatcgtgcaaaggtccggcttctccttcaacgataagaagacacgaatgcagttacaagacagtcgacaggaggttacaggtctgaccgtcaataggaaagtaaatgtaacagctacctataggtatacagtgcgaagtatggcaaacgccctatttaataccgggaacttcgagtttatctacaaaaaactcgacgactctggagtggagcaggtgtatcgctccaagggaaagcccaagcagctaattgggatgctgagctatattgatcaagtcgatcaatttaacaggaaattgtgggtggagaatggcctagagcctgaccccacactcggtcggataaagctgtttcgcagagttttatacttcgacaagttctacgcactaaaccagcccttgattgtgtgtgaaggtgtcaccgacaacgtatacctgcggtgcgcgataaagagtctggcagctttgtatcctaaaattgtggctgcgggcgcccccccaaaacctatggtgggatttctcaagtatgccgatagacgcacttcagagattacacagctgactggcggagttggtggcatttgcaagctgctgaaaaactatcatgaagatctcggtacccgtttcagggcacctgcccccaaacatccagtcatcgtcctgatagacaatgatggcggcgccgacagcgtgtatggagctattgccggcatcacgaaaaaaccaaagccgaataagaaagcaagctcaatccacgtgactggcaacctttacgtcgttcctaccccacagcttcctggattatctaaaacagccatcgaggactttttcgacgccccaacccttgccactgtggtgaatgggcgcactttctcaaaggaaaataattacgatgggagcaaacactacgggaaggccacgtttgctcatgaagttgttgctaaaaacgccaacgtgatcgattttaaaaattttgctccgctcctggaaaggattgttgccgtaatagatgcctacggggctaagttgaaggccaagtga

SEQ ID NO: 8211 - RNA, 1758 nt, synthetic construct
  source 1..1758: mol_type = other RNA
atgagcatcctgaaaaaactgcaggaagctaagacccggggacaagttgccgccctgctcgatgtcaagccagccatgctgagttttatcctgtacaagaaacccaaggcaactctgtatacaaagttttctatccccaaaaagcacgggggaacccgtgatattctggccccagagggaaacttgaagttgcttcaacatagactctgccaggttctccaggactcactggacgagattaatgtggccaacggccatggggaatctagagaacggcagggagttgctcatggatttaagagactgcatacgatcatgacaaacggccgaccccacgttgcaaggaggtacgtatttaatgtggatttgcatgacttcttcggcagcattaacttcggtcgtgtgagggggttcttcattaagaacaagaactttctccttcacgaggacgtggctaccgtgatcgcccaaattgcatgtcacgagaacaaacttccacagggctcgccatgttcccccgtgattagcaatctgatcagccactccctagacatgaaacttgttcagctcgcggctcgtgtgggcgcaacatacactaggtatgccgacgacttaactttctctactaacaaccccgattttccacagtatattgctttacgcaaaggaacccacgaatgggtggctggtcggggcctagagaaaatcgtgatgaaagaaggctttagcctgaatccttccaagacaaggatgcagtatcgagatagccgccaggaggttaccggtctgactgtgaatcgcaaagtgaattcccctgctgcttaccggctcaccgtgcgagccatggtgaacagcctcttcaaaacgggcctgttcgagcacgtacgcaaaaagaagggcgccgcaggggggatcagtgtcacaaaatttgctggggaaaagaagcaaatcctcgggatgctgagccacatagaccaggtagacctgttcaatcggcgacttcgggagaagaatggtttagagcctcacaacacctcaggcagggtggccctgttcagaagattcctgtacttcgagaacttttatgcgctagacgcgcctctgatcgtttgcgagggtaaaactgataatgtctatctgaagtgcgctattaagtctctggcgtcaagttaccctaaacttgccacctccgattccctgccgaaactgaagattcgcttcttcaaatactcagaaagacgcgcaggagacgtcattgggttaagtgggggcgtcgggggcatctgtaaattgctcaaaaactaccatgaggacgttagggaaaaattcaaagcaccatctcccaagcatccagtcatagtcttaatagataacgatagcggggccaattctgtgtacgaagccatagcaggaataaccaagaagcctaagccggctggtatggcagactttatccatgtgacgggaaacctttacgtggtgcctactcccttgggaagaggtggcaagaaaaccgccatcgaggatttttttgatgacaagacactcagtgtagcactcaatggcaagacattttcgcgggacaaaaatatcgatgaaacagtccactatggaaaagtcccctttgccatcaatgtggtcgccaagaatgccgataccatcgacttcactaagttcaagaagattttggatagggtagtgcgcgtcattgacgattatgcgataaagatgttggcttcctctcactccgcctcatga

SEQ ID NO: 8212 - RNA, 1749 nt, synthetic construct
  source 1..1749: mol_type = other RNA
atgtcccagctaaagcagctcaaagctgccactacactctcggacgtggccaggctcctggaggtcaaacccggaatgctgagcttcgtgctgtacaagaagccaaaagccgccctgtacagcaagttcgacattcccaaaaggcatggtggcactcgggagatttgggccccggataaggatctgaagttagtgcagcaccgtttggccaacctgttacagaactgtgtcgaagaaatcaattcctctcggggccatgtagaggacggcaaacggcatggggtggcacacggattcaagcgaaaacatacgatcatgaccaacgctcgagtgcacgtgactcgccggtatgtcttcaacgttgacctacacgatttctttggaacgatcaattttggacgggtgcgaggattttttctcaaagataagaatttcgcgcttcacgagaaggtggccaccgtgattgctcaaatcgcgtgtcatgaaaataaactgcctcagggctctccttgctccccagtgatcagtaacctgattgggcatgtcatggacattatgcttgtccgtctagcatcagccactggctgctcctatagtcgctacgccgacgatcttacattctcttctaacaagtccaagttcagcagcagggtagcaagacaggacgatgcagataaagacttgtggctgccagggcaaggtctgaagcggcttgtggcaaaagcagggttctctttcaacgataaaaagaccaggatgcagtacagggacagtagacaagacgtaaccggattagttgtgaacaggaaggttaatgtccccgctacatatagatacacagtcagagccatggtcgaccacgcactgaagactggagctttcgaacgcatctttaaaaaactggacgctgccggagtggagacaacttttaagcagccaggcaccaatcggcagctgatagggatgctcagctacattgaccaggtcgatttatacaatcgaaaactcagagaggacaacgggctggaaccacatgatacatccggtagaactgaacaatttcgcagatttctctactttgatgcattccacgctatcggatcgcctgtgattgtgtgtgaaggaccgactgacaacatatatctgagacacgctattaagcggcttgcgcccaagtatcctatgcttgcggccggcacccctcccaagttgttgctccgtctgttcaaatatggtcagcgccgaacctctgagatcacgcaactgaccgggggcgtgggtggtttgtgccatctcatgaagcactaccacagcgattttataaacaagatcaaagcctccgccccaaaatatccagtcatcgtgctcgttgacaatgatgcaggggcaaaagacatctacggggctatttcaggcattacaaagaaacctaggcccaccgggagggagcagtttatacacgtggtaggcaatatgtatgttgtacccacacctcttggcgctgggggcgcaaagacggctatcgaggattttttcgacgcgaagaccctggcagaaaccctgggtaccaaaacattttcaagggctcccaagttcgacgatacaaagcactttggcaaagccgcctttgcccgcgagatcgtggataaaaaggctgatagtatcgacttctcaggattcagcgccatattggacggcgttgtggccgtcgttgctgattacgccaagcgccatccgcctgttccctga

SEQ ID NO: 8213 - RNA, 1749 nt, synthetic construct
  source 1..1749: mol_type = other RNA
atgtcacaactgacccggttgaaagccgccacgtcactttctgatgtggcccgccttctggaggttaagcccgggatgttgagcttcctgctttataagaaaccgaaggccgctctctacgccaagttcagtattcccaaaagacacggcggtacccgagaaatctgggctcccgacaaagatctgaaactcgtgcagcataggttggccaatcttttgcagaattgtgttgacgagattaacgcggctagaggacatgctgaggacgacaaaaggcatggcatagcacacggctttaagcgtaagcacactatcatgaccaatgcacgggtgcatgtgaccaggcggtacgtgttcaatgtcgatctacatgactttttcggtaccatcaatttcgggcgtgttagggggttttttctgaaagataagaatttcaccctgcatgagcgagtggctactgtaattgcgcagattgcatgtcacgataacaaactgccccaggggagcccatgttctcctgtgatatcaaatctgataggccacatgatggatattctcctggtgaggttggcatccgctacgggatgcagttatagtcggtatgcggacgacctgactttctcatccaaccggagcaacttttccccaagggttgctcggcaagacgatgacgataaagatttatggctccctggacagggcctcaagaggctggtggctaaagccggatttagctttaacgaccgcaagactcgtatgcagtaccgcgattctcgtcaggacgtgacaggcctggttgttaaccgcaaagtgaatgtccccgccacttacagacacaccgtaagggcaatggtcgaccacgccatcaaaacaggaagcttcgagagaatctttaaaaaagtggatgccgcaggaatcgagactgcattccggcagccaggcacaaatcgccagcttattggaatgttgagttatatagatcaggtagatctgtttaaccgcaaactgagagaggaccatgggctggaaccacataacaccagcgggcgaacagaactcttcagacgattcctgtatttcgactccttccacgccatcgaatctcccgtcatcgtgtgcgaaggccctacagacaacatctatctgaggcacgcaattaaaagactagcgcccgcatacccaactctcgcttctggcacccctcctcaattatccgtgcgactttttcgctacggacaacggaggatttcccaggtcacacagctaacggggggcgttggcggtttatgccacctcatgaagcattacaactcagacttcacaacaaagattaaggccccagccccccgatacccggtgatagtcctggtagacaacgatgccggcgctaaacctatttacggtgctatctccgggattactaagaagccacggcctactggcgcggaaagatttatccacgtcgtcggtaatatgtatgtggtcccaacacctttaggtgccggggatgcagcaaccgctatcgaagactttttcgacgcaaagaccctcaacgagaagctcggaaccaagacattttcgagagccgccaagtttgacgatacgaagcactttgggaaggccgccttcgctcgcgaggtagtggagagaaaggccgacttcatcgattttagtcgcttctctgatatcctggatcgggtggtggctgtcatgagcgactacgccaagaggtatcccagcctgccgtga

SEQ ID NO: 8214 - RNA, 1443 nt, synthetic construct
  source 1..1443: mol_type = other RNA
atgtccaatgctcgggcccacgtgacgagacggtacgtatttaacgttgacctgcacgacttctttgggactataaatttcggacgtgttagaggatttttcctgaaggatcgaaattttagtcttcaacccaaagtcgctacagtgctggcccagattgcctgttatgagaacaaactgcctcaagggtccccatgcagccctgtgatcagcaacctaattgggcacatgcttgatatcgccctcgtacagcttgctgcagtcagcggctgtacctacacccggtacgccgatgacctgaccttctccagcaacaagccgactttccccatccagatcgcaagacaaattgataagtcggcggataagtgggctcctgggcgcagtctcgagcgcattgtgacaaaggcaggttttacctttaatgacaaaaagaccaggatgcagtatagggactctaggcaggaggtgacgggactggtggtgaacaggaaaataaattcgccggccatctacaggaataccgtgcgcgcgatggtcgattcagctctgaagcgcggtacctttgacttcatccacaagaaggttgacgccaaaggcgtggccacagtggtgaagcaaccaggtcgcaactcacagttgctcgggatgttggcacatatcgatcaggtagatcttttcaataaacggctgtgcgaaaaagcagacattgagccgccaagcactgccggacgtatagagttgtttagacagttcctctacttcgatgcattctacgacatctccatgcctgtgatagtttgtgagggacccacagataacacttatatccggcatgctattcgaagtctagccttcgggtaccccatgcttgtgacaggcaacgctcctccaaagctgaacgttcggttatttaagtacgcagaaaggagaacttcagaagttacccagctgacaggcggcgtgggagggttatgccacctgatcaagtcctatcacaccgacgtgactgagaagataaaggctcctccccctaaacacccaaccatcgtcctggtcgacaatgattcaggagcaaacgccatatatggtgcaatctctgggatcactaaaaaacctcgacccacaggaaaggagcccttcattcatatcgtcggcaacatgtatgtaattccaacaccattaggcctccatggtgaaaagaccgccattgaagacttcttcgacgccgccacactcgcgactaaactgggcaccaagtcttttagccgcgaaaagaaaattgatgagacgacgcagtacggcaaagctgccttcgcaagagaggtcatcgaaaaaaatgcgggctctatcgatttttccagatttagtgccattctcgacaggattgcggccgtgctggctgactattctaagaaacatcccacaagcgctgtcttgtga

SEQ ID NO: 8215 - RNA, 1743 nt, synthetic construct
  source 1..1743: mol_type = other RNA
atgagctcactggcggacttgaagaatactaagacactgagtgacttgggtgctctgctggatatcaaagctggcatgctatcattccagctgtacaagcgcccaaaagaggttctgtatactaagttcagcatccctaagaaatacgggggattacgcgaaatttctgcccccgacccaacgcttaagttgatacagcacagactatctgatctccttcaggagtgcctgctggagataaccaaaatcaacggacacgtaaatgatgctaagtcctttgggattagccacggtttcaaaccaggccacacaataatgactaatgccagagggcatgtgggcatgagatacgtgttcaacctcgacctccatgatttctttggtagcctgaatttcggccgcgtgcggggcttttttatcaaggaccgaaacttccagcttacccccgcggtggccaccgtgattgcccaaattgcatgcgccgataataagctgccacaaggctccccgtgttctcccgtgatcagtaatcttattgggcacactttggatatccccctcgtgcgcctggctgccacattaggcatgcggtatacacgttacgcagatgaccttaccttttcaaccaaccagaggatcgtccctgatgaaatcgctctcatggatccagttcataaatggattcctggtagggagctggtgcggatcattaaacggaatggatttgccatcaatgagagtaaaacccggatgcaatactgcgatagcagacaggaggtgactgggctgaccgttaaccataaagtgaacgtccctgctacatacaggtaccgtgtcagagccatggcgcataggctcttcaccactggagaattcgagttcatctacaaaaacaacgagaagacagtagtatcttctagcaaggggtcaccccagcagttgcttgggatgctgtcctatatagaccatgtcgaccagtacaacgaaaagatcaagctcgaaaataacctgcctgttacagaaacagctggacgaacagaactttttcgacagtttctgtatttcgacgcatttttcgcacccgaacgcccaatcgtggtctgtgagggcaagacagataacatatatctaaggtgcgccataaaaaagctggccgccaaatatcctgatctcgcaaccgtggccagaggagtgagcctcaatgtcagattcttcaaatatagtgagcaacgcactggatccgttattgggctgactggaggcgtgggtgggatctgtaaactgctgaagcactatcacgaagacgtatccacgcggtttaaggccccacgtccacagcaccctgtcattgtccttattgacaatgattccggcgcaaacagcatctatgaagctattgctggaatcaccaaacgcaaaaagccgttgggtcgggctcccttcattcacgtcttctcgaacctctatgtagtccccactccgttcggccccaagaatgcatacacagcaatcgaggattgttttgacgccgcaaccctcgccaggcctttagacggcaggacgttttcccgagacaataagcatgactcttcaaaacactacgggaaaaaggactttgcgaccagggtggtggccaagaatgtgaacaccctgaactttcatggctttgagcctttattggagcagatggtggcagttatcaaggactacaagacgagaattagtggagccgtggttgcttga

SEQ ID NO: 8216 - RNA, 1779 nt, synthetic construct
  source 1..1779: mol_type = other RNA
atggctttaatctacagcacacccgtcctggattccctaaaagctgccacatcactgcacgacctcgcacagctgttgaaactcaagccagcggtattggcgatgcagatttataagaaagacaaacggacagattggtatacgtcatttgagatcaagaaaaagcatgggggcgtgagaaagatcaatgcaccagaaaaacacctaaaactcatacagagtcggctcagtaagatcttgcaggattgtcagctcgaaattgccctgctgaacggacataaggaaggccctgatcggcaagggattgcccatggctttaagagacaccactctattatgactaatgggcggccgcatgtaaaccgccagttcgtttttaacgtcgatctgcaagacttcttcgagacaatcaatttcggcagagtgcgggccttctttcagaagaataaaaactttgccctgaacccaaaggtgagtgaaattctggctcacattatctgctataaaggtagcattccacagggaagtccgtgttcacccgtcgtgagcaatctaattagccattccatggacaccctgctggcaaaagccgccaagatcaatggggctacctacacacgttacgccgatgacttgactttctctactaacagaaaagtgtttcctgccctgattgccaaaaaaatctccgctaatgagtgggaaccaggtgctactctcctcggcgtcgtgacaaagtcaggattctgtttcaataagaacaagacacgtatgcagtataaagacagccgccaggaggtcaccggactgtctgtaaataaaaaggtgaacgtgaccgcagattatcgctacaccacacgagcaatggtccataagctctttaccgatgggaagttcgtgttttgctacaaggtcaaaaactcccacggtgaaaaagagatttttcaggagatcgaggggagggcatcgcagttgctgggcagattaacacacatcgaccatgtggatcagttcaacgagttgattcgcaagaaaaatggtctgccctccgctcttccagaaggccgattgaaacttttcaggaacttcctttacttctaccatttctatatgcctgaccaacctgttatcctgtgcgagggtaagaccgacaacatatatttaaaatgcgccttaaaggctaacgccgcggcgtttccgaaaatcgtcgaggtgtcgactgggagcccccctactctgaaggtgaggctctttaaatattccgagaggcgaacgggcgttgtgaccgatctttctggcggagttgggggcatctgcaaactgctgaagaattttgacagtaacctttctatgtggaattcaggacccaagcctgcacaccccgttatcattgtgatcgacaacgacagcggagctcagaagatataccaagcgatcgcaggaataaccaagaagcccaaaccttctggacgcaataagtttattcacgtcatcgagaacatttacgtggtacccaccccccctgccaaagggatcacgaataccgatatcgaatgtctttttgccgacgccactctgaatgaggagctttctggcaagaagtttaataagtccaaggaaatagaggactcatccgaatacggtaaaaccgcattcgctattaacatagtggctaagaaaagcggcgaaatagatttcactggcttcgttccactcctggagaggattcaagaagccatggaccactactataagagcatcaagaagttcaagaaatga

SEQ ID NO: 8217 - RNA, 1761 nt, synthetic construct
  source 1..1761: mol_type = other RNA
atggccaaaattttcagcactcctgcgctggattccttaaaggccgcctcatcactgcacgatcttgcccccctgctcggtctgaaacctgctgtgctggctatgcagctgtataaaaaggataaacgcacaggctggtatacaagtttcgagatcaagaagaagtacggcggcgttcgatccataaacgctcccgaaaagcatttaaagctgatccagtcccggctgtctaagattctgcaggactgcctcctggagattgccttgataaaaaaccacaaagaatctccagatcggcagggaatcgcccacggttttaagaggtaccactctatcatgactaatggccggccacatattaatcgcagattcgtgttcaataccgatctgcaggactttttcggagcaatcaactttggtcgagtgcgggcatttttcgagaaaaacaagaacttttccctcgatcccaaagttagtgagatcctggcacacatcatctgccataagggctccataccacagggttctccatgttcacctgtggtatccaacctcatcgcacattctatggacacactgttggccaaggctgctaagaaaaatggcgtcacgtatactaggtacgcagatgaccttacctttagcaccaacaagaaggagtttccactggctatcgcgaaaaagattacatcaaatgaatgggtacccggaaaagaagtttcggttattgtcgagaagtcgggattcttttttaacgaaaagaagacgaggatgcaatataaggacagtcgacaggaggtgacggggcttagcgtgaacaaaaaggtgaatgtgacctccgattatcgctacaccacacgtgccatggtgtcaagcctttttaaaaccggtaagttcaagttttgctttaaagcgaagaatctcgctggggaaaaagaggtggttcaagagtttgagggcaggcctgcccaactcttggggcgtctgactcacattgactacgttgatcagttcaacgaaagtctgagaaaaaagaacggcctaccaccagcactacccgagggcagattgaaactctttagaaacttcctgtactactatcacttttacatgcctgagcagcctgtcatcctctgtgaaggaaagaccgacaatatatacatcaagtgcgccctgaaagcacatgccaatgctttcccttctatggtcaaacccgggagtccgccagagttaaaagtgcgcctgttcaaatatagtgaaaggcggactgggatagtaacagacttgtctggaggggtgggagggatctgtaagttgctaaaaaatttccatgctaaccttagcatgtgggagtccgccccccagccaacacatcctgtcatagtggtgattgataatgatagcggcgcagacaatatttatcaggctattgccgggatcacaaagaagcctaagcccaagggatacgcaaagttcattcacgtcacccagaatatttatgtcgtgcccactcccccggtgaagggcaaaaaaaacaccgacattgagtgtttattctcagacgccaccctcaaagaagaactgaacggaaagaagttcaataaaagcaaggagatcgaagacagcagcgagtatgggaagaccgctttcgccatcaatgtcgtagccaaaaaagcgcacgaaattaactttgcaggcttcactccgctccttcaaagaatcaaggaggccatggaccactactacaaatccatcaaatga

SEQ ID NO: 8218 - RNA, 1860 nt, synthetic construct
  source 1..1860: mol_type = other RNA
atgagccgggatatgccctcagacatcttgtgctcaaaatatgtggtacaagttgctcccggcagtgtgcgagaaagctttaatcagagccgaaaatctatggtcaaaacttactcaacccctgcattagattctctaaaagcagctcggtccttgcacgacctggcccagctgcttcgcctgaaacccgaaattctagccatgcagttgtacgttaaagacaagcgcaccggatggtacacgagtttcgatattaagaagaagtatggcggggtgcggacaattaacgcgccagagaaacaccttaagtccatccagtccagactgtctaaaattctgcaggattgtctgctggaaattgcactgatcagcggccacaaagagggcccagaccggcttggtatcgcccatggattcaaacgctatcattcaatcatgactaacgcccgcccccatactaataggcgcttcgtttttaatgctgatctccaggattttttcgggactattaactttggaagagttagagccttcttttcgaagaataaaaactttgagctcgacgccaaagtgagtgagattctcgctcatatcatctgttacaggggatctctgcctcagggatctccttgcagcccggtagtctcaaacctgatagcccactcaatggacacgctgctagccaaggctgctcgaaccaatggggtgacctatacgcgttacgccgacgatctaacttttagtaccaatcaaaaggagtttccatcttccattgccgagcgcctggttggcaacgagtggggtgtaggccggactgtggtgaggatcgttgaggagtctggtttcagttttaatcagaacaagacacgaatgcaatacaaagacagtaggcaagaggtgacaggcctgtctgtcaataagaagacaaatgtgacagcagactaccggtataccacaagagcgatggtgcacagcctgttcaaaaccgggaagtttaagttctacttcaaagtgaagaacgccagcggtgctaaagtggtgattaacgaggcggagggaagccctactcagctccttggtcgtctctcccatatcgatcacgtggatcagttcaatgaatccattcggaaaatcaatggactccccgcagcattaccagcggggaggctgaagttgtttagagacttcctgtatttttaccacttctacatgcctgaaaagcccatcattttatgtgaagggaagaccgataacatctatataaaatgcgcactcaaagcaaaggctgcctctttcccttcactcgtcacacactccagcccccccgagctcaaggtaatcctgtttaaatacagtgacaggagaaccggtatcatcaccaatctgtcagggggggtcggagggatttgcaagttccttaagaacttcaattccaacttaagcatgtggatatctgctccgatccctgctcatccagtcatagtcgtgatcgattcggactccggcgcagacaagatctatcaggccattgccggcataacacgtaacaagaaaccaaaaggcagcgaaaagtatattcacgtgaccaaaaacatctatgtggtccctacgccaagaaagattaacgagcaaactactgacatagagtccttgttcacccaggagacactggacacagaactcaacggcaagaagtttaataagagcaaggaactggacgatgcttccgaatacggcaaggccgcctttgctaccaatgttgtcgcaaagagggccagtgaaatcaacttcgatggattcataccgcttttgaacaatattaacgaagcgatgacacattattacaggaccatcaaatga

SEQ ID NO: 8219 - RNA, 1767 nt, synthetic construct
  source 1..1767: mol_type = other RNA
atgaaactagaagaactgaaagcagcaacatcccttagagacgttgctactttgcttcaggtgaagcccgcaatgctctcatacatcctgtacacaaaaccgaaaccagagctttataccaaattcgaaatcccaaagaggactggcggtgtgcgcgaaatatctgcaccctactcacatctgaagttgatccaacaaaggctcgccgctatactcctggagtgtaccaaggagctgcgtgagaagaacgcatcaaagagcaaaaacaagaacttcgagattaggagcgtcgcgcacgggttcatgccaggtcacaacatcatgacaaatgggcagtcgcatattactaggcgattcgtgttcaatgtcgatcttagcgatttcttcgggtccataaatttcggacgggtgcgcggatttttcattaaggataacaacttcgctctcgacgagaaggtggctaccatcctcgctcagatcgcctgctatgaaaataagctaccccagggaagtccttgttctcccgtgatctccaatctcttaggccatatcctggacgtcgcgttgatcgacctcgcgcggaagaataaatgcacttatacacgatacgccgatgacttaaccttcagcacaaatcggcgagtgttcccacttgcgatcgcctttgcaatccaagaggacaagaatagttggctgccaggcaaagagctgatccggatcgtacagcacaacggttttgagtttaacaagaaaaagactcgcatgcagtataaggacagccggcaggaagttaccggcctttctgtgaaccggaaggtgaatgtgccggccagctacagatacaccgttagagccatggcttctaacttgtttaggacggggaaatttgagcacattgtcagatacaagaattcctcgggcgaggaggtggtatctaaagtagacggcaaaacaagtcagctgctgggtatgctgagctatattcaccaagttgacatgtataacgaagctctggccgtgaaaaataatcagcctctcgcagatacgccaggccgccttgagttgtacaggcgcgccatctacttcgatgctttttatgcacctgaaagaacagtggttgtttgtgagggaaaaacagacaacacttacattaagaacgctatctaccgcctgtttcaagggtatccgctgctgggcgagttggatgctgagggaaagccacagctaaagattcgtctgtttaagtatgccgatcgcagaaccgccagtataactaaattgtctggaggggtcgggggactctgccacctgattaaatactacaactcagacattgtgcagaaattccgagcccctcctgccaagtttcccgtgatattactaatagacaacgacagtggcgctgattccgtctacggcgccatcgccgggattctgaacatccaaaagcccaagggaaaaaagccttttatccatgtctatgagaatctgtatgtcgtacccaccccctttgggctggatggtgaaaagacctccatcgaagatttttttgaccaggctaccagagcaacgcagctgaatggcaagtccttcgaacgtaaaaatgatgccgacaaccagcaccactacggcaaagccgccttcgcaagagatgtgatttcaaagaatgcaagcaccattaactttgacggtttccggcctattttagataggattgaagcggtcatgaaagactatgtgggcaggatacatcagctcgccggatga

SEQ ID NO: 8220 - RNA, 1755 nt, synthetic construct
  source 1..1755: mol_type = other RNA
atgaagttagaggagctaaaggccgcaaccaatctccgtgatgtggcgaggctgctgcaagtaaagcccgggatgctgtcttatgtgctgtacacgaaaccgaaaagcgaactctatactaagttcgaaattccaaagcgaactggaggtgttagagaagtcagtgcgcccttttcccaccttaaactgattcagcaaaggctggctgcaatcttgttagagtgtaccaaggaactcagagaaaagcatgcttcaaagagtaagaacaaaaacttcgagttccgcggggtttcacatggcttcatgccaggccacagcattatgacaaatggccaggcgcataccacgaggaggttcgtatttaacgtagatctgtccgatttcttcggcagcatcaatttcggaagagtgcgcgggttctttatcaaggacaataatttcgcgctcgacgaaaaaacagccacaatcttggctcagatcgcttgctttgataataaactgccacaggggagcccttgctctccggttatcagcaacctgctcggccacatcctggatgtcgccctggtggagcttgctcggaaaaataagtgcacttatacccggtatgctgacgatctcacctttagtacaaacaaacgcatatttcctagcgagattgccctcgctaccgaggatgacggaaactcatggctgcccggtaatgaactgataagagtcgtgcgtcgaaacgggttcgacttcaacgaacgcaagactcggatgcagtataaagacagtcggcaagaggtgactgggctctctgtgaaccggaaggtgaatgtgcctgcctcttacaggtataccgtgagggcaatggcctcctcgttgtttagaacaggtaagttcgagcacatcataaagtataaatcagcctccggcgacgaaattgttagcaaatgcgatggcaagataaatcaattgctgggcatgctgtcctttatccatcaggtggacgtctataatgaggctttggctgttaagaacaatcaccccatcatcgaaacccccggccggctcgaattatacaggcgagtaatttactttgacgccttttacgcacctgagcgcccaataattgtgtgtgaggggaagaccgacaatacttacatcaaaaacgctatccatcgcctatcccagaactatccactgctgggaggccttgactcagaaggaaagccccagcttaaaatccgtctctttaaatacgcagatcggcgcacagcctccattacaaaattagggggcggtgtcggcgggttgtgtcaccttattaaatactacaaggctgacatcgcctctaaattctcggcccctagacctaagcatcccgtgattatgttggtcgataacgattctggagccgacgcaatatacggagccattgccggaatactaaatgtgcagaagcctaaggggaaaagaccattcatcagggtttatgagaacctttacgtggtgccaactccctttggttccaatggagagaagaccagtatcgaggatttttttgacaaagcaacactggccgtccagctgaacggaaagagcttcgaacggaaaaacgacgctgataatgagcaccactacggtaaagccgccttcgcgcgagacgtcattgccaagaacgccgcagcaatcgattttaacggcttcaagccgattctggatagaattgaggctgcaatcaaggactacgcaacgcagacccagtga

SEQ ID NO: 8221 - RNA, 1752 nt, synthetic construct
  source 1..1752: mol_type = other RNA
atgacactcgccaatctcaagggggcaactgacctacacggcgtcgctaaattgctagacgtgaaggcaggaatgttatcctacatactttacaagcaaccgaagcccgacctgtacaaaaagttcgagatcagcaagaaaacgggaggagtgagggaaatttccgcgccctgtccccatcttaagctcattcaacagcggctggcagccatcttactgggctgcagcctcgaattgaaggcaaaacacgcaacagcagtcaagaacaaaaactatgttaggagagaggtgtctcatggctttacgaaaggccgttccatcgtatcaaatggcgaggaacatataaccaggagatttgtattcaatgccgatctgtccgatttctttggaaccatcaacttcggacgggtgcgcgggttctttatcaaggacgaaaacttctctttgttccctgccgtcgcgacaatactggcccagattgcctgcagcgagaataagctgcctcagggcagcccttgttctccgattatcagcaatctgatcgggcatctcttggatatgaggctcgtggaatttgctttgcgccagggctgcacatatacccggtatgccgacgacctgacgtttagcaccaataagcccgagtttccaactgctattgctgtccagaaagagggtgatccacacaagtggattcctggagggggtcttcagaagatcgtgcaaaagtgtggctttagtcttaatgagaagaagactcgtctccagtaccgcgattcccgccaggaagttaccgggctgaccgtcaacaagaaagttaatgtccccgctacatatagatatgcggcccgagccatggccaacaatctgtttaaaacaggcaagttccagcacaccattcactttaccgacaaggacggagcagctcaggagctgagacgagatgggcacgctggcgagttgagaggcatgctctcttacgtcgatcagatcgacctttacaactcatgtagggaggaagctaacagcctggtgccattaggtgcccccggtcgactgcaactgtaccggagggtgatctactttgactcgttttacgctctgtcaaaaccaatgattgtttgcgaaggcaagacagataacacctacatcaaacacgccattctgcagctcgccggccattaccctaccctcgcgagtgcgtcgattactggtggcaaaccagagctgaaagtgaggctctataaatatgccgaccgaagaagcgccgttgtcaccgatatcgggggaggagtgggggggctgtgccatttaattaagaactaccacgcagatgtggtgaacaaattccgcgccccccggcctatgcatccagtgatcctgctcattgacaatgaccttggggctgactctatatatggtgccatatccggattactgaaaatcaagaaacccaaaggtctaagaccgttcatacacctgttctctaacctgtacgtagtgccaactcctcttggccccgggaacagtcagacaatgatcgaggacttctttgacgccgctactcaagcagtgactttgaatggaaagactttctcaaggcaggatgaagatagttcaaaacactatgggaaggctgctttcgcacgtgatgtagtggccaagaacgcagatagtattgatttcaatggcttccgctccatccttgatagactgcgggacgttctactggactatccaacacggccttga

SEQ ID NO: 8222 - RNA, 1902 nt, synthetic construct
  source 1..1902: mol_type = other RNA
atggccaaggaagggaacgtgagggacatttgccctaggcgaactcttctgttgcacaatcactcagtaatactactgaaagagtgcccacaagctctttcacccgaaatggccctcaagaagattgaagaacttaagaaggttaggaccagaattgagttggccgaacttctggaggtgaagccttccagattggcttacgaactgtacaagaaaaaagattcggatcgttaccagcacttcgagattcccaaaaaatacggagggactcgtgaaatccttgcacctaacccaacactgaagactatccagcgtcgactggccatatatctccaggactgtttagaagaagtaatcgcatccacagattccgagcgacacagaggtgggggcataaagctaggattcagtcacggctttatgcgggaccggaccattataacgaacgcaaggcctcaccgcgccaagcgcttcgtttttaactgcgacatcgtcgattttttcgggaccattaattttgggagagtgagaggattcttcattaaggacaaacagtttgcgctggctcaggaaatcgccacctttctcgcccaaatcagttgttttcagaatgtcctgccgcaggggtcgccatgttctcccgtgatcgccaatttgattgccagaaagctcgatattaagctgggtaggctggcttatcaaaccggcatgacttatacacgctatgcggacgatctcacatttagtacgaacaagaagatcttctcccatagcgtcggtgtgcaggatgcatccggtttctggcgggctggtaccgagctgacaaaaatcgtccgagccagcggcttcgagttaaatcctaataagacccggcttcagcagagggacagtcatcaagaagtaactggcttgacagtgaaccggaaagtgaacacaaattcttcttaccgctataccgccagagcaatggttaactcagtgctcaagacaggagagttctgctttagctatagcattaagaatgcacccgaatctctggaggctccggagaagaaaaaaggaaacttgaaacagctgctggggattctgtcccatatcgattacgttgacaggtttaacttcgaactgcggaaaagtaacctcgcccatctggcaaacaaaaaaaatcagaaagcggtggacgatcaactgttcccaagcttatcacgccaggagactttcaagaagtttgtgtacttctactggttctatgcctgtgacgaaccggtcatcatctgtgagggtaagacggataacatttatctcaagtgcgccatcaaagctttaaagctgcgatatcccgatctgatctctaatgacaagaacaacgaaaagctcaaaattcggttctttgagtacaaagagtctagagcaaaaagcctctctcagctttcaggcggggttggcggcttgtgccacttcctagagaattaccataagtacttgaatggcgcattttttgctccaaaacccaaacaccccgtgattgtgcttatcgacaacgataacggaggacagtccgtctactcaaaagtcgctgggataactaagaagaagaaacccaccggaaaggagtcttttattcgcatcgagaagaatctgtacataatcccaactccattaggccctgagggacagcaaaccgcgatcgaggactttttcgacaaagctgtgctcgacgagcagctgaatggcaagtccttctccagggacgacgacttcgataagagcaagttttatggcaaagccgcctttagccgggatgtagtgctaaaaaatagggagaaaatcgatttccagggcttcgatagcatactcagtcgcatcaatagcgttctgagagactatcatctgaccccttga

SEQ ID NO: 8223 - RNA, 1704 nt, synthetic construct
  source 1..1704: mol_type = other RNA
atgagtaagctccagcatctaaagtcaaccagtaacctgcactcagttgccaatctcttggggctcaaaccagcccacttagcttacaatctctacaaaaagcccgatgcggagaaatacactaaattcgagatccccaaaaggtatggaggtaagaggatcatttctgctcccaatgctgatttaaagcacattcaacgactgctggcagccgttctgatggactgcttaaacgaattgaatgccaagtacaaccgacaagctgcacacggctttattacccagaggagtatcctgaccaacgcccatcagcacagaggtcgcggccacgttctcaatcttgatcttcaggacttcttcggttccattaatttcggaagggtccgcgggtttttcattgctgataaagattttagcctgcatccagcagtggccacagtcttagcccagattgcatgtttcgagaacactctcccccagggatcccctgcttctcccgtcatcagcaacctcataggtaacgtgctggatacccacctgatcaagctggctagaaaacacgggtgcgtgtacacgcgatatgctgacgacctgacctttagcacaaacctgcccaacttcccagaagagctcgcgtactctaaatttggagtctggactacaggaacatccctgttgaaggttatcaagcagtcagggtttgacgttaacacaagcaaagtacggatgcagctggaggacagccagcagaacgtgacggggctagtagtgaatcagaaggccaacaccgccgccagctatagatcgagcattcgggctatggcaaagaatctattcaaaactggcaatttcactcacgattcattcatcaaggactccgccggcaatgtgagcaaaaattccgagctgggcactgtagcccagctgcagggtatgtttgggcatataaaacatgtcgacgaattcaaccttcagattcgtcggcaagagatcccgacgggcagagcctctctgtacaaacggttttttctgttctcgcaattcttttgttcctccaaacctgtgatactttgcgagggcaagacagacaatatctatctactgcatgccatcaggtcacgcgccaaccatttcccccaactggcagaaaccaatgcaaccggctctatttcacttctcatccgtatcttcaagtatgtggaacggaaagcaggtcgcaccctcggaatgagtggcggagacggcgaaattagcaaatttatagggacctacctgacagaggtgagtaagcactttaaggccccgggcgtgtctcagcacccagtcattcttgtggtggatcatgactctggagggaaagggccttacgagacagcgtctaaaaaggtgggcaagacgttggacatactgaatccttttgagcatgtcgctgcgaatttatatttggtagcaacacctcttccttttggagctacctccagttgtatcgaggattgcttccaacctactacattggccaagaccctcggtggcaagacctttaactacaagactaagcacttgaaaccgacagaatacggaaagtcatatttcgccgaacatgtggttcaggcagatgctgggactatcgatttctccggctttgatccactgctggacagaatcaacagcgtcattgtgcactatgcgaagctcccaaagtga

SEQ ID NO: 8224 - RNA, 1767 nt, synthetic construct
  source 1..1767: mol_type = other RNA
atgaccttgctcgctggtctaaagagtgcgaggactattcaggatgtagccaggctgctgaatactaaagcatctgctctggcgttcatgttatacaaggaatctccggatacgctctataccgagttttccataccgaaaaaatacggagggtttcgcgccatcgccgcgcctattcccaaactgaagctggtgcaacgcaagctggccgacatcttgcagatctgcctccaggaaattaacgagaaagagaactactctgacaaagtcgcccacggattcaagcgcggccgttccatcgtgaccaacgcccagtgtcataagcgtaagagactggtgtttaacctggatcttgaggactactttgggtctataaattttggccgcgtgagaggctttttcatggcagatagaaactttcaacttcatccctcaaccgctaccatactcgctcagatagcctgctataaaaatagtctgccacaggggtccccatgctcacccatcatatcaaatcttgttggcaatatcctggacgtaaggctagtgcggttggccaaggaatctgggcttacatatacacggtacgccgacgaccttaccttcagtaccaatgcccagtccttccctgaatctattgcggtaagctcagctgatagtctacattcatggatggtcggtaagggcttgaatgagttaatcgagagaagtggcttccgagtgaatagcagcaaggttcgtgtacagtaccgccactcccggcaagaggtcactgggttggtcgttaataagcgggtgaatattccatcaacgtatagaaggaaggtcagggcaatggtgtattctctggttacggaagggtacttcgagttcaaagagattggtgagaaagatgcagaaagcgcccagcctaccaaaaaaggaagtctgaaccaactgcacggcatgctgagctatatttatcagctcgattccagtaaccggaaggaactctctgccgctaacttcaaagatggagtccccgtctccgaacgcgacgtacccctcacaacaacagagaaggtgtttaggcgattcctgtttttcaagaacttttactccacccagaagccagttatcatctgtgaagggaagacagacaacatttatttacactacgcactcctttctctggcaacccgatttcctaacctggtggtgaaacaggctcagaaatattcgttcgccttctccctccataggtacagcaggagctctactgagcggattctgggtattcagggaggatcaggcgacctgaagatgtttatgttgaattacctgacctcgtacaatttcttcaaggtgaaggtgaaaaagcaacccgtcatcctgttgattgacaatgacgacggcgcaaacgatatcttctccatggcaaaaaactatctcggctacaagccaacaggacaggaaccatttctacacgtcgatggcaacctttatttaatgcctactccgctcctgaacagcagaactaaaagcactatcgaggacttctttgatgataaagtgaagagtgtgcaggtgtcagggcgatcctttgaccccaagagaaagcacaatggtagcgcttcgacatacggtaaaaacgaattcgcacgggaggtggttgctaagcaagccaatagcatcgacttctccaagtttagctacgtgttcaaaaacattgaggatatcatagccgactttcagagcaaagttgctgccggaaaaatcaagccttga

SEQ ID NO: 8225 - RNA, 1734 nt, synthetic construct
  source 1..1734: mol_type = other RNA
atgtcgaaacttagccggcttcgcgcttgcaaggacctgagagacttagcgaaactcctgggcttccgcccaagcgctgtgtcctacattctctacatggagtctgacagcgccaagtatcgggagttcgagatccctaaaacaaccggcggaacccgacagataagcgctccccatcccaaactcaagctgctccagacgaggctgagcaacctgctgcaggactgtctgggcgaactggataagctcaacgccgatgcccacagacttgactccctcgcccacggctttaaacgaggtcgcagtatagtcactaacgcacagcggcacaggaatcgaagatgggtcttcaatctcgatctggacgggttcttcaacgatatcaactttggccgagtgcgcgggtacttcattaaggatagaaatttcctcctgcagcccaaggtggccactgtgatcgcacagattgcttgtcataaggggtcccttccgcaaggatcccccagctctcccgtgatttcgaatatggtgggaaggataatcgatcttcgcctgtgcagacttgctgctcgcgctggttgccggtacaccaggtacgcagacgacctgacattttctaccaataaacgaagttttccagaagccatcgccgcccgggacagccaaaatgattctagttggtcccctggggatgaattaataaagatcatcaaggagtcagggttcagtatcaattctaagaagacaaggatgcagtatagggaatcacggcaggaggttactggtctggttgtaaacgacagagtgaacgtgcctgcaacatatcgtcacactgtccgagctatggtacaccgcctttgcatgaccggaacctttgatatacagaaagcaacaatatcttccactaaacagtccaaccaatctgatccaggcaacttgagacagctacacggcatgctggggttcattgacgcggtggacagatttcaccaaaagaataagccaaacgacgcacacgataagcagaagccaagagccagtgagttgatctacaggaggttcctgatttatcaaaatttctacgccgcagaaaagccggtgctaatctgtgaaggcaaaacggataacatctacatcacctgcgccatccgttcattagcgcaacagtttccggacctcgctcgcatcgataaaagtgggaaaatcagtctcgaaattcgtcggttccggtacgccaaaacgagcaccgggcggattttaggtttgaatgacggcggagccccagtcctgaaaaatttcatttgggagtataagaaggagatttctaaattcagagcgacaataagcaagcatcccatcatcatcctgatcgataacgattcagcttcaaagcagatcttcgcatccttgggaaaaattaccacatccaaggtctgtggtaacgaaccttttattcatgcttttgccaatctgtatgtagttgctactcctatacccgagggaaaggattcatccgacattgaagacttgtttgaccaggagactctaggcgccaccattgacggaaaaaggtttagcaggatcgttgaggacgagtcacgtcattatggcaaagccgtgtttgcatacaaggttgtgaagcctagggcagataaaatcgattttagcggtttccgcgaactgttggcccggtttgtcagagccattgaggactatcaggcgaagattcattga

SEQ ID NO: 8226 - RNA, 1683 nt, synthetic construct
  source 1..1683: mol_type = other RNA
atggctactagcctcagcgacgtcgcgctcttgctgggcttccacccaaaagctttcgcgtgggtcatctataagcaaacagccaagtacgcagtgttcgacattcctaagtcccgaggggggactagaactattaaggcgcccgaacctcgtctgaaaaacatccaagccagactcgcggaacttttgcaagactgtatcgccgacatcaacgaagccagatctcagaaagaaaaactgtctcacgggtttcgcagggggcattcaatcataactaacgcttatcagcatcgagggcgtcggtttgttctgaatgtcgacttggccgacttcttcggcacaatcaacttcggtagagtaagaggttttctgatcactaaccggcattttgcactgcatgagcgcgccgctacagtaatagcccagatcgtttgtgatgataactcattacctcagggcgcccccacatcaccagtggtgagcaatttaattgcccatatcctggatgttaggctcgccaaattggcaagaagattcggactgcactatacaaggtacgccgatgacctgacctttagcaccaattccagagattttcccgaggaggtggcagtacctaatgacgctggccagtgggttgctggtcctgcattggacacggccatccaacgtgcaggctttgcgctgaacccccagaaaacccgagtgcagatgcgtcagagtcggcaggatgtgaccggcctaattgttaatgagaaggtaaatatccgctctgagtactatcgggaggccagggctaaatgcgaccatctatttcgcaccggtgcttatcggaccaagcaattagtgcgcaaggatgacggaacagccgcagtggaagaagtcccaggaacgttagaccagatggaaggagtgctcagtttcattgatagcgtgaaacgatacaagcggccagctgatcgagatcacaagcttacaggcagcgaacagacctacagaaagttcctggtgtacaggtatttctacgcaccatcaatgccagtgatcctgtgtgagggcaaaacggacaatatttacctccgctgcgctattcaggcctttgctgacgactaccctggactcgccgaaaaacaggggtccgcagccactctcaaggtcaggctgttcaattactctgagcacaccaaacggctgctcggtatcgcgggtggaagtgggcacttcaataaccttatacgcgattatcggaaaaacttgaagccctttaccgcacctcacgctgaaaggttccccgtcattctgctggtcgataacgattccggcgccgacgggatatataaggtcgtgaaggctacaacaaagacggcctgcgatggcaaggagtccttttattacgtgggcgataacctttatgtggtaccgaccccccttggaccatcggatgcccagactatgattgaggatttcctgcccgccaaatggcgcgctgagaaactcggcggcaagacccttaacctggggaaggactgcgacattacaaaagagtacgggaaggccctattcgcagagcacgtgattaagaggaatcggaaggacgtggactttactgcaatgagggttatactggacaggatcgtcaccgttatcgacgattacgctgccatgatgggagcaggaccgtga

SEQ ID NO: 8227 - RNA, 1719 nt, synthetic construct
  source 1..1719: mol_type = other RNA
atggtgggcggcaacgtgaagaggatcgaccagctgaggctaacgaattgcctcgccgacgtagcagagctgctcggttttcaacccaaactatttgcatgggtgatttataagcagccttacaagtatgcaacttttgaaatccccaagtcccgaggcggtgtgagactcatcaaggctcctgaagaccggctcaaaaatgtccagtcaagactcgcgaagttgctacaagactgtatctccgacattaatgaaaaacgcgaacaaaccgaaaagcttagccacggtttccggaggggctacagtattataacaaatgcctatcagcataggagtcgacgatttgtcctcaacgtggatctgacggacttcttcggaagtatcaactttgggagagtccgtgggttcctgatgaccaacaagcacttcgccctgcaggagaggacggccaccgtcattgcacacatcgtgtgtgatgacaactccctaccccaaggagcaccgacatctccagtcgtgtccaacctgatcgcccatattctggacgtgcggctggctaaactggccagaaaatacggcctgcactacactaggtatgcagacgatctcacgttctctacaaacagtcgttccttcagcaccgaagtagcaaccccagatgctgctggacactgggttgccgggaaagcactggagaaagttataaccagagctggcttctcacttaataccagcaagactcggatgcagttgcagcaatcccgccaggatgttacaggcattatcgtcaacaagaaggtaaacattcggagcgaatattaccgggaagctcgggctaagtgccatcaccttttttgtacaggtacttacctcaccaaaaaagttgtccgcaaggaggatggaacctctgccgtagagtctgtgataggtacacttgaccagctggagggtattttgagctttattgattctgtgaaacgctttaagatgacttttgaccgagaatacaagctgactgggccagagcgcttataccgtaatttcctgtactacagacatttctatgcgccccccttaccgatgattctttgcgaaggcaaaaccgacaatatctacttacggtgcgcgatccagaagtttgcctccgattatggacagcttgcccaggaggagggcgatgccatcaagctgagagtcagactgttcaactactctgaccatactaaaaggctcatgagcttggggggcggaaccggacagataaaggatctgctcagcaactattgcaagataatgaaacccttcttgtcgatgggggagaggaatcctgtgatcgtgctgatcgataatgattctggagcgaagtcaattttcagctggatttcaagtactaccggccgacgctgtgatggaaaggaatcattttactacctcggcgagaatttgtacttagttcctacacctcggaccgacgaggatggggatacaatgattgaagacttcctgccactgaaatggagggaggagaaacttgggggaaaaacacttaatttggggtcgaacatcaacagagacaaagagtatggcaaggccctgttcgccgagtatgttatcaagaagaatcgcaaagatgtggactttgtccagatgaagctggtgctggaccgcatcgtggctgtgataaacgactatgctgccatgatggctacttccacatga

SEQ ID NO: 8228 - RNA, 1707 nt, synthetic construct
  source 1..1707: mol_type = other RNA
atgaaacggattgacgaccttaagatggctactagcctcaccgatgtcgccttgttactgggtttccatcccaaagcattcgcctgggtcatatacaagcagcagcctcggtatacggtattcgaaatccctaaatctaggggcggtacccgcacgattaaagcacccgagcccaagctgaagaacgttcaggctcgtctcgcagagcttctccaggattgtattgccgacataaatgaggcacgatcacagaaggaaaaactctcgcacgggtttagacgaggacactctattatcactaacgcctaccaacaccgcagcagaaggtttgtcctcaacgtggatctagccgacttcttcggcaccatcaacttcggccgcgtgagagggtttcttatgaccaacaagcatttcgctctgcacgagcgggtggccacagtgcttgctcacatcgtttgttatgagaattccttgcctcagggagccccaactagtccagtggtgtccaaccttattgcacatattttggatgtgcggctggccaaattagccaggcggtttgggctgcattacacacgatacgcggacgacctgacatttagtactaacggcagaacctttcctgaggaggttgccgccatcgacgccgatggacaatggatagccggccccacacttaagggagctattcagagagctggctttgagctcaatccagtgaagacaagaatgcagttacggcagtcccggcaagatgtcactggtttgattgtgaacgaaaaagtcaatatccggagcgagtattaccgcgatactagggccaaatgccatcgcctgtttaagaccggaaagtatcaaatcaagcagacaatcaggaaggatgacggctcaaccatcgtcgaagacgctgacggcgcactggatcagatggagggcgtactgtcattcattgatagcgtgaaacgccacaagcaggttgtcgagagggatcacaagctgtctggagtcgagcagatttaccgcgcgtttctactatataggcatttctacgcgccctcaatgccgacaatcctgtgtgaagggaagactgacaatatttatgtgcgttgcgccatccaagcattcgctgatgattatgccaagctcgcagataagaaaggcgaagctgtttccgtgaaagtgaaactgtttaattacagtgaccacacgaagcgattgctgggaatagctggtggtagcgggcacttcaataatctcatcaaagactaccgaaagaacctcaaaccttttacggccccatatgcggagaggttccctgtcatcttgctgattgacaatgatgcaggcgccgacggcatatataaggttgttagagctatcaccaaagggacttgcgacgggaaggacccgttctacttcattggagataacctctacgtagtgcccacaccactgacagacacaggggctgcgaccatgattgaagatttcttaccaagcaaatggagggacgaaaaactgggaggcaaaaccctgaatctgggaaaagacatcgatatcaccaaggaatacggtaagtctctgtttgccgagtatgtaataaagaagaaccgtaagatagtggaatttgacgcaatgagagccatcctggacagaatcgtgaccgtgatcgatgactacgctgctatgatggcagcagggtcctga

SEQ ID NO: 8229 - RNA, 1257 nt, synthetic construct
  source 1..1257: mol_type = other RNA
atgaagcgcattgacgagctaaaactcgctacgagcttgagtgatgtcgctttactgttagggtttcagcccaagccatttgcttgggtgatctataagcagccagctaaatattctgtcttcgaaatccccaaatcccggggcgggatgagagtgatcaaggccccagagccgaagctgaaagccgtgcaagcgagactcgctgaactcttgcaggattgtattgcagacattaatgaggctcgtagccagacagagaaactcagccacggcttcaggagggggcattccatcattacaaacgcataccagcatcgcagccgccgattcgtgtttaacgtggatctggccgatttctttggcaccattaacttcggcagagtcagggggtttctgatgaccaacaagcacttcgcactgcatgagcgtgcagccacagtcctggctcacatcgtttgtgacgacaattccctccctcaaggagcccctacatcccctgtggttagcaacctgatagcgcatatccttgacgtgcgactggcaaaattgtcacggcgcttcggtctttattacacaagatacgccgacgacctgaccttctctactaattctcggacttttgcgcccgagatcgccattaatgatggagccggaggatgggcagcaggaccagcattaattaaagccattcagaggagcggatttgcccttaatccgaaaaagacgagaatgcagctgaggcagtctcggcaggacgttactggtctggtagtgaacgaaaaggttaatatcaggagtgagtattacagggatgcccgtgctaaatgcgatagactcttcaagaccggtaagtatcaaacaaagcaccttttgcgcaaagaggacgggacttttgctatagaagaactcgacggcaccctagatcagctggaaggcaccctgtccttcatagactcagtcaagagacataagcagaccatcggcagggatcacaagagatctggggctgaacggctgtaccgatcgtttttgctttaccaccacttttatgcctcacaaatgcctgtaatcctctgcgagggcaagaccgacaacatctacgtccggtgtgccgtacaagcattcgtggctgattacgccaaatggccctggcgacgcaaaatgggcctgaatagtcggtatggttgcagcactatacagaccactcagtcagcgtgcagtgtgtccctggccgatcaggtgacactaatggcctga

SEQ ID NO: 8230 - RNA, 1689 nt, synthetic construct
  source 1..1689: mol_type = other RNA
atggcctatattctcggcgtcacacctaagggattagcatatactattcgtattcaacctctggctaataggtattcttctttcacgattcccaaaaagaccggagggagccgtaatatcgatgcacccgaggtcggtctaaaactggttcagtccagactcgccgatgtacttcaggattgtattagtgacatcgacaaagaaaggggatatccagagaaaataagccatggcttccggcgcggccattccataatcaccaacgccaggaatcactcgaatagacgattcgttttgaatgtagacattgctgacttcttccagaccatcaactttgggcgggtcttaggttactttctcaaaaatcgcgacttctgtcttgacaaaaacgcagccgtcactttggctcagattgcttgtcacaataatggtctgccacaaggcgcaccatcttcccccgtaatcagtaatcttatcacacatatcctggatattagattagctaagatcgccaagaattacggttgctactacacccggtatgcagacgatttgactttttcgaccaatctgcgcgatttccctgagaaacttgcgcggctcgattcagtgagtggcaaatggatcgtcggacgcagcttggaaaaggccatcacccagtccgggttcgcactaaacgcgagcaagactagagtgcaactgaaacagagtaggcaggacgtgactggaatcgtggtgaatgacggtgtgaatgtgaggagagagtattacaaaaatgcacgggcttactgcgccgaactgtttaagacagggaagttctatataaacgttaaggatatcgacgaaaacgggcaggtgagcctcaagaagatcgatgggacgagacagcagctgaagggcattctgtcatttatcgaccaggtgaaatcacaccgacccaaaattacactcgagaaaacaactcctgatcgcaagggggtgaaaggatttaacctgctgtacaagcgattcttctactttgatgctttttttgccaacgacaaacctatgatcctgtgcgaaggcaagacagacaacatctatattcaatccgcggtcgcagccatgttcaacaaatttccaacactaagcggtgagaaaaacggaaaggccgactttaagttcaagctgtttaactacaccaaaacttcccttaagatcatcggcattgggggaggcaccgggcaactgaatgccttcatctccaactataagtctaacgtaggagactttaagtacaagggagaaaagcaccccgtgataatcgtgatagacaatgactcaggcagcagttcaatttataagaccatgaagaccatcctgaacatcgatgtgaaaggcgataagccgttttacttcatgggggagaatctctacattgtgccaacgccaaggggtgttaacggcgaggagactatgatagaatctttcctcccccagaaatggatcgattacaagctgaacggcaagaaattcaacatgaacaataagggccttgataccaaagccgaaattgggaaagctctgtttgccgagtacgttgttaaaaagttcaagaaggacatttcctttgataacttctctccgctcttggacaatataacaagcgccataaacgattattacgccatggtcgctattaaaccttga

SEQ ID NO: 8231 - RNA, 1344 nt, synthetic construct
  source 1..1344: mol_type = other RNA
atgctgatcgccaaagaatgccagcctgccgcttatttcagcctccagcacggagtgatgaaccgcctagcgttgctgaggtctgccaagacgatcaacgatcttgctgacttacttggagtcaagcactccgggctgtctttcatactctacaagaagcccactgagacgaagtaccagtccttcactgtgccaaaaaaagccggcggagtaagagcgatccacgcaccaacaagtgagcttaagctgttccagcgtaggctggccgacctgctccaagagtgcctgaacgaaattgaggcaaccttcagaaaaacaagcgaggatcgacggcccgagaaaatcagtcacggctttcatcctggcagaagtatcataacaaacgccatccagcaccgtcgtcgaaggtatgtcctgaacgtggacttgaaagactttttcggaacctgtaattttgggcgcgtacgggggttgctcattaagaacgaacatttcctgctccacgacagggttgccactgtcatcgcacacctggcatgtcatgaaggggctcttcctcaaggcgcccccagtagccccgtcatttctaatctgataggtcgggtcctggatatcaggctggtgaaattagctaattcagtcgggtgctcttacagccggtatgcagacgatctgaccttcagcacaaatgacagacagtttccaccgcagctcgctgctgagattcctccatcctcaggtagatgggaaccaggtccggccctccttggggaaattgcatcgtccggattttccctgaatccaaaaaaaactcggatgcagttacatgaaagtcgacagatggtgaccggcctcgttgtgaatacgagagtgaacgtgtctagcgattatcgccacttgattcgggccatggttcaccgcctactgactaagggagagtacgaaatatcaaccgcagctggaccgatcaagggtaccaccgagcaactgcagggcatgctttcctttattgattccatcgacgaatttaataggaagagatttaaggagagggatgtgcccttccctcgccagcgcgatgaaaccttccgcgatttcgttttttatcgacatgtttaccaagcgtcccggcccactctgatctgtgagggcaagacagataacgtgtacctgacccatgctattagagccatggccaaattgtttcctgacctcgcgtctcccggcttctaccctgtatccgcagacacatcaaaaaaggccgaggacgggcataaggagtgcctatgtaggagcgagggctctacagctctttcatcgagcgtggtgttgtggagccggtga

SEQ ID NO: 8232 - RNA, 1800 nt, synthetic construct
  source 1..1800: mol_type = other RNA
atgtcagagctgtatcagctgcaaaaagctacatctctgcacgatctcgccgccatcctgaactacacacctagcgctctgagttatcttgtctacaagaggccgggcaagtatacgaagttcacgatacctaagtccaatgggtcccctagacagatctgcgctccttgtgacgaactgaaggctcttcagaaacaggttaaaactctgctcgacaaatgtcttgcgaccatcgaatccacagggaaagcacgtggtgccatttctcacggtttcaaggccggtcactcaattatcaccaatgccgagacacacaagaagcggcggtacgtgttcaacgtggatctcgaaggattttttgattctattcacatgggcagaattagggggtttcttatcaacaataaggacttccagttgaatccaaaggtggctactgtgctggcacagatcatgtgtcatgatgataagctcccacaaggaagccccacttcccccgtggcgtctaacttgatcggccatcttcttgatctgagactcgtgcaactggccaagcgtaatggctgcagttatagcaggtatgccgacgacttaaccttctccacaaacaagaaaaatttccccgaagagatagcaagctcagatgaaggcggtaattcatgggcagcagggcctagcctgactaaaattattcagaagtctggtttcgaactcaatcatagtaagacccggatgcagtaccgcaccaaccgccaatccgtcacaggactcgtggttaaccaggtcacgaacaccccagccgaggttagaaggacagcccgagcaatggccttccacttgttcaacaagggatactatttgattaagaacgaggtcgtaggcgaggagaaagcgacagctccgatgatccgggactatacacagctggcctcgctcgatggattattcagctttatatacatggtggatcaattcaatcgcaagaagctggtgaaaaattccaccgttaagatcgagagcattaagaagacagctctggagatcattcatggcgacttcctattctacaaaaacttctatgctagtcccacccccactatcatgtgtgagggaaaaaccgacaacatttacctagcttgcgcaatgaagtccctgatggaaaggtttccaagactttgcaaacccaataaagatggcaaaccggctctgcgcgttcgctttatcaactactcagaactcacacaccgggcgctagggttgaatggcggcagtgcggacttggcagcatttatcagatcatacgctaaaaactgcgggaaatataaagcccaccctcccctgagccctactataatagtcgtggacaatgactcaggatctgacccaatctttaaggccatcaaggatgtaaccgggaaccgatatgtaatagctaatgggaagggaactattctcgataaaagtcaaaccacgtactacattgcccagaatctggccgtcgtgttgactccactgaagaaggacggcaaacctaccatgatggaggacttttttccagcaaaagtgctgcagaccccttggaacaacaagacgtttgaaattttaaccaagtctcccaacaagaatacttacagcaagaacactttcgcccagaaaattgtcaaagccgatcgggcaaacatcgagtttaagggtttttcgccaatactaaagagtatctcccagatcattcgatgttatcatgtggacaaatccttaatcgacaaatctctgaggcccaaaagcatcaatgcccagtga

SEQ ID NO: 8233 - RNA, 1797 nt, synthetic construct
  source 1..1797: mol_type = other RNA
atgagtgaactccatcagctgcgaaaagctacttcgcttcacgacctggctgctattttaaattacacaccttcagctcttagttatctagtatataagaggccggcaaaatacacccagttttcaattccaaaatcaaacggttctactcggcaaatatgcgctccctgcgacgaactcaaggcactgcagagaagggtgaagatactgttggatgagtgtctagccaccatcgagaattcatccttggcgcggggagccataagccatggttttaagcaggggcactcgattatcaccaatgccgaaactcacaagaagagacgctatgtttttaacgtagatcttaagggcttttttgacagcatccacatgggacgtgtaaggggctacctcatctccaacaatgatttcaaattgaatccaaacgtggctactgtcatggcgcagattatgtgtcatgataataaactgccacagggtagccctacaagtcctgtggtttccaatcttataggccaccttctcgacttacgcctggtgcagctggcaaagagaaacggatgctcatacagccgttatgccgatgacctcaccttttccacaaacaagaaaacattcccaaaggaaatcgcattgtctgatgagaacgataattcttgggcagccggtccagcgctcacgaaagtgattcaaaagagcggcttcgaactgaaccatgataaaacccggatgcaatatcgcaccaatcgccaatccgtcaccgggttagtcgtcaaccagataactaacactccagctgaagtgcgccggactgccagggcaatggcattccatctgttcaataagggacactacctcattaagggcgaggccacaggggcggagaaagctaaagccttggaggtgaaagactatacgcagctagcatctctggatggcctcttctccttcatctacatggttaacaacttcaacagaaaaaagatcgtggagaattctagcatcaagatcgaatcctttaagaagacatccctggaaatgatacacggcgacttcctcttctataagaacttctacgcttcacccctgcctacaataatgtgtgagggaaagaccgacaacatttacctgacctgtgccatgaaatctctgattgataaattcccccagctctgcaaattgaataaagatgggaagcctgctctgaaagttaggttcatcaattactccgagctaactcaccgagtgttagacctgaacggcggaagtgctgaccttgccgcctttattaggacgtatgcaaagaattgcggcaagtacaaggcccaccccccactgaaccccacaatcatcgtggtggacaatgacagtgggtccgatccgatttttaaagccattaaggacgtgaccgggaaccggtactctatccccaatggtaagggcgccatcctcgataaaaccaagacaacatactatatcgctcagaatctttctgtcgtcctgacccctctgagaaaagacggacaacctacgatgatggaagatttttttcccgccaatgtgctgaaggccgtgtgggacaacaagactttcgagattctgagtaagagccctagcaagaacacatacaacaaaaataccttcgcccagagaatcgttaaggcggaccggcctaatatcgagtttaaacgttttgcacccattctgcgaagcattagcgaggttatcgaggggtatcatgtcgagaaaagcgtaatcgaacagaacttgcccccaaagccggccaaaccctga

SEQ ID NO: 8234 - RNA, 1791 nt, synthetic construct
  source 1..1791: mol_type = other RNA
atgagcaagctacaccagctccagaaggccacttctctccacgatctcgccgccatcctgaattacaccccctccgcactgtcatatcttgtgtacaagcggcctggcaagtatacacagtttagtattccgaagtccaatggctctccaaggttgattagcgccccttgtgacgagttgaaagccttgcagaagcaagttaaggtcctgctagacgaatgccttgctacaattgagaaggttggagctgaacgaggggccatctcccacggattcaaagatggctattcaattgtcacaaacgccgaggtgcacaaaaaacgcagattcgtgttcaatgtagacctgcagggattttttgactctatccatggcggacgcgtacgtgggttcctgatatctaacaaggacttcaagctccatcctaaagtagccaccgtgcttgcacagataatgtgtcatgacgacaaacttcctcaagggtcgccaacttcccccgtggcctccaatctgataggacacctgctggacttacggctggttcaactgagtaagaagaatgggtgcagctactcgcgttacgccgatgatctaactttctcgaccaacaaaaagattttcccagctgagattgccagcagcgataacggctccaatccatgggtggcaggaccagcgctcgcgaaaatcattaagaagtcaggtttcaaactgaaccatgataagactcgcatgcagtacaggactaatcggcaaagcgtcaccggattgaccgtcaaccagatcaccaatacacccgtggaggtccgcagaactgtgcgcgcaatggctcactgtctctttaacaatggcttttactttgtgaaggataaggccagtgtgagtgacaagaaaaacaaacccgaaatcaaggatcacacacaattggagaagatcgacggctatttttcttacatctacatggtcgatcagttcaatcggaagaaaatagttgataactcatccgtgaagatcgaaagcataaagaaggctgctctcgagaagattcacggtgattttctcttctacaaaaacttctacgcatcatcacagcccacgattctgtgcgagggcaaaacagacaatgtgtatctgacttgtgcaatgaaaagtctcatggacagatttcccagactttgcaaaccaaataaggacggcaatcctgcactgagggtaaggtttatcaactattctgaattaacccatcgagtccttgacctcaacgggggatcagctgatttagcggcttttattcggttctatgccaaaaactgcgctaaatacaaagcccacccgcctttacatcctacgatcattgtggtggataatgactctggtagtgacccaatctttaaagcaatcaaagaatctacaggctccagatacagcattgccaacggtaaaggtaccgtgctggataagagccagacaatatactatatcgctcagaacctgtatgttgttctgacccccttgaagggggggcagcctactatgatggaggacttttttcccagctccacgcttcagaaagtgtgggaggggaaaaccttcgaagttttgtccaaacccagcaagaccacatataacaagaatacgttcgctcaacgaatcgtgaaagccaatcggaccgatatcgaattcaagaggttcgcaccagtcctgaggtctattagtgaggcgattaaggactatccgagaatcaaaaagtccgtcatcgagcagaacctggcactgaagagcaaggcctga

SEQ ID NO: 8235 - RNA, 1764 nt, synthetic construct
  source 1..1764: mol_type = other RNA
atgtccactctgcacaagctccagcaggcctcatctctccatgatctcgctgccatcctaaattattctccctccagccttgcttacttgatctacaagaaaccagtgaaatacaaacagtttgagattccgaagtctaatgggtcacctagagtgatcaacgcgccttgcgacgagctgaaggccctgcagagaaaaatcaagctcctgctcgacaaatgtcttgatgccatagaacaggctcaaggcgtgcgtggtagcattagtcacggtttccggcggggtcactctatcgtgagcaacgctgacgttcataagcgcagaacgtacgtctttaacgtggaccttgaggggttctttgacagtatccacatcggaaggatccgcggctttcttattaccaacaatgattttcgcctccatcctaatgtagcaactgttctggcgcaaattatttgtcacgatgataagctgccccagggctctccaacctccccgttagcgtccaacctgatcggccatttgctggatctgcgattaatacagctcgcaaagaagacgggctgctcatactctcgttacgcagacgatttaaccttcagttccaataaatctgagtttccagccgaggtgagctacaagatcgatgatgggcacacctggattcccggctcctcacttctaaaggttatatataagtgcggctttaaactcaatcacaataaaaccaggatgcagtatgctcgcggcaggcagagcgttactggattgactgtgaatcaaactcccaacacaagtgctgaattgaggagggccgtccgggcaatgacccatagcctgttcctagatggacagtaccatactataaaacagccaggggacaacgatgactcagagaagattaccaagtcttacacccaactggctcccctggaaggatatttctcatatatctacatggtggacaacttcaacaggaaaaagatcattgagaactcctctactaagatggaaaacatcccaaaaacagcgctagaaaatttgcacggagactttctgttttatcgatacttctatgccaatagcaagcctaccatagtgtgcgagggcaaaacagacaacatctatctcacatgtgcaatcaagtccttaatggggagtttccctagactgtgcaaatccaacaaagaaggtaaggcaaacctgaaagtccgcttcattaattacagcgaattgacgcaccgcatgctggggctgaatggtggctccgccgatctggccgccttaataagagcctatgctaagaaatgtgccccctacaaagcacaccctccccttcatcctacaatcattgtggtcgataatgacgccggaagcgacccaatttttcgagccataaaggacacaacagggaatcgttacgctattcctaaagggaagggcacggtactcgaccagtcgaagaccctgtattatattgctcagaatctgtacgtcgtgcttacccccctgaagaaggacgggggaccaacaatgatggagaattttttcacaaccaaactcttggccagtcggtgggagggaaaagagttcgaagtcttcaacaagaactcgccgagcggcacctatagcaaacagatttttgcacaacggatcgtgaagagtgatcaggccaacattgacttccggaagttcaagccaattctgtcatcgatcactgaggcaatcagacattaccccgctatcaaagtacctaaaaagtga

SEQ ID NO: 8236 - RNA, 1755 nt, synthetic construct
  source 1..1755: mol_type = other RNA
atgcccactctgaaaaaacttaagagtctgacatccctccatgatctcgccgcaatgctgaactacaccccaacagccctgtcctacttggtctataagcggacgggaaaatataccagcttccagataccaaaatcaaacggctctccgcgagaaattttagccccctgcgatgagctaaaagccctgcagaggaaggttaagtctctcttggatgactgtctggattccatagaaaaatcaaagcctctgatcggctctctgtcccacggattcaagagcgggcattctattatctctaacgcagaaccacacaccaaaagattgtacgtatttaacgtggacatcaagggattctttgacgcaattcacatggggagagtgagggggttcctaattaccaatagagacttctcgctgaatcccaaaatagctacagtcctcgcgcagattatatgtcacgacgataaactaccacagggatcccccacctcaccagtggcttccaatttaatcgggcacctgattgatattcgcttggtgcagctcgctaagcgttcaggctgtacttactcccgttacgctgacgatattacattctccacaaataagagcgagttccctgcacccatcgcgtatagaatggatgatacccatagctggattcctggggactctttgctgaaaattattcaccgatgcggatttgagttgaatcacgacaagactagaatgcagtatgcacgggagagacaatccgtaacggggcttaccgtcaacaagacctcaagtgcccctgccgagtttcgaagaaccatccgggctatgacacacaaactttttatggacggtgactatttcatccccgatgaaccaaagcatcagtcgagcagtcgggtggagcttaattacactcaactgaaccggctcgagggaatgcacagttatctgcatatgatcagcaggttccaccgacaaaaaatcgtcgataataccgtgaggcgtcccgaagatatcccactcacggccatggagaagatgcatggcgacttccttttctacaagtatttttacgcctccgagctgcctactatagtgtgtgaggggaagacagacaacgtttacctgacttgcgctattaagagccttcatgccaaatacccccgcctagccaaacctgactctaagggcgttatgaggcttaggattcggtttctcaactattcaaacctgactcaccgggtcatgggcctgaatggtggctctgctgatttgggccacctcattcgcaggtacgcgaaacagtgcgcacgctataaggggcatccgcccttaaagccaactatcatagtcgtggacaatgattctggaagccaacccatcttccaagctatccgcgacacaacaggtgacaggtacctgacacctagtggtaagggcaagaccttcgacaagagcaaaacggtgtattacatcgcccagaatctgtacgttgtcttaactcctctcatcaaaggtggcgatagtatgatggaaaacttttttcctccggccgtgctcaataccatctacaacggaaagaaattcgaagtggtgcacaaaggtccgaaaggctccgcatacagcaaacatcagtttgctcagtatgtggtaaagccaaaccagaagaagattgtttttagccgctttagctcgatcctgaagtcaatcaacagtgccataaaagactatcccctgatcaagatcaccccttga

SEQ ID NO: 8237 - RNA, 1743 nt, synthetic construct
  source 1..1743: mol_type = other RNA
atgtccacgctgcacagactgcagaaggccgccaccctgcacgacttagcaattatctttaactatactccggcgtccctggcttacctgatctacaagaagaccaataagtataccgaattcgacatccctaagagcaatgggagcaaaagacgaataatggccccctgcgatgaattgaaaacactgcagcggaaaattaagaaggcacttgacgaatgtctcgagtctattgagaaaaaggcacctagccctggccctatatcacacggattcaagaagggacattcaattgcttctaacgctgacccccataaaaaacgcttgtacgtgttcaacattgatatccaggatttcttcggcacaattcatatgggcaggatcagaggcttcctgataagtaaccgggaatttaatttccacccaaagatagcaactataatcgcccagatcatctgccacgacaataaacttccccaagggtcccccacttcacctatcgccagcaacctgatcggccacctgatcgacctgaggctggtacagctcgcgaagaagacgggatgtacatacagtcgctatgcagacgacctcactttttcgactaacaaaccaaagtttccgaaggaaatcgcctatcgtctcgaggagacacaaagctggattcctggaactccactgttaaagatcatgcataaatcgggtttctctctcaaccacgagaaaacgagaatgcaatacgcctgttcccagcaggccgtgacaggcctcgtcgtgaaccagaaggctaacaccccagccatctttagaaggaatgtgagggctatgactcacaagctgtttctggacggggactacttcatccatgagaatcataaaaccaaagaaaagaaggagctcacttataagaacctgaatcagctcgagggaatgttttcatacatctacatgattgatcgcttcaaccgcgagaagatcgttaataattccaataagaggcacgaggactttcccaagaccgccattgagcggctgcatggcgattttctattttaccggtatttctatgcctctccccagccgacaatcatctgtgaaggcaaaacagataacgtgtatctaacatgcgcaattaaggctcttcacgttaatttccctcgacttgctaaaaccgaccccgagggaaaacttaagctgcgagtgcgctttctcaaatacagtaatctaacccaccatgttatggggttgtctggaggaactcccgacattggtcatttcattaggaattacgcgaagcagtgcgccaagtataaggcacatccccctttgcacccaaccattatcgtcgtcgataacgataaagggtctgatacaatattcaaggctattaaagacgtcactgggaccacctatagcatcccagcgggtaaaggcaccaccttagataaaagcaaaaccctgtacaagattgcacaaaatctttacgtggtcttgacaccactctccggtgggaacgacacaatgatggaagatttctttcaccggagtgtattatccatgccatacgaggggaagaactttgaagtgtttagaaaaggtccgccaggcaccacatacaataagaacacgtttgctctacacatcgtgaaagccaatcagaaaacgataaacttcagcaaattctcacccattctgaaaagtatcaacctggccatacgtgattatcctaagattaagttgtga

SEQ ID NO: 8238 - RNA, 1731 nt, synthetic construct
  source 1..1731: mol_type = other RNA
atgccccgattaagagcactacagaaagccacaaccctgcacgatctagcggtgatactcaattactccccgactgcacttgcctaccttttatacaaaaagacgggcaagtacagcagattccagattcctaagaaaaatggcaccccacgtgaaattctggccccctgcgacgaactgaaaagtttgcagcgcaagctaaaaaaactgttggacgaatgtcttgagagcatagagaagaaacggtcccctttggggagtttgagccatggatttaaggccaatcactctatcatcacaaatgccgagccgcatagaaagcggctttacgtctttaatgtggacataaaagggttctttgattcaatacacatggggcggatcagaggcttcttcatttctaacaaggatttcaacctcaataccaagactgccacgatcctggctcagattatctgtcacgacgataagctcccacaagggtccccagctagtccagtggcctcaaatctgattggccacctgatcgatatccgtatggtccaactcgctaaacggctgggttgcacatattccaggtacgcagacgatataactttctctacaaacaagagcgagtttcctccggaaattgcttacaggctggaaaattcacatgattggatacctggcggagcgctcctgaaggtgatttataaatccggtttcggattaaaccacgaaaaaacccgcatgcagtatgcccgcgcacaacaaactgtaacagggttggtagtcaaccagagcaccaataccccggctgagtttaggagaaaggttagggccatgacccacaaactgttcatggacggcgagtattatgtgcatgaagagaacggcccccggtccccaaagaagaccgagcttaatcactccaagctgaacaagctggagggcatgtacagttacatctatatgactgactgtttcaacaggaaaaagattatcgagaacagcaacagacgccacgaggattttcccctgtcatcactggaaaagctccatggcgacttccttttttataagaacttttacgcctctccagcacccactataatctgcgagggaaaaacagacaatatttatttgacctgtgccatcaaatcgttacacgaaaagtttcctcgcctcgctaagcctgacgcatctgggaaggtgaagcttaaagtgcgattcatcaattacagtgagctgacccatagggtcatgggcctcaatggcgggtcatcagacctgggtcatctgattaggcgatacgctaagcaatgcggaagctataaagcgcaccccccattgaatcccactatcatcgttgtagataacgacagtggttcccagcctattttccaggccatcaaggacgttacgggcgatcggtacagcattccatctgggaagggaaaaatcttcgataagtcccagacactctataaagtggctcagaatctgtacgtggttctgacacctctcctgaacggtaaagactctatgatggaggatttttttccccccgctgtgctacgtgcgacatataacgggaaaagttttgaagccgtctctccaggacctaagggaactacctactcgaaacaccagttcagccagcatgtcgtgaagcccaaccagaagatcattaacttttcccgcttcagccatattctgaaaagcatcaacctcgcaatcagagactga

SEQ ID NO: 8239 - RNA, 1308 nt, synthetic construct
  source 1..1308: mol_type = other RNA
atgtgtcatgacaatgcactgccacaagggtcccctaccagtccattcgcctcaaatctgattggccacctcatagatattaggatggtggccctcgcagccaagaatggatgcacttacagccgttatgcagacgacatcacattcagcacaagcaagaaaaacttccccacccaaattgcttattgcatcgatgagtcgaacacatggatccctggaagtgcagtgcttaagattatctctaaatgtgggttctctctgaaccatgataagaccagaatgcagtataccagctctcagcagtccgttaccgggttggtggtaaataaaatcgcgcacactcctgctgattacagaaggacagtccgggccatgctccaccggcttttcctggatggtacgtactttactatcaagaagcccaaacatctgaataagaccgaaagaatcaccatcccgttcgggcagttaaacaagctggagggtatgctctcatacatatacatggtggatcgctataatcgcgagaagatagtgaacaacagtaagacgaaacatgaagaaatgctgatgacctcaatcgaaaagatgcacggggatttcctgttttataagtacttttacgccggggacacccccacaattgtttgcgaaggcaaaacagataacgtctacctgacctgtgctatgaaatccctgtttgctaaatatccagagctcgtctctgtggacaaggatggcaaaagaattcttaagtccaggttcattaactacagtgagttgactcaccgaatgctgaacatgtttggtggctcagcagacattgcccaattcatccggttctacgctcgccgttgcaagaagtataaagctcatcccccactacaccccactatcgtagtggtggataacgacactggatctaaggagatctttggtgcaatcaaagacacaacgggcggccgatatataattggagctgggaaggcgcaggccctagacaaaagccggaccctgtactatattgcacagaatctctacgtcgtgctgacacccttgaatgccggcaaagacaccatgatggaggactttttccctactactgttctcacaatgcctcataaaggaaggtctttcgagatattaaagggcgtcaaaccaggaaacacgtattccaaacacatttttgctcagcacatcatcaaggccaatcagaagtccattgattttagcggctttagccctatattggactcgatgaaagccgcccttctggactacccaaagatcaagttaattccggcgtga

SEQ ID NO: 8240 - RNA, 1752 nt, synthetic construct
  source 1..1752: mol_type = other RNA
atgagcgaactgagaaagttacaaaaggcagctacactccacgatctggctgtcatcttgaattacgagcctaagtttctcgcttacctcatctataagaagaccaacaaatatagccagtttaccattccaaagagcagcggtgcccccaggaacatttccgccccttgcgatgaactgaaggcactgcagcgaaaggtgaaagtgctgctggatagttgcttagagacaattgcattgcaggtgccaaatctcgctaccctttcccacgggttcaaaaaggaccattccatcattactaatgccgacaaacatcgcaaaaagctctatgtcttgaatatcgatatccaggactttttcgggagtattcacgtcgggcggcttcgcggattcttcataaccaatcgatcatttagcctgcagccaaaaatcgccacaatcctgtctcagatcatgtgtcatgaggataaactacctcagggctctcccaccagccctgtagcgagcaacttaatagggcatttgctagacgttcgtatggtttcactggcctctaaaaacgggtgcgtgtatagtagatacgcagatgacatcaccttctctactaacaaactgaaattcccacagtctattgcgtacaagatcgatgacacgcacgattggataccgggatcagacctgctgaagatcatcagtaaatccggctttggactgaaccacaataaaactagaatgcagtacaaccgtgcacagcagacggtaactggccttatagtgaattcgatcacccatactcctgccaattttaggcggacggtgcgggctatggctcataaactattcctcgatggcgattactatgtgcaagaaaagcccaagcaccttaagaaggaaaagattagtatccctcgcggccagcttaagaaactcgagggaatgttctcgtacatctatatggtggataatttcaaccgggccaaaattgtctctaactcaagcaaaaagcaagaagagttttcactaagaagcatagagaggatccacggcgactttctgttttacaaaaacttctacggcgcttccgctcccacaattatctgtgaggggaaaacagacaatgtttatttgacttgtgccatcaaatcactgcacgcgaaattccccgagctcgcctccctcacaaaagaaggcaagaccaggctgaatctccggttcattaattactccaaccttacccatcgagttctgggactgaacggtgggtctgccgacattgggctttttattagaaattacgctcgccaatgcggcaagtataaagcccaccccccgctgaatcctactatagtgatagtcgacaacgactcaggatccaagccaatttttagtgcaatcaaggatgtgaccggtagcacatacgcgatcccgaagggtaagggcaccgtcctggacacctccaagaccctctataagattgcccaaaacctgtatgttattttgacacccaaaatcggtggcaaggatagtatgatggaacatttctttcctgccgccacccttgcaactcagtacaagggaaagacgttcgaggtggtaaggtccggacccccatctacaacttacagcaaacacgtgtttgcccagaatatcatcaaggctaaccagaaaaacatagacttctcggggttcgaggcaatattgggctctattaagttagccctggacgactatcccaagattattacaccatga

SEQ ID NO: 8241 - RNA, 1743 nt, synthetic construct
  source 1..1743: mol_type = other RNA
atgctgagcctgtacgccctgcagaaagcaaaagacttgcacgacgtggctagtatcctcggatatgagccaaagttcctcagctatattgtctacaagaagaacccaaaatacacctactttacgatacctaaatcaaccggagctccacgcaatatcgctgccccctgtgacgaactgaagactctccagaagaaggtgaaacagctgctggaaaactgcctagtatctattcaactacagggaaccgcccaaggctctctcgcacatggattcaagaagggccactcaattatcaccaacgcagagccccataagagacgacgatttgtgttcaacatcgacatctctaatttctttggttccattcatgttggaaggatccgaggcttcttgattagtaacaactcctttaagctcgaacccaaagtagccactatccttgcccaaatcatgtgtcataacgacgcactaccccagggagctccaacatctcctatcgcatcaaacctgatcggacaccttatcgatatccggttagtgaacctggccgcgaagtatgggtgcatctattcacgctacgccgatgatattacattttcgacaaataagcgcgaatttcccgaacagatcgccagtaatatagaaaaggatgagtggattcccggcacttcactcctgaaagctattcacaagtgtgggttttctctcaaccacaataaaacacggatgcagtattgcgaaaatcaacagaccgtgaccggcttggtggtgaacaaaactctgaatgcacctgcgacctacagacggcaagtcagggccatcctgcacaaattgttcctggaggggaagtatcacctgaaggacaagcctacagaaaaaaaccattccaacatcagcatttacgattacaagaagcttgagaatatcgagggtatgcttagctacttgtacatgatagatagcttcaagagaaagaagttgagcctgaattccaagatccgttgtgaggacatggaacggactagtctcgaagagctccacggggacttcctgttctacaaatacttttacgccaacaacaaaccgaccattatttgcgagggtaaaacagacaatatttatttgggttgtgccatgaagtccctctggaaaaagtttaaaaggttagctaaagaggaggacggcgacattaagctcaaggtcaacttcatcaactatacggagcttacgcatagggtacttgacttatacgggggtactgcggacataagcaatttaatccgtcactacgccaaacggtgcgcaaaatataaagcgcatcctcccctgaaaccaactatcatagttgttgacaatgatagcggcagtgataagatattcaaggccataaaggagacaacagggaaacagtatataatcacaaagggcaaggagactctgcttgataaaagcaggtcgatttactatatagcccagaacctgtatgtggtgctgacacctctgaaaaatggcaacgatacgatgatggaggactttttttccaaatctactctgaagaccaaggttgatgggagattctttgaagtctataagaaatctaccaccggcacatataataagaataccttcgctcagaaagtgattaaggctcagcgcaagagaaaaattttcaatgctttcaccccaattctagcatccatcaccgccgctattgtcgattactccaaactgaagccgtga

SEQ ID NO: 8242 - RNA, 1743 nt, synthetic construct
  source 1..1743: mol_type = other RNA
atgagtttgcatgtcctacaaaaggccaaggatctgcatgatctggctagaatcctgaactacgaaccaaaggcactcagttacgttctctatgtgaaaaagccccaatatactagctttaccatccctaaatcatctggcgccccccgacatatcagtgcaccttgtgatgagcttaaaacactgcagcgtaaagttaagcgcctcctcgattcctgtattgcatcaattgagctccagggacctgccaaaggtgccctcgcgcatgggtttaagaagggacactcgatcataaccaatgcagagcctcacaaacgcaggcggtttgtcttcaacatcgacatcactgatttctttggtagcatccacgtagggcgagtgagaggattcctgataacaaacaaatcctttcagctggcccctaaggtagccaccatcctggcccagatcatgtgccacgaaaactcattaccccagggcgctcccacatccccaattgcttccaatctgataggccacctaattgacatccggctggtcagtttagcggccaaactagggtgcatatattcgcggtacgcggatgacatcaccttttctacgaataaaaaagacttcccatctagcatcgccattgaggtagacgaaaatgagtgggtacctggcaccactttgttgaagataatatacaagtgtggcttcagcttgaatcacaagaaaacgcgtatgcaatactctgacaatcagcagactgtcaccggtcttgtcgtgaacaaaagcattaatgcaccagctcagtataggagacaagtgcgcgctatgctccataaattattccttgacggcaattatcacagaaaggacgagccccgatataaagctcacgctaattccacgatctacgaccacaagtctctcgaacccctggagggcatgttaagctacctctacatgattaacaacttcaaaatggacaagttgtctaagaacggcaagattcgcaaagaagatattaaaaggacttccttggaggacctgcacggagactttctcttctacaagaatttctatgccaacaagaagatcacaatactgtgcgaaggcaaaacagataatgtgtatcttagttgtgcaatcaagtcactgcataaaaagttcattcggcttgcgaaaacaaccgggggaaaggtggagctgaaaaccaattttatcaactactcaaagctgacacatcgcgttctggatctcaatggcggtacagcagacatcgccaacctgattcggagctacgcaaaaagatgcgggaagttcaaggcccatcctccatcccagcccactattattgtggtggataacgactccggttcagacccgatattcaaggccatcaaagatactaccgggaaaaggtacgaaatcgctaatggtagaggaacgagctttgacaagtccaggcccgtttactatgtcgctcagaacctgtatgtggtgttgacaccactgcggaacggacaggataccatgatggaggactttttcagtaagaacatcctgaagaccaagctggatgggaggagctttgaagtctacaagaaaggactaccgggcaaaacttatagtaagcacaccttttcacaaaaggtgattaaggcccagcagaagaggaaaattttcaacgggtttgtgccgatccttagctctatttccgctgccgtggttgatttctctaagcttaaaccatga

SEQ ID NO: 8243 - RNA, 1761 nt, synthetic construct
  source 1..1761: mol_type = other RNA
atgttatcactcaatgctctccagacagcacagacgttgcacgacctggctcacatactgaactatgagccaaagttcttgtcctacattctgtataagaagcccgtcaaatactcccacttcactatccctaagtcatctggcgcccctagggacattgctgagccgtgtgaagaactaaaggccctacaaagaaaagttaaggaactgctggaagtctgcttaaagacaattaataaccagaagccccaatacgggtcactgtcacacggcttcaagaaggaccattctattatcacgaatgcctatccacatcgcaagaagcgttttgtgtttaacgtcgatatcagtgattttttcggaagtatccatgtcggccgcgttcgcggattcttcattacaaatagggacttcaggctgagtccaaaagtagccaccattttggcccagataatttgccatgaagatgctctgccccaaggtgcacctacaagccccatcactagcgatctgatcggccatctgatcgacatccggctcgttgaaatcgctgagcgatacaagtgtgtgtactcacgttacgctgacgacatcacgtttagttcaaatgagaagaactttcctagcgcgatcgcctttcccgtggagggtaccacagactgggtacccggtcgggccctactcaaggccatccacaagtgcggattcggcctaaatcacaacaaaactcgcatgctctatagagaaagccagcaaaccgtcacggggctggtggtaaaccagaaagtgaacccacccgcgacatacagacggcagattagagcagcactccataagctttttctggatgggcagtatttcctgcaggagaagccaaggcactcgagttctagcaaggtggatctgggaatcgactcccttgagaaaattgaaggcatgctcagctatgtgtatatggtggataaattcaacagaagcctcaccgttgagacatctaagagcaaaaaggaggaagaaatacctaaaacatcccttgagaagttacacggcgattttctcttctacaagtatttctacgcggcatctaagccaactataatttgtgagggcaaaaccgacaatgtgtatttaacctgtgctatcaagtccctgtacaagaactacccggagttggcaaaagtctctaacgacgaactgaaactcaacgtaaagttcatcaattactccgatttaactcaccgggttatgggacttaacggggggactggtgatattgctaatctgattcgagcctatgccaaacaatgcggaaagtacaaggctcaccctcccctgcacccaaccattgtggtgcttgataatgactctgggagccagcaaatccttaatgccgtgaaagatctcaccacccctaggtacgatgtgcccaatggcaaaggaaccaaactggacactactcaggacttttataagatagcccagaacttgtacatggtgcttacacctttggataagggcaagtccacaatgatggagaacttctttccaactaaggtgttgaatacaatctacaaggggaaaacctttgagatactgaaaaagtcccccccagaccagacctattccaaacatatttttgcccagcatatcgttaaagcagagcagaaaaaaattgatttcgtcggtttttcgccgattctggacagtatcaccaaagcgatcaaagactatccgaccataactctgcctaaaatcaaatga

SEQ ID NO: 8244 - RNA, 1749 nt, synthetic construct
  source 1..1749: mol_type = other RNA
atgagtaaactgaacatactgaaaaacgccaagaccttaagcgatttagctcacttgttgaactataagccgaagtatctctcctacatcatatacaagaaacagaacctttaccaccagttcaccatccccaaatcatctggagcccctagaaccattctggccccatgtgacgaacttaaagccctgcagaagaaagtctccgagctcctgcaagattgtctagaaaatatgaaccaggacttacagattcacagcagcctgtcccatggctttatgaggggacactctataatgactaatgcagacaatcaccgcaagaaacgttttgtgtttaacatcgatatccaggattttttcgggagcatccatcttgggcgggtaagaggcttttttatcaacaataagtccttccagcttgaccctaaggtggcgactgtgctcgcgcagatcgcttgttataataactcactgccacaaggaagcccttgctccccagtggtgtctaatctgatcggccacctgatcgacattcggctcgtaagtattgcaaaaaaagccggctgccagtatagccggtacgcagacgatattactttttctacaaacaagaccagctttccctccactatcgcaattcaagatgagacaacaggtaattggtctgtttctgagcaactggcgaagattattaagaagtgtggtttctctctcaataccaccaagacccgcatgacctaccgcaagtcccagcagactgttacaggcctggtagtgaaccagaaggtgcatacatcggctagttatcgaaagcaggctcgggccatggcccataaattgtttaatgacgggagtttcagcatccctgacaaagccagtcttgcggcaaaggagaactcccccaagatgattgccgggaccctgaatcagttggagggcatcttcagccatatctacatggtggaccaatttaataggaacaagttgaggggtaataatggcatcagaggggaagatctggaactaactgccattgagaagacacaccgtgactttttgttcttcaaacacttctattccacctcgctgccaaccatcatttgcgaaggcaagaccgataatgtgtacatacagtgcgcaataaggtcactggccacccaataccctgagctcgccacgatagatgcccaaggcaaacggatcttaaaagtcagattcatcaactactcagaactaacccatcgagtgctcgatttgaacggaggcactgccgatatagctcgcctcatttgtggatacgtccacctgtgcggaaagtatcataacacagccccaaagcaccccacaattgtcctcattgataacgatcagggcagccagtcaatcttttctgccataaagtcaacgactaaggatactcacacggcagggacagggaagaataaacagatcgacagaagcaaaaacttctactacatcgctcagaacctgtatgtggttgcaacaccgctgatcaatggaaaagactccatgatggaggatttctttaagaatgctacgctggcaaccctggttgacaagaagacattcagtgtccgaactcccacagctcccactggttcaacctatggtaaacacattttcgctcaaaaggttgtcaaagctaacagggacaaaattgacttctccgactttagtccaatcctcgactctcttaaaagcgtgattcagcatttcaaacttccttga

SEQ ID NO: 8245 - RNA, 1734 nt, synthetic construct
  source 1..1734: mol_type = other RNA
atgagcaagctggctatccttagatccgcccagggccttcacgacttggccgaactactcgcctacgagccaaagaagctttcttacgtgatctataagatgcccaacaggtatacaaaattcaccatccctaaaagctccggggggaccagatcaatagctgctccacgggaggagctcaaggcactgcaggttaaggtgtctaagttactgcagctttgtatccataacatgaatgctgacctcaatatcactacttccttgagccacggttttacgaaaggtcactctattatgacaaatgctgacttgcaccggaagaagcgctatgtcttcaacattgacatagaaaacttctttggatctatccatagagggcgcgtgttcggtttcctgactaaaaacaagagcttcagtctaaatccaaaggtcgcacgagcgctggctcagatcgcttgtcacgatgatgcacttcctcagggggcgccttcgagccctgtttttagcaacctgattgggcatctgatcgacgtgagattggtggagttagccagcaagctaggatgcagttacagcaggtatgccgatgacatcacgttttctacaaacaaaaagaccttccccaaagagatagctctggtgtcgccgtcaaacgaatgggtggccagccccacgctgattaagatcgtgtccaagtgtggatttgccctgaacgaaaataagactcggatgcaataccaggaatctaggcagagcgttaccggcctcaccgtcaatcgcaaaataaacagtccggctgtgtatcgccaccaggcgcgtgctatggcccactcactgtttaacacaggcagtttctcagtgcctgacaaggatccaaaagtcaaagccaagattccaggaaccattaatcagctcggcggcatgctgtcctacatctatatggtgaacactttcaatcggtccaagattgtggagaattccgcaattagggatgaggacattaaactgtctgctatggagaaggtccatgcagactttgccttttacaaacatttctacggcaaccagaagattacaattctgtgtgaaggaaaaaccgacaatatatatctgcagtgcgcgatcaagagtttggccaaaaagtacaccatcctcgcaaagctcaacgccgatggaaaagccgttctcaacgttaacttcttcaaatataccgacctgacacataggctcttggggttatacggtggaacaggtgatatcggggaacttattaagcgttacgtgtcatgctgcggcaagtacaaaaatcaccctttcaaacaccccacaataatcgtagttgacaatgacgagggttcccagaaaatctttactgcactcaaagtcgtcaccggcaataaatacatgattggatccggcaaagcgcaaaacctggataagtcactggatttctattatgttgcccaaaatctatacgtagtgtttactccccttaagatgagtggcgatgatactatgatggaggactttttcaccagtgacacactgaacaccatcgtggatgggcagagattcagcgtagtccataaggcacccaatcagctggtgtactccaagcacaccttttcacagaaggtagtgaaggcaaaccaaaaaacgatcaattttttgggctttacaccagtcctggatcgaattcaaaaagccgccaaacatttctattctttaccctga

SEQ ID NO: 8246 - RNA, 1767 nt, synthetic construct
  source 1..1767: mol_type = other RNA
atgattaaacttaagcttctccaatctgccgccacactgagggatctaagtatcgcacttggatttcaacccaaagccgtgtccttcatcctgtacaaatactcaaaagaacggctgtacaccagtttcacaattcctaaaaagagtggcgcactccgcgatatccatgcaccgtgcgcggaactgaagaacttgcagtcaagagtgagcgagtacctccaggattgtatccaggagatcaacgaaagtaagaagattacccagacgttgagccatggctttaagagaggatattccatcgtaaccaatgcctcaacccacaggaagagacgcctcgtgctcaacgttgatctcgaggacttcttcgggagcatcaatttcgggagagtacgtgggttttttatcacgaacaaaaacttctctctcaaccccaatgttgcaaccgttctggctcagattatttgtttcgacaacaaactgccacagggatctccctgttccccagtgatgtccaatctgatcgggcacctgcttgacattaaactggctcagatggccacatcgatgaaatgtacctacagccggtacgcggatgacctgacgttctctaccaataaacaacagttcccactcgagttggtcagtcccggcgacaatcatcacgattgggttgcaggagcgaaacttgaacagatcatatcaaagtgcggatttaaagttaacgcccggaagactcggctgcagtaccaagattcaagacaggacgtcaccggtctggtagtcaacgagaaagtgaacgtgcctgcaccataccgaaggcaggctcgagctatggcccaccgactgtttgaacacgggagctttcaggtcgagcgtctctccattaaggataaaggccaggtcacatctgaacggatcgaaggaagtgtggaccaactatctggcatgttctcctatatcgccatggtgtcacagcacaataaagacttagtgctgaaagccgggcttaagaatgcacagacagagttgtccagtattgagaaagttcatcgcgacctcatcttctataagagcttctacgcaaatccgatgccgactataatatgcgaagggaagacagataatgtctacctaaggtgcgccataagatctttggccaagcagtatccattactggcgaccttcgaggataagaacaaacttaagctaaacgtgagcctgttcaaatattctcgcttaaactcctccctgttgggcatcagtggcggtaccagcaatctgaagccttttatctcagactttagcaagaatattgctaggtataagtcccgcaagagcccatttcctgtgattatcctgatagacaatgacaggggtgctaaggagatttacagcacaatcaagacaacaactaaaactgctgatactattgacggttcgataccctactatcatatcgcccaaggcctttatgtcgtgcccactcccaagttaaacggcgccctggagtccaagattgaagatttttttcccttgcagactctgaaggagactctcgatggtaaaaaattcaacgacaagaacgaggacttaaaggccgatgaatatggcaagcatttctttgctgagcacgtgattaaaaaaaagcagaatagcatcgacttcaccggatttaagcctctgctcgacattataagctcaatcatttcccaatctgtcgccctgcacatgtctgctgtggtgcctcctgctcctccaaaggtatga

SEQ ID NO: 8247 - RNA, 1767 nt, synthetic construct
  source 1..1767: mol_type = other RNA
atgatcaagttgaaactcctgcagagtgccaaatccctcagggacctgtccattattctgggcttccagcctaaggccgtctccttcattgtgtataagtattcgaaagaccgcctgtatacttcttttacgattcccaaaaagagtggatctattcggacaatacgggccccctgtccagaacttaagaatctccaatcatgcgtcagcaagtatctacaggattgtattgacgagatcaatgagagcaaaaagattacccacaccctgtctcatgggttcaagcggggatactccatcgtaactaacgccagcgtgcacaagaaaagaaggctggttctgaacgtggatcttgaggacttctttggtgccattaactttggaagagtgcgtggtttcttcataaccaacaaaaacttctctctgcagccatccgtggccactgtgttggcacaaatcatctgctacgagaattcaataccacagggttccccttgctcacctgtcgtatccaacctgatcggacatctcttagacattaaattggcaaagatcgcgtctgagatgaaatgcacttattctcggtacgccgatgacttaacgttttctacaaacaagcaacagtttccgctggagctggtatctcctggcaacagcccccatgattgggtggttggtgagaggctcgagcgcgttatccagaagtgtggcttccaagttaatagccgcaagaccaggttgcagtacagagactcccggcaggacgttaccgggttagtcgttaacgagaaagtaaatgtgccagctcaataccgccgcagagcacgtgcaatggcgcataggctgtttgaaagcgggtcatttcaggtggagaaactgagcataaaagacgatgggagggcggtcagtgaaactagagctggctcagtggaagagctgagtggaatgttctcccacatcgccatggtcagtcagtacaataatgatgtggccattagagccggcataaaggacctccgaggagaactaaccagcatcgaaaaggtccaccgagatttgattttctataagtcgttctacgctaaccccatgcccatgatcatttgtgaaggtaaaacagacaatgtgtacctacggtgcgctattcgcagtttagcaaagcagtacccgagcctggtcactgtggaagccccagacaaggttaggcttaacatctcactctttaagtacagcaagctcaatagccagttgcttgggattaacggcggctcaccacatcttagaaccttcatcacggatttttctaaggctgccgcaaagtacaaatcccgtcggtcccctttccccgtgatcgtgctgattgacaatgataaaggggcgcgagagatcttcagtaccatcaaggccaccacacgaacaactgaaaagatcgacggctctatgccctactatcacatagctcaggggctgtacgtcgtgcctacccctaaactgaacggggctctcgagtcaaaaatcgaggatttctttcccgtggctacacttagcgagacactggacggcaaaaaatttaaggcagaaaatgaagacctcaaagctgatgaatatggaaaacactatttcgccgagtatgtcatcaaaaagaagcagggatctatcgatttttcgggctttaagccactgcttgatgtgatctccacaatagtgagtcagaatattgcattgcaaatgagcgctgtggtacaccaggtcgttgtgaagaagtga

SEQ ID NO: 8248 - RNA, 1830 nt, synthetic construct
  source 1..1830: mol_type = other RNA
atgagcgaatacatcgcacccgaccgtctgtgtaagagagccgtgcagatgggtagatacgagtttcgcgtgcgggtgagcatctccctcttcatgaagataaaattgctacagagcgcttcaaacctcagggactttgcaattctaatcggcttccaacctaaagccatcagttttattctgtacaagcatcccaaggatcgtctctatactcagttcgagatcccaaagaagaacgggagctttagaactatcacctcaccctgcccagaactcaaaaatcttcagtcgatcgtttccaagtacctccaagattgcttagcagagatcgatgaacgcaggccgaaaaaaggaacccttgcgcacggcttcaaacgaggctacagcatagcgtcaaacgctgccgttcaccgcaatcggaggtatgtgctgaatcttgatctagaagattttttcggggccatcaatttcggtagggtacggggcttctttataaatgaccggaatttctcactgaaacctgacgtagccaccattcttgctcagataatctgtttcgagaacaaactgcctcaagggagtccatgttctccagtggtgagtaatctgatcggccacctgctggatattcgactggtcgctctggccagcaagtacggatgctcatactcacgttacgccgacgatattactttttccacgaacaagaagacgttcccgattgaattagcttcctctcagttgattcctaacgtgtggagtctggggcccgaactgtctagtatgattgttagatccgggtttaccataaatgtgtctaaaacccgggtgcagtacagtgactcccggcaagaagtgaccggcttagttgtgaacaagaaggtgaataccgtcgcatcctatcgaagaacagcccgggctatggcagagcgcctgtttagaacaggcagcttccagatcgagaagttagtacttgattctgagggaaaatctaaatctggcaccgtgagtggaacggttgagcagttgaatgggatgctcaactttattacaatgatcaaccgcctgtctgaggagttccgcgtcagtagcgacaaacatgacttatcgtcgatcgagaaggttcacagggatctccttttttacaagtacttttatgccaacaccatgcctactattgtctgcgagggacccactgattctatatatctgaggtgcgcaatcaggaagctggccgctcattttcccgcgttggccggctttaataaggagggagaaattgagctgaaggtctgtctgttcaagtattcagacctcaacgcccgactgctcaaactcactggggggacagctcccctgaggacattcgcatctggtttcagcagcaatgctgcgaaatacaagagcagaaagtcaatattcccagtcattgtcttgatagataacgacaaaggtgccaagcccatttatagcttcatcaagcaactgccgggaaacgggggagtagtggacggctcccagaaacattatcatgtggcccagggattgtggatcgtgcctactccaagaagcgaaggagtccctgagtccaagattgaagacttctttgaagacaaagtcttgaagatggaactaggcggtaaacactttaaccctgaaaatatggatctctccgacgacgagtatggtaaacagtatttcgctgagcacgtgatcaaggccaaccacaagtcaatttccttcgacggctttgcacccattctttccacaatctccagcctgatcacagatagtatcaaccaggccaaatctgcactgaatcgcccatga

SEQ ID NO: 8249 - RNA, 1737 nt, synthetic construct
  source 1..1737: mol_type = other RNA
atgaaaattaagctgctccagtccgcgtcatctctccgggatttggccattttgctggggtttaaacccaaggctatatcgtttttgctatacaaggttcccaaaccgtatctctatacccaattccagatccctaaaaagaatggctcaactcgcaccatcatgagcccctgcgctgaactgaagaacctgcagtctgtgatctccaattatctgcaggactgtctggaggaaattgacgagaaacggcagaaaaaaggcacactgtcccacggcttcaaaagaggctactctatagcttcgaacgccgcgatccatagaaataggaggtacttactgaacttagacctcgaggacttcttcgggagcatcaactttggcagggtcaggggctttttcattaacgacaagaacttttctctccaccctgatgtagctactgtccttgcacagattatttgctttgagaacaagctgcctcaagggtcaccttgttcccccgttgtctctaacctgattggacacttgctggatatccgcctggtgggtcttgctagccggtacgggtgcagctataccaggtatgccgatgatattagtttttccacaaacaagaaggactttccagcggaactggcagccccgggtagtatgccccacgaatggcacgtaggaccggtgcttacagatgttattatgcgcacaggctttagtattaacgctagtaagacccgggttcagtatagcgacagcagacaggaggtgacaggacttgtagtaaacaaaaaagtgaacaccgcagccacctacagaagggcagcgagagccatggccgaacggttatttcgaacaggttcattccaggtggagaaaatggtgctcaacagtgagggaaacagtgtgtcaggggtggtcaggggatccatcgaccagctcaacggcatcttcaacttcatcactatgataaaccgcttctccgaagtgtcaagagagtcaatccaaaaatcggaactgagcagcattgaaaaggtgcatagagatctcctcttttacaagtacttctacgccaataccatgcccaccatcatatgtgaaggttctacggacaatatttatctccgctgcgcaatacgtaagctgtccgcaaattttccagcactggctggtgtcaatgagaagggggaaactgagcttaaagtgtgtctattcaagtacagcaaacttaacgcccgtcttctcgatctgaccggcggcactccaccattgcgaacgttcatctctgaattcgccaataatgccgccaaatacaaatcccggaagtccatttttcccgtcatcgtcctgatcgacaatgataagggggccaagatcatctacagcctaatcaaacaactaagtggcaatgcatccgtcatcgatgggagccagcgccattaccatatcgcccagggactgtggatcgttcctactcctaaagcagtgggcgtcgtggagagcaagattgaggatttctttgaggataaggtgctggaaatggagttgggaggaaagcacttcaattcagagaataatgacttgtctgacaatgagtatgggaagcaatattttgctgagcacgtggttaaggctaatcataaggacatcagcttcgacctgttcgctccaatattatccacaatttctacgctgataactgacagtattaaccaggccaactctgcccgtaatcgaccatga

SEQ ID NO: 8250 - RNA, 1740 nt, synthetic construct
  source 1..1740: mol_type = other RNA
atgaaacacctcgacttgatcaaaagctgtaataacctgcaggatgtcgcttttgtactgggctataaaccctctcggctagcttatattctttacaagatgccaaactcgaccaagtatcgggagtttgagatagacaaaaagctggggggtaagagaaaaatctttgcaccctgcccagaattaaagactctgcaacaacggctgagcaagctcctgcaaaattgcatcgccgtcattaataaggagaaaggcattcagaaaagtatttcacacgggtttaaaagagactgttccatctttaccaacgcagaacagcacagaaataagaggttcgtcctcaatatcgacctcgaggatttctttgggacgatcaattttggtcgagtgcgagggttcttcattaaaaacaagaacttcgagatcgacgaaaacgccgccaccgtcctggctcagatagcctgtttcaacaactccttgccacagggcagcccttcctctcccgtgatcaccaatcttatctctcatactatggatatacgcctcgccgcgctggctaaacagctcaaatgcacatactcccgctacgctgatgatataaccttctcaactaacgagaagaattttccgatcgaactggctgagccaacaaacgccgaaggcaccgaatggaaagtgggaaaaaagcttgagagaaagattcagaaactgggtttctcggttaaccataaaaagacacgcttgcaattctcacagtcccgccaggacgttaccggcttagtggtcaacaagaaagtgaacatcaagagtgaatatcatcgcagcgcacgagcaatggcacatagtctattcaagactggcaagtttcacattaaagaaaacaagcaggatgcgaatggtaacatcgtggaaacaaaacgggagggaaagataacggagctgggaggatacctcaatttcatcgatatggccgataaatataggaagcgtcatgtagatgactataaggaaagaaggattctgtcatctagggaggaaatttaccgtgactttctcttcttcaggtacttctatcagccttccagacctatcattctttgcgaggggaagacagactatatttacctgaaatgcgccatcaagagtcagtttagtaagtacccgaacctctgtcagaagaataaacaagatgagaagatccttaaggtggacttctttaagtacacagaggttaagtcaaggctattctcactgagcggcggagcatccaccctgtctacttttatagggaattacacaaagttctgtgaaacttatagcgtggagattagtaaaaaccccgtgattatagtcgtggataacgacatgggagtaaataaggtttttagctctgccaagaccaaaaaatatggaaagagcaaaggcagcaatatcgacggttctttaccattttaccacttgggcgagaacctttacttgaccgctattcccaagaaactgggcaaagacacagcaatcgaggactacttcaaacctacggtcttgtctacaaagtataatgggaagactttcaactacaagaataagaccaagaatgttaaccctaaaacggagtacagcaaagccgtgtttgcggaacacgtgatcgagaagaatcgggataagattgatttctccgactttactcccatcctggataacatttgcgccgctatcaatgactattccaaaaagaaatga

SEQ ID NO: 8251 - RNA, 1815 nt, synthetic construct
  source 1..1815: mol_type = other RNA
atgcaagcatcccctcttaaaaaatttctgacaagcagtatgcagattcccagcctgcaggatctgaaggagtgtcgcagcagagccgacattgccactctccttggctttaaacctgcagcgctcacatacatcctgttcaaaatagacccccccaaaaaataccgcatctttaccattccgaaaaagagcggaggcactagggagatttcttctccatgccccgagatcaagcagcttcagaagcgcttatcatacattctgtccgacgcctacactcatctatatgacttgaacaacaccaagaaatcagtctcccatggttttcggaaaaagcatagcattattacgaatgccgtcatgcaccaaaagcgaaaaaatatcctgaatatcgacctcgaagatttcttccctacgattaatttcggtagggtacgatccttcttcataaagaacaaggatttcaacctccacccagatgtggcgactacattgacccaaattgtgtgccatgaaaattctttgccccagggcgcaccaaccagtcctataatctcaaactttatcgccagaccccttgacattcgtctgctgtcactcgctaagagccacgggtgtttctatactaggtatgccgatgacatcacgttttcaacaaataagtctgagttccacagtgacattgcaaaacggaattccataggtaacgattggaccatcggagggaagttatccagcacaatcgaaaaatcgggctttatcctcaatgataaaaaaacacgagtgatgtacagcatatcacggcaggaagtaaccggacttatcgttaataaaaagatcaacacccgcattgaatatagaaaactcgctcggtcttatgtgcatagcctgattaacacagggcagtattatctgacctctcatgaggtcgaaaataacaagaagatcaaagttaagcgcattggcagcataaagcaactggacggcatcctgaacttcatctaccacacagaacggttctctaacttgaagctgaacgagaagaagaataagaagacgaatcagaacatctcttacagcaactctgagaagacatataggaagtttcttaaacacaccctcttctgtgagaatgaattcccattcatcatctgcgagggaccgactgatgatatttacctgaaaagtgcattgctgatgaagggcgagaattttcctctgttatactcttcccagtctcgtcctaaaatcaagctaaagttctttaagcactcggagaagatgagacatctccttgggatgtcagggggaaccggagatattaagaacttcatagctagctacaacaaagagattgccagcgaatttaaggagaggcctaagaatcccattattgtggttatagacaatgaccaggggtccgacgaaatctttgcgtggattaaaaggaacattgagccctttaaaagtagaaaggactccaacgtcaagggcgatgagaatttctatatcgtgaaaccatcgctctacattgttccaatcccgcggatcaatgagagtgataccgctatcgaaaacctgttaccaagccacttgataaataatcagatcgacgggaaagaagtgaatctgagtaacaaggccgtggagactaaccagataaacaaaatgaagctggccgatcacgtgagaaaaaacaagaaggatatcgacttttcaggttttaacaaactgctagagtcaatcagtatggcttattaccattacaaagacgaaactgcttccgtcgagaagtcctattcccacggcatgtga

SEQ ID NO: 8252 - RNA, 1812 nt, synthetic construct
  source 1..1812: mol_type = other RNA
atgagcaatctgaataagcttaaaaactgcgaaacccgggccgatctggctgatctcctggggttcaaggccagttctctcgcatatatcctgtacaaaatgccaccagagaagaagtatgaggagtttctgatcccaaaaaaggcaggaggcaatcggagtatcgccgcaccttgccccggcttgaagaaacttcagaagagattgtgtgagatcttaacagagtgttatcaagaactgtacggagggagcgggataaagaaatccatttctcatggatttcgcccaaagcactctgtcattactaactcactaatgcaccagaagcgtcggcgagttctcaacctggatctgaaagactttttccccagtattaactttggtcgcgtgcgggggtatttcatcaagaacaaagactttgccattagtagcgatgtcgccactgtgatcgcccagattgcttgtcacgacggcgtacttccccaaggagctccaacctcccccgtgataagtaaccttgtgctgcgctcgctggatctcaggctactgactctggccaagaaaaatagctgcttctacacccggtacgccgacgacatcaccttttctaccaacaagacttctttccctgaggagatcgctattaaggaccagctgacacataaatgggacgtggggggggaactggagagtacgatactcagatccggcttccaggtcaatgacaataaaacccgagtgatgtacaaagtgtcacgtcaagaagtcaccggcctgatcgtcaataagagggtttctacacgtgaggagtatagggaccaggtgcgctcgatggtgtattccctaacaaagcgcggtgagttttacttcaaacagatctccatcgttgacgggcaggcgacaactgttaaagaacctggagacgtgtggcagctggacggcatgctcaactacatttacaatgtcgatatggcatatctcacgtgggcagtaggagagaagaaagtcagcgaaaaaaaagataaggatgtcgtgtacagcgcaagagagcaaatttaccgcaaatttctcttctacaccctgctttgcaaaagtgagtctccttacgtcatttgtgaaggcgtgaccgatgatatttatattagatgcgccttgtcttcattagttggggagtttcccacattaagggtggcttcagatgagaaaaagatcaagctgaaattcttcaaccattcaaagaagatgaagtatctcctgggcatgggcggtggcactggagacataaagaagttcctgatcgagtacaaggctgttattatcaagacctttagcgaacggccctcctttccggtgatcgtgatcgttgacaatgattccggctttaggggtagcaaaggcatgtattcttgggtgcgagcgaacgctgaagccattgatgggccaggcttcggtataggacctaaggcaaaagaggggttttacttcgttaagcctagcttatacatagtacccatccccagaggagaggaaagcgaggtggcgatcgaagacctattgccatcgaagattttgacgtccaagatcggtgggaaagaggtgaatttgaacaacaatggagtgtcctccagcgctgaaattggcaagacaaggctcgtcgaacacgtaagaaagaataggaaagatatcgacttcgggggattcagaccgcttttgcgactgatagaaggcgcacttactcactatgacgcggccacaaaatcaggtgtcgaactcgtagccggccctaacgccgtggtggatgcttcaatgtga

SEQ ID NO: 8253 - RNA, 1677 nt, synthetic construct
  source 1..1677: mol_type = other RNA
atgaccctcctggagcaacttcgacaggctcggacactgagcgactttgcaattattctcggctatgagcccaaaaaactcagctacctcttgtacatactgccgaaggagaaacctttatacaaccagtttagcatcaagaaacgcagtggaggagagcgcgtgatatcagccccctgtgaagagctcaaggaactacagaagcgccttctcaacctccttgataagtgctctcaggagataaatgcttccaaatccaagaaccataactccatcagccacggtttcaaaaagcgtcattccattgtgacaaatgccgtaaagcacaaaaacaaacagtacgtattcaatatcgacttggagaattttttcggaacgatcaacttccagagggtctgcgggttttttgtcaagtcaagggaattccaactccatagtaagattgcagaaatcatcgctctgatatcatgtcaccaagggtccctgccacaaggggctgcaactagtcccattatctccaatctgattacccatattcttgatgttcggttagttaagttcagtactaagataggtgtgttttatagccggtatgccgatgacctaactttttcgaccaacaagaagaacttccctattgaggccgctctgaaatctatcgaactgaaacaccagtggatcatcgggaaagatttgaacgagattattaacagatcgggctttaaagtgaactcaagcaagacccggatgcagtataaaaacagtaggcaggaagttacaggactgattgtgaacaaaaagattaacaccaagcgtgaatacaagcagaaggtgcgagctatggtgcacgccctggtccatagaggtgagtttaacatctttgagtctgactctggaatgtacgtaaaaggttcacttaatcagttacgcggcatgttaagctttatagagtctattaaccccagggacggctgctccaaggcaaacgaaaagatgattggcagggatatctaccataagttcctgttctacaagtacttttacttcggcgacaagccaattctgatttgtgagggaaagacggatggcgtatatatccgcgaggccatcaaatggttttctgggagggatgagttcaagggcctgaaattcgacatctttaagtactcaaaactgaatggacgggtgctggggcttaatggtggctatagcgatctcaccaagtttatcgcgcagtatctgacattcttcaatgtcaataccgcaccttccagtaatatgcctgtgatagttgttatcgacaacgatgacgcggccaagaagatcttgaaagacgaaagaaatgagaatagagacttctatcacaaagtcaagaatctgtatgtcgtgactaccccactggtcgggacagaagtggagtctgaaatcgaggatttgttcaaaatagaggccttgagaattgagctaaatggcaagactttccacaaagaaaaagatctgaacgacggaaagcattatgggaaacacgtgttctccgagaaaatcgtgaagtccaaagaatacaatatcgacttcagcggctttgaggaactgctcaaaagaattcaaaacgccatcaagcactttgagactcagacaaatgaaaatcgaaagtctagcatcgaaccaataaactga

SEQ ID NO: 8254 - RNA, 1695 nt, synthetic construct
  source 1..1695: mol_type = other RNA
atgagcaagctcaaggacctgaagaatgcgaaatctctcacagatttggccaagctgctcggttttaaaccaaaggctctagcctacatcttgtacgtgatgccaaaagaattgcggtatgcagagtttgaaatccctaagaggactggagggctcaggaaaatttcagcgccctgcagtaagctgaaaaagttgcaaaaaaatctctccgatctcctgctgatctgttgtgacgaactgcactctcagagggagtcccagcacaatcgcaaaatttactcggccatatcacacggattcgtgcgcaagaaaagtatcatcacaaatgctgcaaaccaccgatccaggcgctatgtctttaacctggatctcaatgacttctttgggacaatcacctttcctagaatcagaggcttcttcatcgagaacaagaatttcaacttagaccccacagtggccaccctgatagcccagattgcctgcaataatgatgctttgccacagggaagtccttcctcaccggtcatcagcaatttgcttgctcatattctcgatataagaatcgtggccctggttagtaaggtagggtgtacctatagtagatatgctgacgatctgactttctctacgaacaaaaacaacttccccgaagaactggccaagtttgatgatgtcgaaaagctgtggtcagagggagaggtgcttagaaacatagttaatagcagcggatacaaaatcaattccagcaaaacacgtatgcaggagaagaggagtcgccaagaagtgaccggactgatcgtcaactcaaaagtgaatagtcgagtagagtatcgtaagtctgtgagggcgatggcttatagccttttcgaaaccgggaagttccatcgaaatatctccagactcaacgacgaaggcaaaatcatcgtaattaaggagctgggcaagatgtccgaactcaacggtatgctcaattttgtcgacatgctgtctgattacaaccggggcaaggatagaacctccagcgtggggaatgaacatctgcggaaagagcctaggaaaatggtccagctaaacacaaacgaacggatttaccgggactttttgttctacaagtacttctactctagcgacacgccaaccattatatgcgagggcaaaacagactatgtatatctgcaatgtgcgattcgtaagctgcaccaaaaattccccatgcttgcaggcgtcaacgcctctggcaagattgagttcaaaatcaagtttttccgcttctctgccctaacctcgaaactttttggcctgtccgggggggctacccagctgaaacagtttattattgattatgacgacgcatgcagccgctttaaagcagctggtctgaacaagccggttattgtggtgttagataacgacgcagaggcaaagccaatctacagcctcataaagaactacctaaatattaacgtggacggttcagagcttttttatgagtacaagcggaacttatacatagtggccactcccctgttacctggcttaaaggagactatgatcgaaaattgctttagcacggatgttactgagaaaatcctttccggaaaaaagttctcttgggccaatgactacaagaaagacgagacttatggcaagaaatatctggctgagtacgttgtgaagaagtcagccattcagtga

SEQ ID NO: 8255 - RNA, 1743 nt, synthetic construct
  source 1..1743: mol_type = other RNA
atgacccagcttaaaaacttaaaagccgccataagtctcaatgatgtcgcaactattctgggcttcaccccgaaagcgttagcctacattctgtacaaaatcccttctgcagagaagtacgcccatttcgacatcccaaaacggtccggcgggatccgtaaaatttcagctcccgtcgcacgcctaaagaaactgcagacaagactcgctttgaccctgcagcaatgcatcatcgagatcaatacttccctcaaagtcaagaatgtcctgtcccacgctttcacaccaaagtttagcatcattaccaacgcagttaaccaccgaaataagaggtttgtgttcaacctggacttagagaactttttcggcacaattaatttcggaagagtgcgcggtttctttattgagaaccgtaattttcagctacacccagacgtagctacagtcctcgcccagattgcctgccacgaaaatatgttacctcaagggagcccaagtagcccagtaatcagcaatctgatcggacatatacttgacatccgcctggcggaactagcacacaaaaccggttgtacttactcgcgctatgccgatgacctgacattctctactaataaggccaatttccccagccgcgtggcgcagctgattaatcaaacgactcatgagtggaatacagggaaagagctggagagactcatccttaaggctgggttcaccataaactcgtccaagacaagaatgcagtatgagagtaacaggcaggaagtgaccggcctgattgtgaacaagaagataaatactcgaactgagtacaggcacttggtgagagctatggctcataacctctacaaaaccggacagttttataaaacagagactgtaagggacgctaccggcgcactcgtgcacacgaaggtcgatggaaccgtcagtcagctgaatggaatgttgtcattcgttgatagcgtgggtgtgtacaacctggaaaaaaacgaacccaaggaattctcagtgacgaaacataaggacgcgaagcccgaggccaagctttccgccatagaaaccgtgtaccggagagtgctgttctttaagaacttttacagtcccgaataccccgtaatcctctgtgagggtaaaaccgattcagtttatatcaaagccgccctccggaaactggtggatgacttcccaaatctcgcagttaagaaaaatggaaaggtcgagtccaagatccggtttttcaactacacaaaaacagccgatcgaatcatgaacttgaacggcggaaccggtcagattaataagttcattgtggattacgctcctaactgcaaaaagatttctgccaaaggccaacttatgcctgttatagttctgatagacaatgatgagggggctaagggcatctactctacagtgtctaaggtgacgaagaaggaagtcaagaacaccgacgactttttctttgtcgccgaaaacctgtatattgttgcaaccccgctgttggagggcaagcagtccactatcgaagatttttttgaaccctatgtgagggatactaaacttcacggaaagagcttttctgggaaaaacacattcgatcctcatactcaatatgggaagcactatttcgcagaatatgtggtaaagaaggacgagtcaaaaatcagctttgagggctttaggcctattttggctcggctggacgccgcgctttccgactataaaaagaagacgtga

SEQ ID NO: 8256 - RNA, 1806 nt, synthetic construct
  source 1..1806: mol_type = other RNA
atgctgggagctaatgcccatatttctcttccagaatggtcaacccggctggtcactgttatcagagtccgggtgcctataaaccccttccccagcctgatagtgatgagtaaactggcctctctgaagagtgcgaccagcttaagagagctggctgtggtgctgggctataaacccaagaatctcagctacatattgtatatcaagcccaaaaaggaactgtacgaggagtttgagatccccaaaaagagtgggggagtgaggaaaatatccaaaccatgtgaagaattgagagctctacaaagaaagttggctgacttcctgcaggactgtattgatgagatcaactccgaaaagaaagtgaaggttagcatctcacacgctttcaaaaggcgacactccatagctacaaatgcttttgcacacaagaataggcgctatgtctttaaccttgacctggaagattttttcggcagtctcaacttcggaagggtacgcgggttctttatgattaacaaggacttcgagtttcatgaaccagttgccactgtcatcgcccagatcgcgtgcttcaacgggtcactcccgcagggaagcccttgcagcccagtaatctcaaatttaattggccacgtgctggatatccgactcgcacagctagccaaaaaaaccggttgcacatatactcgttatgcagatgacctgactttctcaacaaacaaaaaggtcttccctggcgacgtggcaggatttgacgttggtgcaagcgaatggggagccggcaggaaactgaagaagataattaaggacagcggcttcgtggttaacagtaaaaagacgagaatgcagttttcaacctccgcccaatccgttaccggcttggtggtcaataaaaaggtgaacgtgtcttacgcctatagaaggaatgtaagggcaatggctgattctctgtttaagaccggtaaattccacctgcctgggcctgagaagaagctcggttctgtggatcagctgagtgggatgttctcctacattcatatgattatcgagtttgaacgagcagtgcgtcttaacggttccaaagattcacagcaggagagagagttactcggcatagagaaggtttaccggcaattcattttctttcggaagttctatgcgaacccccgaccggttgtcatctacgaggggaagacggatgccatctacctacactgcgccattcggtactttgcacggattgggaagtttccagaacttgctgtgaaaaagggcgatgaataccatttcaacgtagagtttttccgcttcaccaaaacaacatcccgcattcttggcctttctggaggcgcggagcagttgaaaaacctgatccgtgaatacgctcaggtgtgttccctcttcaaggcaccaggtaataccaaacccgtaatgatggtgatcgataatgacaaaggagccaagaatatctactctctgatcaaagagttccaaaagagcgaggccccaatcgacggctctgctaataactataatgtcgtccgcaacctcttcgtcattcctactcccaaaggcaaaaacaaggaaagcaaaattgaggacttttttgacgatcaggccttggcatcgaagctcggggataagacttttgatcttaattccgactttgacacagccaacttctatggaaagaatgcctttgccgaaaacgtggtgaataagaataaggacagtatcaacttcgtggggtttgagccgattctggcccgcatggtcgaggtgatcaattactataagccttcgtga

SEQ ID NO: 8257 - RNA, 1668 nt, synthetic construct
  source 1..1668: mol_type = other RNA
atgctgggttttaaaccgaaagccctgtcctacatactttatatcaagaataaggccgacctctacaaccagtttcttattccaaaaaagaccggcggtgctagaaccatactgagcccctgtgacgagctgaaggcgatacagcgtaagctgtccgattatctccaggattgcataaacgaaatcaacagccagcggaaaattaccttctctatcgcccatgcctataagaagaagcacagcattgctaccaacgcaagagtccatcggggcaggcgatatgtcttcaacgcagacttagagaactttttcgattccatcaactttggcagggtgcgcgggttcttcatttccaacaacaattttaagctccaccctgacgctgcaacagttctggcccagatcgcctgtcataataacagtctgccccaggggtcaccttgctctcctgttatttctaatctgatcggacacatactcgatattcgcctggcgcggctagcctcaaaagaaggctgtacctacactaggtatgccgacgatttgaccttctctaccaataaaaagatctttcctaagagcattgcaatgctgtctgattccgaggagcacatctggtcaaccggaaagcagcttgagaaggagatcaagaaaacaggattcgccattaataacaagaagacacgtatgcaatacaaggattctcagcaaacagtaactggactcgtggtgaactcaaaggtgaatactaggtattcctaccgcagaactgcaagagctatggctgatgccctgtttaaaacagggaaattcaccataaagaagcccgtgcaagctaacggcaaatctatcttattggaaacccccggaaccgttgaacagctctgcgggattttttcctatatccacatgattgccgagtataacagaagcatctcgatgagtaacaacaaaaaactcgaactgagcggcatcgaaaaaacctacaaggagcttttgttttatcgccgcttttatgctaatccacgaccactgatcatctacgaaggaaagacagatgctgtctacctgaggtgtgccatcagaagcctgattaagctaggggagttccccgaattaggaggcattaatgacaagtcggaggttgaaattaatgcagacctgttcacatacacaaagactgcgagccgaattttgggcctacccggtggtgccgctccgttgaaaacgctcatcagtgagtacctgcataatttttcccggtaccaggctcctggcaacacaagcccagtcataatgcttatcgacaatgactcaggcagtaaggatatttacagcttgatcaaacaacttcggaaagagaagaatccaatagatgggtctgaggagcactattacatcgcgaaaaatttattcgtggtgccaactcccaaggtgctggggaaagagagtaagattgaagacttcttcacgcggaacaccctcgaaatgaaaataggaacgaaatcattcgactgctccaacgaccatgatacggagacaagttacggtaaaaatgcattcgccgaacaaattgtgaaagccaatcagaatactatcgactttactgggtttcgccctattctgcagcgtatcgtcaatgtaatcaactactatagggcaatctga

SEQ ID NO: 8258 - RNA, 1731 nt, synthetic construct
  source 1..1731: mol_type = other RNA
atgagcaggttggcaaagctgcggcgcgcagcaggaatcgatgatctggccgagctgctcggctttaagcctaaggcaatttcctacattctgtacataaaggacccagagaagaaatatgtgcaatttgaaatccccaagcgctccggtgggacccggcttatttccgcaccctgcggagacttgatgagcctgcagagacgactggccgagctcctccaggagtgcatagcagagattaatgaggagagaaaagtccgtacagtgctcagccacgggtttaggaggaaacactgtatcaagactaatgcttggatgcacagaggaaagaggttcgtactcaacgttgacttgtcagacttttttggctccattaactttgggagagtgcgtggattctttatggccaacaacaatttcaaactgaacgccaaagtcgctaccctgattgctcagatcgcctgccatgaaaatgcacttccgcagggcagtccctgtagccctgtcatatctaatttaatcggacatctcttggacctcaggctggcagaactggctaagcaatcgggctgcacgtattctcgttacgtggatgatattacttttagtaccaacaagccacagttcccacggaacgtggccgtgcaacgggacgaagacgaccatgaatgggacgctggagccgaccttgtgaggattgttggcagggccggatttcgacttaacgatcgaaaaacacggctgcagtaccacggttcacgccaggaggttaccggcttagttgtcaatgctactctaaataccagagtggaatatcggcacgtggcccgcgccatggtccataaactgatgacgaccggggccttcaaaagaaagaggttcgtacagaatgaggacgggacatgggcgctagccgaagtggacggaaaaatcgaagagttgaacggcatgctgtctttcatcgacagtgttgatctgtacaagcgcagacgccagctgaaggaagtggagagagataagtcgctggtgactcttaaagaccttagcgcaactgagcgctattatggggatttcctcttctacaagaacttcattttcaatgagcggcctgtgatcttaggggaaggcaaaactgataatgtctacatacagtgtgctcttcgatcactcctggcggactatccttccctcatcgctaaaggcgcaaacggtttcgatcagaagattagcctgtttaacaggacctccaccatcgagagactgacgcaattgtctgggggtgctgagcaattcaagacattcgttaaagaatacctggccgcccgccggaaatttcccataaagggcaaggcgcctcccatagtaattgtcgccgattctgatgacggcattggtcaggtcaacgcttacttgaaaaatctgactgggagtccagtggatatgacagccgattttacccacatcaaagaaaacctatacatcgtgtatacaccgcttgacgccggtggtaaaggcgcacccatggaaaatatgttcgagaagtcagtactccagacacagttggggggaaaaacctttaatccaagcaacacaaagatcaatcacgcgaaagagtatggcaaggcgtacttcgcccagcacgtggtgaaaaaggatgctgacaagatcgatttttctggattcaaggttttactggaccgaatcgtcaaggctatcgagcatggctcctga

SEQ ID NO: 8259 - RNA, 1740 nt, synthetic construct
  source 1..1740: mol_type = other RNA
atgagtcgtcttgctaagctgcgcgaagctacagggttggaggagctggcaaagcttttaggctttaaaccaaagagtattagctacgtgctgtatatcaaggatcctgaaaagaaatatgctaagttcgagattccaaagcgctccggcggaatgaggcagatctctgcaccctgctctgaactgatggggctacagagacgcctcgcagaactccttcaggagtgcatcgccgaaatcaacgaagaaaggggagttaaaacagtgttgtcgcatggctttaggaggaagcactgtataaaaacaaacgcctgggtacataggaataagcgatacgtcctcaatgttgacctccaggatttctttgggtccattaacttcggtagagtgcgagggttcttcattagcaacaagaactttcagctcaaggagaaggtagccaccctgattgcccagatagcgtgtcatgacaatgctttgccccaagggagcccttgctctccagtcattagcaatttgattggtcacctgctggacatccgtctcgcagagctcgccaaacagagcggctgtacatacagccgctacgcagacgacatcactttctctaccaataaacctcagtttcccaagaacgtggctgtgcagcgggatgaggacgatcactgttgggtcgcgggggcagacctagccaaaataatctcaagagccggattcaaagtaaatgataagaagacccgcctccaatatcatgggtctaggcaagaggtgaccggcttagtggtgaacactaagctgaatgcccggtctgagtatcgtcatgtggccagggctatggtccaccggttgatgaaaacgggatcattcaccagaaagggttacgtgctggataaagaaggaaaaggcagtatccaggaggtagagggcactgtcgaatccctcagtggagtgctgtcctttattgacagcgtcgacctgtataatcggatgtccaagatcaagaaagctgaccgggaaaaacctctggtcacacttcaggacaaaaccgccactgagcgctgctacggcgactttctcttctacaagaatttcctggcgaatgagaaaccagtagttctgggcgaagggaaaactgacaacgtgtacatacaatgcgccttaagatcaatgttcgctcagtacccctatctgatcaagaaaaatgccgataagtttgactttcagttctccttctttaatcggaccagtactacggacagagttacctcactttccggaggttcagaacagtttaagacctttgttaaggagtatctggcttaccgaagaaagtttcccattaaggagaaggctccgccgatcgtgatagtggccgattctgataacggcgtgaaacagctgaatggatatattcggagcgtcacgggctcggcagttgacatgaacgccgatttcacatatatcaaggagaacttatacgtcgtgtacacacctatcgcagcggatggcaaaggtgctcccatcgaaaacctgtttgaaaaaaacgtcctagagaaagagttgaacggcaagaaatttaatccaagtaactccggaattaaccctgcaaaagagtatgggaaagcctacttcgcgcaacacgtggtgaaggcagatgccgactcaatcgatttctccggtttcaaggtgctgcttgatcgaatagctaaagccattgcccacggaagcgcaaaggtttga

SEQ ID NO: 8260 - RNA, 1734 nt, synthetic construct
  source 1..1734: mol_type = other RNA
atgtctcgcctcgcaaaattacgtggggccgcagggatagacgagttggccgacttgctgggtttcaagcctaaggctatctcttacattctgtacatcaaggatcccgcaaagaaatataccaagttcgatgttcccaaaagagggggagggaacaggaccattagcgccccctacgacgacctcatgaacctgcaaaggaggctggctgaactgctgcaggagtgtatttcagaaatcaacggggaacgcaaggttaaagctgtgctctcccacggctttcggcctaagcaatgtataaagacgaatgcttggcagcatcgaaaaaagcgattcgtgttcaatatcgatctgcaggacttctttggttcgatcaattatggacgcgtccggggattcttcataaccaacaagaactttaagctgactgaaaaggtggcaacactcatcgcacagattgcgtgtcacgataacgtactgccccagggctcgccatgttcccccgtaattagtaacctgataggccacctcctcgacataaggcttgccgagctcgcgaagaaaaatgggtgcacatactcaaggtatgctgatgatattactttttctacgaacaagccggaatttccccggaatgtggccgtccaaagagacgaagacgatcatgactgggtagctggtgcggacttggtgaagataatcaacaaaagcggcttcaagatcaatgataagaaaacccgactgcagtatcacgggagccgccaggaggttacgggactggtggtgaatcggaaactctctgcccgtagcgaataccgccatgtcgcccgagccatggttcatagactgatgaagaccggagcttttgtacggaccgcttttgttcaggataaagatgggaaagtcagtctagccaagccggccggaaccatcccccatcttaatggcatcttgagctttattgactcagtggacctgtacaaccggcgtagtttgttaaaagtcgctgagcgggataaagcccttgtatcccttaaggatttgtccgccactgagagatgctatagggactttctgttttacaagaacttcctagggaatgccaaacctatggtggtgtgcgagggtaagacagacaatatctatatccaatgcgcgctcaggtctttactggcaggatacccaagtcttattaagaagggcgtgagcggctacgagatggaactgtccctctttaatagaactcagactacagatagactgatgagtctgagcggtggatctgagcagttcaagactttcgtcagagagtatctgaatgcgcgcaggaaatacccaattaacggcaaagtgcctcctattattatcgtggcagattcagatgacggtgtgaaaaacttcaatagctatatcggggggatcacaggcgcccctgtggatatgaaagccgactttacatacgtgaaagagaatctgtatgtcgtctacacaccacttggagctaccggtaaaggagcaccaattgaggacatgtttgacaagtccgtcttgcaaaaacagctaaacggaaagactttcaacccatccaacagcggcattaatcacgccaccgaatatggcaaagcctttttcgcacagcacgtggtcaagaagggcgcagagggcatcgatttctctggcttcaaggttcttttagacagaatcgttaaggctgtggaacactcatccaaatga

SEQ ID NO: 8261 - RNA, 1776 nt, synthetic construct
  source 1..1776: mol_type = other RNA
atgagtcatttaaagacattgaaggaggccactaccctccacgatgtagcccatattctcggattccagcccaaatctctggcctatattctgtacaaaaagccgtctgctgaaaaatacaagcacttcaccatcccaaagcggaccggaggcaagcgatctatttcagcaccctatcctgatctcatgaatctccagaaaagattgtcagaccttctccagaattgtatcagcgaaatcaatcaggcccgcaaaatcgaatccacgctcagccatggcttccgaaggaaatattcgattataaccaatgcagctatccacagaaataaaaggtacgtgttcaacatcgaccttgcaaactattttggggctatcaattttggaagagtgaggggattctttattaccaaccggaattttgagctgaagccagccgtggccacagtactggctcagatcgcttgtcatgaaaacacgttgccacagggatccccttgctccccggtgatttctaacctgatcggtcacttacttgatatcaggctggccgctctgtctagccaggtcggctgctcatattcacgttacgccgatgatctgacctttagcaccaacaagcgcaattttcccgcgaaggtggctaagctagccgaagggaaccatcagtggcaggtcgggaaagaattggtccggattatcgaccgcactgggttcaccattaataacaccaaaactaggatgcaatacatggattcgaggcaagacgttacgggtcttgtggttaacagtaagattaacacaagagcggagtaccgcaggatcgcccgtgcaatggtgcacagactgctgaatactggaagctttcagcgcaaacagattagctacgatgaccagggcaatctggtggagactgaggttaatgggacgttggaccagctcaacggcatgctctcttttattgacagtgtctccgtgtttaataaacggaaggataagaatccaacagagaaggagaaagacctgatgcctagcaaggaccccgataataacgaaaaggtttatcgtcgattcctcttcttcaaaaacttctatgcgtctgccaatcctcttattatctgcgaagggaagacagacaacatatacttaaaggcggcaatacaaagattggctgacgcctatccctgtctagcagagaagaaagagaaaggcggaataagcctgaaggtgtgcttttttcggagaaatgcaacctcagggcgcattttgggcctggccggtggtacaggtgagctgatcaacctgattaagatgtatgcaacagagtccaaacatatcactgcgcccgggaagaaacaaccagttatccttctgattgacaacgacgagggcgccaagggcatctacggatacgtaaaaaacctgactaagtctaagggagactccaaggcagctttcatctttgtgacagagaatctgtacatagtgccgaccccactaactcacgatggcaaaaacaccatgatagaagatttcttcgaagagagccttaagaacacaaagttaaacgggaaaacttttaacccttccgacaagggtttcaattccaaaaccgaatatggaaagaattacttcgctaaacacgtcgtcaaggagaaccaagctacaatagattttaacggcttcaaacccatcctcacccggattgaagccgtcctgaattaccactcaaaaaagcctagctccgagagtatggccgagagtatgggcagtgattga

SEQ ID NO: 8262 - RNA, 1746 nt, synthetic construct
  source 1..1746: mol_type = other RNA
atgagcaagcttaaaatcctacaggccgccaccagcttgcacgagctggcagatttgctgggctttaagcccaaggcagtatcctacatcctgttcaagaaggacttggctgccaaatacactgaattcgagattcccaagagagctggggggaaaaggctgatacaggctccctatccagagctgatgaatctgcaacggcgtttgtctgagctcctgcaagactgcattgcggagatcaatgccgcccgggacattgactccgtattatcacatggattccgccggaaatatagtataatcacgaacgcagtggtccacagaagtaagagattcgtccttaatatcgatcttgcaaactttttcgggactattaactttggcaggatccggggcttctttatctccaaccgaaattttgcgctgcagccaaaagttgctacactgatagcccagatcgcgtgccacgatcatgtgctccctcagggctcaccctgtagcccagtgatatcaaatttgatcggacatctgctggatgtacgtcttagcgccctagcgttccagacagggtgcacctactcacgatacgcagatgacattacgttctctactaacaaacctttattccccgcaaagctcgccaaggccgttgaaggagatgagcacaggtgggaagtgggtaagactctcttcagagccattacaaaagctggctttgaggtaaacgctgagaagaccaggctccagtacaccgactccagacaggaagtcactgggctggtggtgaactctaagattaataccaggagcgaatatagacggacagcccgcgcgatggtgcacagattagtgtctaccggcagtttttatcgcaaacgtgttgagcgggatggtgatggcgaagtggtgatttctgagaaactcggcaccctcgaacagctgaacggaattctgagctttattgactcggttggcgtgtacaataagaaaaaaggaatgaaggacgacgagcgggagaagcctctgactatgccttcctccccggattgccaagaaaaggattaccgcaaattcctgttctataagcatttctttgcaattaagcagcccatgatcgtttgtgaggggaagacagacaacatctatctgtcctgtgccatccgaaggttggcaaagtcacacctgcttctcgccagtccagacggaaaaggggggagcaggctccaggtgagcttctacaaacgcacagcaaccactgaccgcacaatcggactgactggcgggaccgaccagctcattagcctgataaaggagtatagggccgaatcgagacgcattaaaatagctggtaaagtccaaccgctcatcctattaatcgataatgacaatggtgctaaaggtatttttgcctacctgaagaacctgctaaaggtgcagatagaccccaatgctccttactttgaggcccatgagggtttgtatgtggtgccaaccccactgacatcagacgccaaaggaaccatgatcgaggattttttcgatgaatccgtccttaaaacgatgctcaacggcaagaccttcaatccttctaatgaaggcgtcaaccataagacagaatatggcaaagcttactttgcttctcatgtcatcaaaaagcacgaaaacacgatcgattttagtggattcaagccgatccttgaccgattagaggaggttattgcacaccaccagaaaaagcaccaatga

SEQ ID NO: 8263 - RNA, 1734 nt, synthetic construct
  source 1..1734: mol_type = other RNA
atgagcattctcgagaaactgcaagcggcccaaaaccttcatgatgtcgccttacttctcggttaccagccaaagagtcttagttacatcctctatgtgaaacctaaaacgcagaagtataccacctttaatatacctaagtccagcggcgggacacgagaaatcaaggcaccctacccggacctgaaaacactgcagaaacgcctctccaagctgctgcaggagtgtatcgcggagatcaatctgcaaaaagagatcaccacctctgtatcacacgggtttaggaaaaagcactctatcctgacaaatgccgctgtacacaaaaatatgcgctacgttctcaatctggacctcaaggacttcttccattcaatcaactttggcagggtgaggggcttcttcatcgctaaccagaattttcttctgaaccctaacgtcgcaactataatagcccagatagcctgtcatgaaaactgtctcccccaagggagcccctgtagccctgtgatttcaaatctggtgggccacattctggatatgagactagtgcagttagctcgtaaatttggatgcatctattctcgttatgccgatgacatcacgttcagtaccaacaagaaagtcttccctgtggatttggctaccgcagccctagatggcgagcaactgtggagcgtgtctaagccgttacacgacattatcaagagatcaggatttgatgttaactcggctaagactaggatgcagtataagttttcaagacaggaggtgacaggactgattgtcaacagccgagtgaatgtcagattcggctaccgacggatagccagggcaatgcttcataagctgataactcgcggtgaatttcacaagccaaattctaagaaagtgagttccgtgactaatacaaccgccccaagcttagactacctgaacggcgtgctatcgtttattaattctgtgaaccttttcgtccacaaaaagcatagtttcagagttaaaagcgactccaagaaggcccttgagaagtctttcttgaacttgagtatctctcgcggttaccggaattttctcctctataaatacttcttcgcagctaagaatccagtaattatctgcgaaggaaaaaccgataacgtgtatattcgctcagcaaccaggcaactgagtacacagtacccaatactggggaagtcgagcccagatggtaccatcaacttgaaaatctccttctttaagcggactaagactactgatatgtttctcggcctcacaggcggagcatcccagtttaacaaattcatcgaggatttacggcagcccatttttaaggacttcctgttgaaaatcaagcagcccatcattattgtgatcgacaacgaccacgaggctctgaaggttttctcctacctgtacaagaatttcaacattaactgcgacaaaaccgttggatttatcgaagtcttccgtgggctgtatgtcattcctattcccctgctctccggagcgaatcagtctgttattgaggagctgtttgacatcaaggatcttacacggtccttggacgggaaaaaattcaactataagtccgacagctataatacgaaactggaatacggcaaaagcgccttcgctacacggatagtacaggccaaggaagatcagatcatctttgacgggtttaaacccctattgactcagattgaagaggcgattaagtcattcagatgctga

SEQ ID NO: 8264 - RNA, 1722 nt, synthetic construct
  source 1..1722: mol_type = other RNA
atgagctttcttacagagctgaagagcgccaagtccctgcacgacgtcgcttatctcttaggatataagcccaagtccctgtcctatgttatctacaaaatgcctgtcaaatacgagactttcacagtcccaaagaagacaggcggcgtgcgcaccattagtgcaccccacccagaactcaagcttctgcaaagaaggctgtcggatggcctgcaaagttgctgggacgagatcaatagtgagaaaaagatcagcaaacctatctcccatggatttaggcggcgatcaagcatcctgactaacgcctccgtgcatcgcggtcgcagatttgtcttcaacgtggacatcaaggacttcttcgactccattaactttgggcgggtctacggattcttcctgaagaatactgacttcgctttaccagaatcagttgccaaaatcctggctgcgatcagctgtcatgaaggcaaactgccccagggctctccttgctcccccgttatcagtaatttaatcgggcaggtgcttgatatccggctggcccaactagctaggagccacggttgttcctattccagatacgcagacgatttgaccttttctacaaacaagcgagtgttcccttcagccgtagcagcacttgggataaatcacgcctgggtagtaggagacgcactgtcaaagattatagaacgctctggttttcagctcaatcctaaaaaaacccggatgcagtattgtgatagtcggcaggaagtgacaggactcatcgtgaatcggcgtgctaacacgcggcctgagtataggaggctgacacgagctatgactcacaagcttgtcacaacgggcaagtttcagatagcaggcatgaaggcggacgcctctggcacctttgcccctactctggtggacggaagcattagccatcttcagggtatgtttggcttcattgactgggtagatttgtcacacaaaaaggctaccgaaacacatgatgggccacctagctcaatctctaaggtctacaagagattcctcatgcatcgtgatttttgggcgagttcattaccagttatcttgtgcgagggcaaaactgatagtgtttacctaagaggcgcgattagacgcctcgccacagctcaccccagtttggtgagcatgaccacggtcgggaaagccgaatacaaggtcaggttttttaactactcttacactagccagcgtattctggatttgtctgggggggccccagccgtgaaaagctttataaccggatatctcaaatctgtaaagaaaaccccagcaccctctaacagacagccgctgatcgtgctccttgacaatgatagcgggggaaaagtgttctattctctgataaaggagtacaatggtaaaaagacccccgtggacggcatggatgacttctaccacctggaggccaacgtgtatgtggtgttcacccctatagctaagcccggggataattcatccattgaggacttctttgagccggccctactcgctactaaaatcgatggtaaatcctttaacccatccaatgaagatctcgacgagaacaccgagtacggaaaggctattttcgcagccaaagtggttaggcccaacattccgaagattaacttcgataagttcggcctgattttggcccgactggaacgcgtgatggacgcacatgtcaaaaagcacgtttcgaaagtgtga

SEQ ID NO: 8265 - RNA, 1725 nt, synthetic construct
  source 1..1725: mol_type = other RNA
atgtcatttctcacaattctgaagaacgccaaatctctccacgacgtcgcagatttgctcagatataagccgaaatctcttagctatgtgatctacaagatgccagtaaaatatgagacttttaccgtgccaaagaagacggggggagtgcgaacgataagtgcgccgcgaccggagctcaaactgttacaacggcgattatcagacggattacaaagttgttgggatgaaattaacaccgagaagaaaaccaccaataacaaaacaacaaagcccataagccatggcttccgcaagggcgccagcattctaactaacgcttctgtgcaccggggaagaaggttcgtgtttaatgtcgacatcaaggacttctttgattcgattaatttcgggagggtgtatggatttttcgtcaagaacaaggattttgcccttcccgaatcagttgcaaaagtcctggccgccattgcgtgccacgatggcaaattgccccagggctccccttgcagtcccgtgatttcaaaccttatcgggcagatcctagacattcgcctggcccagctggcacataggtatggttgtagctattctcggtacgccgatgatcttactttctctactaacgaacgaatctttccttctgccatcgctctgagtaatattgaccatagctgggttgctggcgtgggactgagcaaaatcatcgagaaggctggctttcaactgaatcctaaaaagacgagaatgcagtacctggactccaggcaagaggtgacagggctgatagtcaatcgccgcatcaacactcggcctgaatatagacgtctggccagagccatgacccatcagcttgtcacaaccggcaagtttcagatcacagccatgaaggcagatgccttggggacacttgtgccatccaaaatcgatggtaatatacggcaccttcagggcatgttcggattcatagactggatcgactggcggcacaaaaaggctcgtggtaccctggccggaatgcctagttccattgataaggtctacaaaagattcctgatgcaccgcgacttctgggccagctccttacccgtcatcctctgcgaagggaaaaccgactcagtatacctgcgtggagccataaggaggctggcaaccgctcaccctaatctcgtcctgatgtctgcagcgggcaaggcagaatacaaggtgcgcttttttaattacagctacacttcccagcggatcttggatctgtccgggggcgccagcgttgtaaagaaattcatcaccgagtacattaagagtgtgaagaaaaccccagctccagcaaaccagaaaccactgattgttctcctagacaatgatagcggtggcaaagtgttctactcgctcattaaagagtacaagaaaactcccgtaaacggaatggacgacttttatcatttggctgccaacgtgtacgttgttttcactcctatcgctaagccctccgacaattcatctatcgaggatttcttcgaacccgctctcttggagatgaaaattaatggcaagtccttcaacgccgataacgaagggctcgacaagaataccgagtatggtaaagcggactttgcaacacaggtggtgaggcctaacatagcgaagatcaactttgacaagttcgatccaatcctggctagactggagggggctatggaggcacatattaagaagcacgtgtcctga

SEQ ID NO: 8266 - RNA, 1716 nt, synthetic construct
  source 1..1716: mol_type = other RNA
atgttcttcctgacaaacctaaaaagcgcaaagagccttcatgacgtggcatgtttgctgggctataagccgaagtcactgtcctacgtcatctacaaaatgccgctgaattatactacatttaccgtgcctaagaagtcagggggcgtcaggtctataagtgcaccccgccctgagctgaagctcctgcagcgacgattaagcgacgggcttcagtcctgctgggacgagataaatgatcagaaaaaaatcaccaagcccatcagccacgggtttagacgcgatgcgtcaattgttactaatgcctcagttcaccgcgggcggcgctttgtgttcaacgtcgatatcaaggactttttcgattctatcaactttggtcgggtgtacggatttttcgtgaaaaataaggactttgccctgactgagtccgctgccaaggtgctggccgcaatcgcttgccacgacggaaaacttcctcaaggatccccatgtagtcctgtcatttccaatctgattggccagattctcgatgtgcgtttagctcagctcgctcatcgtcacgggtgcagttactccagatatgcagatgacctgacgttttccaccaacgaaaggatttttcccagtatgatcgccctgtcaaatgctgatcactcttgggtcgccggtgctgtgctgtctaagattatcgagaaaagcggtttccaactgaaccccaaaaaaacccggatgcaatacaggaatagcagacaggaggtgaccggcttggtggtcaacaggaggattaataccagacctgaatatcgccgactcacccgcgctatgacgcaccagttggttacgactggaaaattccagttgaccaagaccaaagcggatgtcctgggaaaacttgtgccaacaaagatcgatgggagtattacacacctccagggcatgtttggcttcattgactggatcgacctgtgccataggaaaaaccaggaagtgccaaacgtgcagcaatcagctattgggaaagtctataaacggttcttgatgcatagggatttttgggcgaattctctgccaattatactctgtgagggcaagacagacagcgtataccttcggggcgccataagacgactggccactgcccatcctaacttagtttctactaatgcagccgggaaatctgaatttaaggttcggtttttcaactacagttataccagccaaagaattttggatctgtctggtggagcccccgtggtacgtcggttcatcacagagtatatcaagtccgtgaaaaagactcaggccccagtaaatccgaagcctctgatcttacttctcgacaatgactccggcggacaggtgttctactcgctaatcaaacagtacaacggcaagaagacaaccgtaaacggcatggacgacttctatcacctcgcagagaacgtttacgtagtttttacccctattgataagcccggagacaattcatcgatcgaagattttttcgagccaagcctcctagccaaaaaaatcgacgggaaaacattcaacgcagacgatactacattcgataagaacaaggaatacggcaaggctgacttcgcagctaagatagtgaggccaaatatcgccaagattaacttcgaaaagtttgatcccatactcgcgagaatagaaggtgtcatcgaggcccatagcaagaaacacttcccctga

SEQ ID NO: 8267 - RNA, 1785 nt, synthetic construct
  source 1..1785: mol_type = other RNA
atgtcccagttacaggcgctgagggcagcctccactttggagcatgtagccgatctgctggattataaaccgaagacgctttcatatattctctacaaaatcccagcagctaataagtacaccacattttctatccccaagaaggacggaaatccccgtgacattaatgccccctgctcagaactcaaggagctccagagccatctgagcgacttcctgatcgggtgcgccaacgaaatcaacgaaatcaggaaattcaaagaccagttgtctcacgcattcaagccagaacatactattgtcactaatgctgtcagacacaagaagaaacggtacgttttcaacatcgatctgaaggatttcttcggcacaatcaatttcgggagggtgaggggctactttctaaaggatgccaacttcatgctgcatgcaaaagtggccaccattttagcccaaatcgcttgtcatgaccacaaacttccacagggatccccttgcagtccagtaataagcaatctggtgggtcacatactcgacatacatctttgtgggctcgcctttaaaaatggctgcacctacagtcggtacgccgacgatatcactttcagtacaaacaagcctatatttcctgagaacatcgcaaagctccttcccggtcaagcacacgcatggcaggtcgggaacggactggaaaaaatcgtttctcgcagtggattcaccattaaccaccagaaaactagaatgcagtatcgaggctcaagacaggtcgtgactggtctaaccgtgaacaaaaaggtcaacatcaagaatgactaccggagaacagtgcggcagtttactcagcgggttttcaacaccggaaagtttcaatatctggcggttgtgacagatgccgctggggccaaaacccctacaaagatcgacggatccctggagcaactgcatggcatgttcggacacatagattttgtcgacaatgaaaacaaggaggctgaggagaagcgggattctggcagctccaaggcaaagaatgccgccaaggacgccctgtactcgaaacgtaagctctataggcgctttttgatcttcaaagacttgtatagcgccccacgccctgtgatcatatgtgaaggcaagaccgacaatgtgtaccttctgcatgctattaaatctctcgctgctaactaccccatattagcttccatcacgacagcgggcaaagtgcagattcacgtgcgcctgctcaaagcattggactcatccattggaacaatcctacacctgggccacggggcttccgatttggacaggttggcaaaacaatatgcagaagagatcctccgctttaaggccgatgggatggagcaggccgtggtcctgcttatggacaatgatgatggtgctgatgagatgtacaagctggcgaaggatctcaccggcaagaatgtaagccgagcggaaccctactttcacctggtgggaaacatgtatgtggtggtgacgccgctgattggcacgaataaacagagcgagattgaggattcttttgccgacacactgaaaaacgttgtccttgatggcaaaaccttatctaccaagaacaagttcgacaccgctaaatatttctcaaagcacgtgtttgcccagcatgttagagagaacgccagcaaaattgacttttcgggtttcagtgggattctagacagagtagctgctgcgatccaggccaatcagattcgaattgccgcaagcgctgctccacaagccgtccctgcaactgtttga

SEQ ID NO: 8268 - RNA, 1767 nt, synthetic construct
  source 1..1767: mol_type = other RNA
atgtcccaactgcaggctctgcgtgcagccctatccctgcatcaggtggccacacttctgcagtttcagcccaaggctctgagttatattctgtacaagaagcctctgcccacacgttatacaagcttcaatatggcaaagagagacgggggggtgcggaccatcaatgccccaagcccagagctcaggttactgcagcacaacctctcagaccttttacagaactgtgtcgaggagataaatgaggggaagaagtggaaggatcagctggcgcacgggttcaaacgggactgcagtatcatcactaacgcggtcaagcaccgcaaaagaagatacgtctttaacatcgacctgaacgacttctttgggacaattaactttggaagagtcagggggttttttataaaggacgctaacttcatgctccaccctaaagtagccacaatactggcccagattgcctgtcacgaaaatgtgctgccccaaggctccccatgcagccctgtgattagcaatcttattggtcatgtcttggatatccacttgtgcaaactggcagccagcaatggatgtacttactctcgctatgcggacgatattacgttttccaccagtaaacccgattttccagaaagcatcgccagacgagtcaccggtcaagcccacacctgggaagtggggggaggacttcagaatatcgttgctcacactggattttccatcaaccccaaaaagacacggatgcagtacaggggtagtcgccaggtcgtgaccggccttgtggtcaataaaaaggtcaatatccggacagagtacaggcgaagggcgcgctcattagcgcatgagctattcaaaacaggcactttccaacacgtgaaaacaattcctgacgctaatggcgtggtgacccctacggccgttgaaggcaccttggcccagctgcatggcatattcggccacatcgatgccgtggaccatcataacttcaaaattcagtcaaaggccgaccccagagaagccaaaattgtgctgcgaagcaaagagaagctgtaccggcgtttcctgatgtttaaggatttttacgccgcgtctttgccagtactcgtgtgcgagggcaagacggataacatctatctgttgcacgctattagatctctagctgcttattatcccaagcttgctaccgtagctgcaaacaagaaaattactctgaacattcggatcctcaaaacggtgaagaccagcactggtcgggttctccaactggaggggggtgcctcttatttgaaagcattcatcgaacagtacgtgtctgagatccataagttcaaagcacccggaatgcaagcagccgtggtgctcatcgttgataacgattctggcgcagatgaaatctacaacactataaggaagctcgccaaaatcaaagcaccacgctcagacgcatacgttccagtagctggcaatctatacgtggttccgaccccgctgaaagctggtgcgacaaagtccgcaatagaagactgttttgccgacgaaataaagaatctcaagttaggaggaaagactttcaatgccaactcagacgaggacaccgtagcatatttcgggaagcacattttgagtgtgtatattcgcgagaatgcttccaaggttgatttcaccggcttcgccggcctccttgataggattactgccgctatcgaggctcatcaggctaaacaggctgccgttggaatcgcctcggcacctgcagcccagccttga

SEQ ID NO: 8269 - RNA, 1788 nt, synthetic construct
  source 1..1788: mol_type = other RNA
atgagaaacctggaactgctgaagtcaattaagacacgatccgaattggctgttttactggggtacaagcctaaggcccttacctatctgctgttcaagatgccccccgaacagagatataagagttttcctgtgccaaagaggtctggcggccagcgtacgattaacgctccttgcccagaactgaaggcgttgcagaagcgcctggccggactactggtgaattgctcttccgagctggctttggccaaaaagctgccacgtattagctacgggtttaataagggcggctcaaccctggataatgcctctgtgcacagaaggcggcgttacgtgctcaatgtggatctggaagatttctttgggtcaattcacttaggacgagtgcggggctttttcattaataacgaggacttcaaactcctccccgacgttgcaactgtgatcgcccaaatcgcctgcctcgatgggaagctacctcagggaagccctgcttctccagttataagcaatatcattgggcacatcctggatgtgcatctagcacgcctcgctcggcggtatgggtgtagttatagcaggtatgccgacgatctcaccttcagcacgaataaacctatttttccacagcagattgcttctcttgtggatcccttggagcacatttgggtcgcgggtggtgagttagagagggagatcacccggtgcggctttagagtgaaccattcaaaaacacgcctcgagtataacgatagtaggcaagtagttaccggagtggtagtcaacaaaaagctgaatgtcccgtccgaattcaagagaggcgcacgggcaatggcagacaggctgttcaaaactggctcgtttgaaaatgtgcaggtggttgaactcgacggcgtgaagcaatttgcaagaactagtggaacaatcaatcaactggccggagtcttttcctatatatacatggtcagtcattggaacagcaagaaactggccatcaaacccggtactccactaacttctatcgagcgcgtccaccgcgacttcctcttttataaggacttttacgccaatcagttccccactatactgtgtgaggggaaaacagataacacttacttgaaatgtgcccttaaaggtcttgcttcctcgttccctgcactcatcggtagaaagccggatggatcccccgactataagataaggttctttcgcgggtcacgacttgcagcacggctgcttagcttaagcggcggaaccgcgcagctcaaagacttcattgctgcctacagttcctggtgtgccaaattcaaatctcaggggggcgctaagcccgtgatcatcgtaatagacaacgacgcaggagcgacccatatctacaactggtatgccagcgtaaagaggatccccaaacccgacggaatgctgccttactactacgtcggccagaacctctatattgtgccaacacccaaagccgcgccagccgacatgtccaaaatagaagacctgtttaaggccgacgccttaggggtcattcttggcggtaagcgattcaaccctaacaacgatactgagaataccacagaatacggtaagcaatactttgcagaccacgttgttaaggccagacagaaaacgatcgatttcagcggcttcgagccgctgttggataccatctccaaaattatcttgtcccataccacagctgtcgccgcagctgctgagacatcattcgcggcagctatcgaggcctcaacagctgtggctccggtagcccctccaacctga

SEQ ID NO: 8270 - RNA, 1431 nt, synthetic construct
  source 1..1431: mol_type = other RNA
atgatcacaaacgctatcaaccatcggaacaagaatttggtcttgaacatcgacctggccgactttttcggctccatacacttcggccgcgtacgcggcttcttcctcaaaaacgagaatttcaaactgtcaccttctgtcgccactgttatagcccagattgcttgtcatgagaatgcgcttccacaaggctcgccttgctcccccatcctgtctaacatgattgcacacatcttagatatccggctagctaggctcgcagcggctgagaagtcatcttatagtagatatgccgatgacatcacgttttcaactaacaaaaaagagttcagcgaaagcttggtgcgatgcattgatcacgtgaaccatacctgggtggccgggacagcgctcgaaaacacgattaaccgcgcctggttttcaatcaatagcaagaaaaccaggctgcagtacagagactccagacagattgttaccgggctgactgtgaatagcaaggtaaacgtgagagccgagtatcatcgaacagccaaagccatgacccataagctgtttcggactggctcctttgaggtcctgaaagctaatgaacatggaatccaagagaaaactgcagggtcccttcatcaattaaacggaattctgagcttcatctacatgatcaatgattacaaccgtaagcttcgcgcccagaatccactcaacccggcattcacccccacccctgatcggttgaagagcatcgagaaatcccacaagaggttcatattctacagagacttctacgcctcaccagtcccgacaatcatttgcgaagggaaaaccgataatatttatctccgtgccgcaatatatagtttgagtgctaaataccccgaactggttgaaaccaataaagacggttctaagaagctgaaaatcaaactcttcaagtacaccgaacagataaagcacctcatgagtctgagcggcggaacaggtgaaatgaccaaattcatgacgagttatacaaaggaatgtgctttctttaaggcgcctatcggcctgaagcctgtcattatgctcattgacaatgatcagggggcaatagagatctacaaacagattcacaagatgaaaaagctggcaaagaaacccgatggttccgacgagctacactttattgggaggaatctgtatgttgtgccaacacccttaaataagggacagaacactatggtggaggacctttttgaaccaaagctacttaagactgagctgaacggaaagaagtttaatcctgacgatgctaagatgacctctaatgagtactctaagaatcactttgctaagtttgtggtgaaagcccagcaagagtcgattgactttagcggcttcgaacccattctgaacacaatcctgaaaatcgtgaagcagcacggaaggttgtga

SEQ ID NO: 8271 - RNA, 1773 nt, synthetic construct
  source 1..1773: mol_type = other RNA
atgtccgaactggccaagttaaagaaaattatcagccttcaggacctatcatctatgttgggattcaaatctagcgccctgtcttacctcctgtacaagaaacccaaaactgagctgtacaggactttcgaaatcagaaaaaaaacagggggaatccgaatcatctctgctccttgcccagagttgaaattgctgcagagcaacctggcccgcctcctgcagaaatgtgtcaacgagattcaagaggcaaggatcaatataaaccagaacaaaatccagaagcacagatcactatcccacgggtttaaaccaggtttctctattctgacgaatgcgaaaagccacaggaagaaaagggtcgtgctgaacattgatctggaggactttttcggcagtattcatttcggccgtgtaagaggattttttctgtccaaccgtgatttcaacttgtctcccaaaatcgccacaattatcgcacagatcgtgtgtcacaataattcccttcctcaggggagtccttgcagtcctattgtgagcaatctcatagcccatattctggacatccgcttatctaagcttgcattcgagaacaaatgcagctactccaggtatgctgacgatataaccttcagtactaaccaggaaaagcttcccgactcaattgcccgctgcacttgtgaagagagccacatctggatagcaggcaagaatctgcttcgaattatcaaggacagttggttctctattaacagcaagaaaactcggattcaatatagggactcgcgccaggaagtgacgggtctggtggtcaatagtaagctcaatataaaggcggaatatcaccggaccgcaaaatccatggctcatagcttgtttcaaacgggcagctttactatcctaaagagaaatgagtccaacgagctcgagagatgttatgggaccataaaccaaatcaccggcatcttctccttcatctactggatcaataagtataatcgcgagttaccaatcggagtccctcctgacgatgtcccacccccaaaaattgaagatctcaagtccatcgaacgaacacacagaaagctcctgtactacaaatacttcttcgccaatgagattccaacaatcgtgtgtgaaggaaaaaccgacaacgcatatctgaaggctgctatccagagcttggcccagaattatcccgccttagttgaggtcgataaagataacaacaagatcctcaaggtgaagtttttcaagtactccaaacaggtgaaatatcttctggctctgaccggtgggacaggcgatctcgaaaagctgataagtaaccatcccaaagagtgctcatcatttaaggcccgggcaggtaccaagccagtgatacttgtgattgacaatgactcaggcgctaatggtatttacaaccggctgcataagtttctaaagttgagcaagaagcccgacggctcccaggagttttactattacgggaataacctctacattgttccgacaccgttagcggccgacgggggacaaactatgatagaaaatctttttgaccccaccctgctgcagaccgttgtgaataacaagacctttaaccctgatgaaaaagcttcgtcaagtttgtattatggaaagagcaagttcgttgagaacgtagtaatgccgaaccggtccaccatcgattttggcggcttcacaaagctgctcgatacaatttctaaggtcgtggataatcacgccctcctggtttcacagtctaaaccttga

SEQ ID NO: 8272 - RNA, 1818 nt, synthetic construct
  source 1..1818: mol_type = other RNA
atgtcagaacttatcaaactgaagaagactaattcactctccgacctggctttgtatctgggctacaagccgaagtccttatcgtacattctgtacaagaaaccgaaggaggaactctacagaagctttgaagtgcccaaaaaaactgggggctccagaaccatttccgccccatgcaaggaattgaagctgctccagagtaaattgctagagaagctgcaggcctgtattaacgagattcaaagcctgaaaaaccttagaaaaaccctcacacagccctttaagactgaaaagaacacttctcttagtcatgggttcaagccaggattctctattattaccaatgcaaggcagcaccgccataagagacatgtactgaatatcgaccttgagaacttttttggaagcattcattttgggcgagttcgtgggttcttcataaaaaaccaggatttcaatctgcacccaaaaatcgctactatcttggcccaaatagcttgtcacgataacgtgttgcctcagggcagtccatgcagccccctcattagcaacctggtggctcatgtcctcgatatcagattagccgaactggccaaaaagaatgactgtacatattcaaggtacgctgacgacatcacatttagtaccaatgaaaagaagttccctagttccctggccgtgtgtgtgtgcgaagaggatcacatatggatcgctggcaagactcttgtggatctggtcaaaaaatgctggttcagtattaatcacgcgaagactcgtctacaatataaggactctcgccaggaggtaaccggcttaattgtgaattcaaaggtaaatgtgcgggcagaatatcaccgcactgccaaagccatggcccataggctgtttcactccggtaagtatgagacactcggctttgataaggacggactatcaaaaaaagtcctgggatcagtgaaccagcttagcggcgttttctcctttatctacatgatcaacaagtacaataggaaccttcggacaatcaacccattggagaagttccctaatccccagcctaagctcaaatcgatcgaggagacacatcggaaactgttgttttacaaagacttctatgcaaacgaagttcccacgataatgtgtgaaggcaagacggacaatgtttatctgcgaaccgcaatccggagcctaagtgagaaattccctgcactcattgagaaagacaaggacggagagaagaggttaaagctgaagatcttcaattacaccgatcaggtgaagtatctgatgcacctgacagggggtaccggtgacatggtcaaatttacctccaactatcccaaggagtgctctttctataagagcaaaggtggactgaaaccagtgattctcgttgtggataatgaccagggtgccagcgacctttacacacggatccagaaatttggcaagatgcccgtgaaacctgatgggtctaagccattctacttctattctaacaacctgtacattgtcccgacgcctttaacccctgatggaaaacagaccatgatcgagaaccttttcgatcccgagctgctcaagaccgaactggacggcaaaacatttaaccccgatgaaaaaacagcaacagcctccaactactctaagaatcactttgccgagtacgtcgtcaaggccaatcaaaagaccatagacttttcagggttcgagccactcctggctactatctccaaaataatccaagatcatgagcgcctgtctgcgctcgctacgttgcctctagctaccgcgagccacaaggtagcgaaagcatga

SEQ ID NO: 8273 - RNA, 1686 nt, synthetic construct
  source 1..1686: mol_type = other RNA
atgagtgagctgaataagctgaaggcttgcacaactatcggcgagctggcactgctgctgggtttccaggcaaagactttgggttatattgcttggggcctcccctcagccaccaagtactctacgttcgctatacctaaacggtccggaggtaaaagaacaatccacgctccaagccctcagttaaagctggcacagggtaaactgtcaatcctcctgcaggcatgcgaaaaggaaattgaggaggaattgggagtgaaacatactgtggcccacggcttcaaactagggcggtcaattctcacaaatgcagacgttcaccggagacagcggtatgtgctgaactttgatctatccgattttttcggcaccatcaatttcggcagggtgcgtggattcctcatcaacaatcgcaactttcagctccacccggacgtggccacactgattgctcagataacctgtcacaaagatatgttgccccagggatcccctacttcacctgtcatatcgaacctcatcggtaatatccttgatgtcaggctctctaaggtggctcgagccaacggctgtgcttatacaaggtacgcggacgatatcactatctctacgagtcagaccgaattcccaaaagccattgcgaatcaggttgactccacgtctggatggaccctggctaaagacgtggaacaagccgtcgccgcctgtgggttccggatcaaccatgccaaaactagattacttcatcatagaagcaggcaggacgtgaccggcatcgttgtgaatcgccatgtgaatgtgaataccgattatagacgagcagtcagggccatggtgaacaatctttgcagcaccggaacctaccaccgcaagaaaagcattgtcgccgccgaagataccacgacagtgtctgtagaggggtctaggccccaactggaagggatgctcgggtttttactgcaggtagagcgctatcgcagaagcgacgagttgccacccccaactttgagtagtaccgagttactcctgcatcgctttctattcttcactacattcgccagcaatgatcgacctacaatactgtttgagggcaagacagacaacatctatatttccgctgcgattaggcggcttcgggaatcttaccccctgctgatggcgccaggaagtaaggagttgctggtcaagcttctcccacacactaagacccgtgaaagaatctttaacctgacaggcggcgacaatcccctgacttccttcatagtgtcatatcgtgagaattacaggcgaattaaggggccgaaaggggcaaacccagtaatcgtcatctttgataacgatagcggtagcaacgccgttattgcagcgatcaaaaagcactacaagcttgacatgcccgacggggaccaatacattagagtttacgacaacttgtacgtactccttacctcgaaaaaggggagtggaaatcactgtatagagaattacttttcagccgccacactggctaagaccctgtctggaaagaaactatccctttccaacaagaagctcaaagacgatgagtatggcaaagcatggtttgctgaaaagattatcaaaccctactataaggacattaacttttccaacttcagcggcttactggatcctatctgcgagataattcaaggccattacccttga

SEQ ID NO: 8274 - RNA, 1686 nt, synthetic construct
  source 1..1686: mol_type = other RNA
atgggggagctggccaagctcaaagcttgtaccaacacgggcgagctggcccgcttactggattttcaaacgaaaaccctctcatacatcgcatggggaacccctagtgcggccaagtatagcgcctttgatatccccaaacgctcaggcggaaaaagggccatccacgctccgagtccccagttaaaactggtccagggcaagctgagcaaattgctgcaggcttgtgaaaaggagatagaggaggaattgggcgttaagcaccccgttgcccatggattcaaacagggacgatccatccttacaaacgccgatgtccacaggcggcagcgatatgtgctcaattttgacctgacagacttttttgggactattaatttcggcagggtccggggcttcctgatcgggaatcgcaacttccagctgcatcgtgatgtggccacaataatcgcccagatcgcctgccatgacgataaactccctcaaggcgcacctacatctcctgtcatctccaaccttatcggaaacatattggacatacgattgagcaaaattgctagagcacaagggtgcgcttattcaagatacgcagacgacattactatgtctacatcgcagccccagttccctcatgctatcgcccggcagctgcttgctacgcccaattgggtagtaaccaaggagatcgaagaggccgttaaagcatgcggttttaaaattaatcacgcaaagaccagactcctacatcaccgcagcaggcaggatgtcacagggattgtagtgaaccgacacgtgaacgttaatggagattaccggagggcaatccgggccatggtgaaccgcctgtgcagtaccggaacctaccatctcgaaaagacagtgctcgccgcgggacagactatgcttgcctctattgaaggtagcaggcctcaattagaggggatgttgggttttctcctgcaggtggagcgttacagaagatccgacgacctggtgccacctatactttcagcaactgagcgccttctacacagattcctcttttttactacatttgccgcgaacgatagaactgctattctcttcgagggaaagaccgataatatttatatctcctctgcgatccgcaagcagcgtgccacctacccagcactgattgctccagggagcaatgaactgctggtgaagctgttgccacatacaaaaaccagggaacggatcttcaatcttactgggggcgattcaccgctgactaacttcattgtcggttacagagataactataggaagataaaaggccccaaagggtcccaccccgtgattgtgattttcgacaatgacaaaggttctaacgctgtgataggcgctattaaaaagcactataagctggacatgcccgacggcgaccaatacatccacgtgtacgcaaatctgtatgtcctcttaaccagcaagaaaggttccggggatcattgtatcgaacattacttcagtgaggctacccgggccaagaagttgagcggaaaaaagttcaacctgagtaataagaagcttaaggatgacgagtatggtaaggcctggtttgcggaaaaaatcgttaagccatattacaaggacatcgacttctccggctttgcaggcctgctagatccaatttgtggcattatcaagtctcaccacccatga

SEQ ID NO: 8275 - RNA, 1686 nt, synthetic construct
  source 1..1686: mol_type = other RNA
atgtccgaacttgccaagctgagggcctgcactacaattgccgaagctgcccaactgctcggtttccaaaccaaaactctgtcattcattgcttggggtctgagcccagcgatgaagtattctgtgttcaacattccaaaacgatccggcggaaaacgcactattcacgccccgagccctcagctgaagctggcacaggaaaaattgtcaaggctcctccaggcctgcgaaaaagagattgaagatgcgctaggcgtaaagcacacagtgagtcacgggtttaagtcgggacgttccatactgaccaatgccgaggtgcacaagagacgtcgatacgtgcttaatttcgacctagcagatttcttcggcaccattaacttcggaagagttcgcggtttcttgatcacaaatcggaactttcaacttcatccagacgttgccacactcatcgcacagatcgcttgtcacgaggacaaattaccgcagggcgcgccaacatctccagtgatctctaacctgataggaaacatcatggatatccgtctgagcaagattgcccgagcacatggctgctcctatagcagatatgccgacgatataactatgtcgactagtcaccctcagtttcccggcgcgatagcccatcaaataggaacaccatttaaatggcagatcagtaaagaactggagactgctgtgggggcttctgggttcaagatcaaccacgccaagacgagattactgcacgctcggtcacggcaagacgtgacgggtattgttgtgaataagcatgtcaatgtgaatactgattaccggcgggcagtgagagctatggtgaacaatctttgtagcacggggacatattaccgggagaatcctgtactaggggtcgacaacaccaacatgacccttgtcgaaggctcaagacctcagctggagggcatgctgaactttctcctgcaggtcgagaggtataggcggagcgatcatctgaccccactggagttgagtgccacggaacgcctcttgcataggtttctgttcttcaccacatttgcagacaacgataaacctacaattcttttcgaagggaagacagataatatctacatcagctctgcgattagacgcctgcgggcatcttaccccctgttaatggcacccgggtctagggatctcctggtcaaacttctcccccacacccgaactcgcgagaggatctttagtctgaccggaggagactcccctttgaccaacttcattatttcctatcgcgaaaactataggagaattaaggctcccaaaggcaccaatcccgtaattgtgatctttgacaatgataggggctcaaacgggatcatctccgccatcaagaaacactacaagttagacatgcaggacggtgaccagtatatccgagtctacgacaatttgtacatactgctcaccagtaagaaagggagcgagaagcattgcatcgagcactacttctctgaggctactcgcgctaagaagctatccggcaagaagttatcactgtccaataaaaaactcaacgatgacgaatacggcaaagcttggtttgccgagaaaattgttaagccctattacaaggagatcgatttttccggatttgccgcactcttggaccctatatgtgagatcatccagagccatagcccctga

SEQ ID NO: 8276 - RNA, 1704 nt, synthetic construct
  source 1..1704: mol_type = other RNA
atgagcgacttgatcgccctgcgagcttgtactaccattgccggtgtggccaaactgcttggatttcaagccaagacgctggcatatatcgcctggggagcaccgtccgcaacaaagtactctgtgttcgacatcccaaagagatctggaggaaaaagaaccatccacgctcccgccccccaactgaagcttgcccagggaaagctcagcaacctcttacaggcatgtgagaaggaaatcgaggactcactgggtgtaaagcatagcgtgtcacatgggttcaaacgtgaaaggtctatactcactaatgctgaggtacaccgccatcagagatacgtgctgaatctagatctgttggacttctttgggaccataaatttcggccgcgtccggggatttctcataaacaaccgcaacttcaaactgcaccctgatgtagctacacttatcgctcagctggcttgccacgaagacagactgccacaaggctctccagcgtccccagtgctcagcaatttgatcgggaatattctggacatcaggctgtcaaaaatggccagagcccatggttgcgcctactcccgctatgcagatgatatcactttatccacttccaagcccgaattccctactgcgattgcccaccaggtcgacgcatttaaatggcaggccagtgaagatctcgagagtgctgtcggcgcctctggctttaagataaaccatgctaagaccagactcctacaccaccggtcaaggcaggatgttaccggaatcgtggttaaccagcacattaatttgaacagtgactatcggcggaatgtgcgcgccatggtcaacaagctgtgtagtacaggcagttaccagagggataagactatactcgctgccgacaatacaacaaaggtgtcggtcgagggcagctacgcgcaactgcaggggatgctggggtttatgatgcaggttgagcgtcatcgacgctccggaggtcccctaccaagcactctgtccgcaactgagaggctcctgcatcggttcctgttctacacgacattcgccggcaacgataagcccgtgattctgtgcgaaggaaaaaccgacaacatttatatttcagccgctgttaaacgactaagcgccagctatcctaagttaatcgagccggagtccaaaaatctgcttgtcaagatattgcctcacaccgcaacccaagagagaatctttaatcttaccgggggcgataacccccttgtgaatttcattatcgcttatagggacaactataggttaattaaggcgcctaaaggcgcaaatcctgtgatcgtcatctttgacaacgataatggctctaacgctgtgattgccgccattaaaaaacactttaagattgagatgcccgacgatacccagtacatccgggcctacgcaaatctgtatgtgcttctcacaaccaagaagggcacaggtaaccactgcatcgagcatttctttccgagcaaaacgctcaaaaaaacgttgtcaggtaagaagctgaatttgagtaacaaaaagctgaaagatgacgaatacgggaaagcgtggtttgctgaaaagatcgttaagccttactaccacgacattgatttcaccgggttctcgggcttacttgatccactctctgaaatcattacacatcatgcaaaccacaagatagacgagaaagggtga

SEQ ID NO: 8277 - RNA, 1710 nt, synthetic construct
  source 1..1710: mol_type = other RNA
atgagcaatctctccagactacatgcctgcacttcagttgtggacctggcgaatctgctgggctttcaggccaaagcgctgggattcctggcatggggcttaccacccacagcccgatattccacgtttgacatccccaaacggtctggcgggaagcggactataaacgcgcccatacctcaactgaaactggcacagcagaagctggcagccatcttgcagagttgcgaggcagagattgagctcttgctgggggttaagcggtcagtcgcccatgggtttaaacccaaccactcaattcttaccaacgcagccgtgcaccggaggcagagatatattctgaacttcgaccttgaggatttttttggcaccatacactttggaagggtccgtgggttcctcatcactaacaggtactttaagttacatcctgacgtggccactctgattgcacaactgtgttgccatcagaaccagctccctcagggtgctccaacatcaccagtgctgtctaacctgatcggtaagattcttgacgttagactctccaagcttgcccggattcatgggtgtgcctatacccggtacgccgacgatatcaccatgagtacatccgctccagagttcccagctgcccttgctactgaatgtgccaatagtctgacctggcaactaagcgctagagttacatctgctatcgcggattcacgcttcaagctcaaccctagtaagaccaggctccaacacagaagatctcgtcaggacgtgaccggcatagtggtgaaccagacactgaacgcaaattctgactttcgtaggagtaccagggccatggtagacaaactgtgtcgaacaggatgttaccagctggtcaaaccgactttgcttgccggagataccgtaagcgaacctagagaaggtactaatgcccagcttcacggtaaaatcggcttcctgttgcaagtcgaaaggtttcgccgcgctggagatcccgaaagccctcagctctcagcaactgaaaagctccttaagcgatttttgttctataccacgctggccaatgctgagaggcctgtcattctctttgagggaaaaacggatgagatatacctccggtgcgctattaaacgcctggcctccgcctttcctcggttagctgcggccgcaactggtgaagtgctggtcaatttgttctcgcacacccccacacgccagagaatctttggcctgacagggggagatccgccactaacaaacttcgtgaatgagtaccgagaacactaccgcccaataaaagggccgaagggcacacaccccgtgatcgtcttgtatgacaatgataatggcgccaacagcattttcgctgcaatggacaaaatctacaaggtgaaaatggcagatggcctccagttcatccgcatctacgacaatctgtacattgtgttaagcagtgcaaagtgcgctcccggaacgggccattgcatcgagcacttattcgataaatccgtacttacaactaccctctctgggaagacgctgagcttgtctaataaacccctgaaacccaccgagtatggcaaggcttggttcgctgagaaggtgattaagactaactataagtccatcgatttcagcggattccaccctctattggaagcgatttccacaatcgttaccacccataaggccagctcgtccccactgccatga

SEQ ID NO: 8278 - RNA, 1689 nt, synthetic construct
  source 1..1689: mol_type = other RNA
atgagcaaactcttggccctgcacctgtgtaattcggccagcgacgttgcacggctgatcggcttccaacccaaggcaataggatatctggcctggggaaccaaggcccgctatacaacatttgagatccccaagcgaagtggagggaagagaactattaacgctccaattctgcacctgaaaatcgcccagcggaagctggccgacctgctacaggaatgtgagagcgagatagaagaggccattggggttaaacagagggtgtcacacgggtttcggagggaccattgcatccttacaaatgccagtgtccacagaggcaagcgctacgtgttgaatcttgatttagaggatttcttcgggactattaactttggtagagtcaggggctatttcatcacgaacaagcattttcaactgaaggcggacgtggcgactctcttggcccagctggcttgtcatgactcaaagttgccgcagggcgcccctacttcccctgtgatttccaatctgatcggaaacattctagacattcgactgctaaagctggcgcgcgctcacggctgttcctacacaaggtacgcggatgatataacgatttccacatcagcccctacatttccagtggaaatagccctagagggcccaaccaacacctggacattaagcaaaacccttaatgattctgtgaagtcttctggtttcgcagtcaacgctaaaaaaacccgcctgcttcaccggaggagtcgtcaggatgtgaccggaattgtagtgaacaagtgcctgaatgtaaattccgactatcagcgacgtgtgagagtgatggtgcatcatctgcgctccaccggaaagttctaccggaaactctccagtttgacagctgccggtgataccgaggtacaatcacgggatggtactagagcacagctgcagggtatgctcggctttgtcatgcacgtggagaggttccgtcgaggagatgagcctcttcctgagaagctcactgggatcgagaagctttatagacgcttcttattttacacgcagtttgccaaccacgagatgcccgtcctgctgttcgaagggaagacggacaccatctacttgggagctgctattagggctcttgcccccgcgtaccctacactcatcgcagcaagcgcactccaagtacacatgctgcgcaacaccccacgaatcgaaagattattcgggcttaggggcggtggcgatcagctgtttaacttcgtcggagaataccatgaggaatataggcatatccagggcccaaaagggacacggcccgttatcgtggttgtcgacaatgacgccattggcagaaatatggttaaaaaagtcgaggggatgacaaagaccaccatacccgtgggttcgcagtggttccgggtccaagataatctctatgtagttctcacttctcctttcgaccccaagggcgccatgcactgcatcgaagcatgctttgaccccaaattcatggcaactgctctcgggggcaagaccctcagcaaaggatccaaaggcaagaaattggacccagctaaagaagtgagcaaggcatggtttgctgaaaaaattgttaaaccgaacaccaagagtatctctttcgctgggttttcatctctgctggattgcatcagcgacgtgataactaagcatgtgccatga

SEQ ID NO: 8279 - RNA, 1692 nt, synthetic construct
  source 1..1692: mol_type = other RNA
atgtccaaactgtttgccttacaacagtgttccggcgcgtccgatgtggcacacctcattggcttccagcccaaagccttggggtacgtcgcgtggggaacgaaggctagatactcggcattcgatatagccaagagatcggggggaaaaaggactattcacgcccctatcccacagctcaagctggcacaacagaatctagcagaacttttacaggagtgcgaactggagattgaggcggcacttggagtcaaaaagagactcagccacggattccgccgtgatcattctatcctgaccaatgctgacattcactgcgggaagaggtatgtcctgaacttcgacctggaggacttctttgggacaattaacttcggcagagtcaggggctatttcacaaacaataagcattttcgactcaaacccgacgttgctacgctgattgcccagcttgcctgtcatgaatcaaaattaccccaaggtgctcccacttctccggtaattaccaatctgatcgggaatatattggatatgcgcctggttaagatagcccgagccaacggatgcgcttattcccggtacgccgacgacattacattcagcaccagcgcacccgaatttcctactgctgtggcctctgagatcgcaccgcatgcttggactctgtcaaagactgtagaggactccgtcaaagcctcaaggttttctattaatgccagcaagacccgaatgctataccgccgcagcagacaagacgttactggcatcattgtcaacaagttcgtgaatgtcaacagtgattaccagaaacggctgagagtgatggtgcaccacctgcggagtagcgggatcttccaccgcaagaactcagtgcttggggctagcggtaatacctcagtgcaaaaagaagtcggtaccaggaatcagctgcagggcatgatcggctttgccttgcaggttgaagcttttcggcggtatggagcccctcctccacctgagctcacatcaacggagaggctctacaaacgttttttgttctacacccagttcgcagcccatgataaacctgtgctcctgttcgaaggcaaaactgacgtggtgtaccttaagtctgcaataaagagcttgtccgcgagttatcctaccctatatacagggagtgacatcctcgtccatctgctgaggcacacaccccgtatggagagactttttggactgtctggcggcggtcacccattgatcgcatttattaagaactaccatgaggaatatcggcacatcaccggcccacgaggcgccaaaccggttattattgttgtggataacgaccagataggacgcaatacaatcaacctgatcgaaaagattaccaagacagtggtagcccccggtacacaggccgtaaaggtgttcgacaacctccacgtgatcttaacttccccacacgataaggatagtgagcttcattgcatcgaggattgtttcgaccccgcatttattaaggctgaactggacgccaaaaccatctacaacgggaagaagatcaagaaaaataacgagtttgacccaagcatccatatatccaaatctgcattcgccgagacgatagtgaaagctaaggctgcggcgatcgattttgctggatttaagccactcctggatcacatcgccgccgtgatcgctaaatattga

SEQ ID NO: 8280 - RNA, 1938 nt, synthetic construct
  source 1..1938: mol_type = other RNA
atgattcagatagggttggcaaatgcacaccgcaagttggcgctcgcggcactgacttccatcgccagccaggccgcactatgcctgcttctgggcgttgccggccgtttcggctgtagaaggatagctgccagtgaagccatcgcacgttggatttgtccagtgacactgtctgcaacccgacggtcccttggggttcgggagagttcttgcaacccctcatttccagcttcacatggggacggaatgagtaagctcctcgcgctgcagatctgtaactcagctagtgacttggcccaccttatcggattccagcccaaggctctgggctacgtagcctgggggaccaaggctaggtactccactttcaacattccaaaaaggagcggcggtaaacgaacaattaatgcccccatcccgcagttgaagctcgcacaacagaagcttagctcactgttgcaagaatgtgagagagagattgaagagactctcaatgtccgacaccggctgagccacggcttccgtaaacaacactccattttaacgaatgctgccgtgcatcgggggcagcgttgtgttctgaactttgacctgcaggatttctttgacaccataaatttcggacgggtcagaggctactttatgaccaacaagcatttccgcctacgcccggacgtggcaactctcattgcccagattgcttgccacgacagcaagcttccacagggcgcccctacttctcccgtgatctctaacctcgtggggaacatactggacatgcgcctggtcaaaatcgctcgcgccaatggatgcgcctacagccgatacgcagatgacattaccttaagcacgtctgccccagagtttccagaagcaatcgccatcgagggccccacccattcatggaccctgtccaaagccgtgaacgatgcagtaaaggcctccggatttagagtcaacgcagctaagactcgacttcagtataggaggtctaggcaagacgtaaccggcattgtggtgaataagtgcgttaacgtcaatgcagactacaggagaagagttcgcgtgatggtgcatcacctgaggtcgagtgggaaattctatcgcaaaagctccggtctaagtgccgccggagatactgaggtgcagcagcacgaaggtaccatcgcgcatctgcagggcatgatcgggtttgtcctacaggttgaacgctttcggaggggagaagatcctgcgccagcggaactgtctggaattgagaagctctataggcggtttctcttctacacacagttcgctaaccacgagaaaccagtcttgatgttcgagggcaaaaccgatgtcatatatctggcctcagctatcaaatcgttagcagctgtatatcctacactgatagtgaagccccctgagctccttattcacttgctgagatatacccctagaatcgagcgcctgttcggcttaagcggtgggggccatcaactcatcactttcatcaagaattaccatgacgagtatcggtacatacaaggtcccagaggaagcaagccggtgattgctgtagtggataacgataaaatcggtagagatacgatcaatctggtggaaaagattacaaagacgcctatgcctacaggagcccagagcgttcgggtctatgacaatctgtacgtggttctgacatccccccacgataaggccggaaagcaccattgtatcgaggactgctttgatcctgaattcgtgaaatccgagctggccggtaaaaaaatttctaaggggaccaagggggtgaaacttgaccccgtcacagaagtgtcaaaagcctggtttgcggaaaagattacaaaaccgtccttcaaacccatcgattttagtggctttcagcctctcttaaacgagatagctgccatcatcgctaagcacgctccatga

SEQ ID NO: 8281 - RNA, 1770 nt, synthetic construct
  source 1..1770: mol_type = other RNA
atgtccaaactggccgccttgaaagcttgcagcagcattggggatctggccctcctgttgggcttcaaagcacagactctcggttatattgccagaggtctgcgagatccggcaaagtacacatcattcgatatccccaagagaagcggggggaagaggacaattcatgcccccgtgcccaaactgaaattagtccagcgtaaactatgtaatctcctggaggagtgtcagaaggagatagagtccacccttggagtcgaaaaaagactggctcacggattcaagaagcaccactcgatcttcacgaacgccgacgttcaccgtagacagaaatacgtgctgaacttcgaccttgaagatttcttcgggacaatcaatttcgggagagtccggggcttcttcattgctaaccgacattttaagctgaactctgatgttgcaatgttaatcgcgcaactggtgtgttgcaacgccaagctgcctcagggctctccaagcagtccaatcataagcaacctgatcgggaacatcctggatattaggctcgccaagcttgcccgcgcaaatggctgttcttattcgagatatgccgacgacattacgatctcaacttctttgcccgatttcccttccgccatagcttcattggtcacagggagccacgtatggactctgtcgtccgacgtgatgaataccattagcgcatgcgggttcaaactgaatcccaagaagactcgcttgcaatatcaccatagtaggcaggacgttacaggcatcgtcgtcaatcgccatgtaaacgtgtcctccgactatcggcgcaaactgcgagccatggtcgaccgacttcgcagcactggttcttttacctactctgcaacagagctcgacactgctgcctcaacaaaagtgagcgtgaagacgggaaccaggaaccaattacaaggaatgttgagttttgctctgcaggccgagaggtataggcaggcttcaacttccacccctgcgcccgaatgtctgacaggtaatgaaaagctcctcaggcggtttctcttctacaccacctttgctagtcacgagcggccactggtgatctccgagggaaagaccgacggaatctatctggcttctgccatccggtccttagccgccacctttcctgagcttgtggcgcccaagacaggtgtgcccgctgttcgttttcttcggctcacccggtcaatggaacgcctgtttggccttagcggaggagatggccccctgaaggagttcgtgcatcagtacgctgaagaatacagacacattaaaggccctaaggggtccatgccggtaatcgccatttttgataatgataccggcgcgaagggggtcttgggcctactcaagggtttttacaaaatgcctatgcctgccggggcacagagtgtgcatgttcacggcaacctgtacgtcgtactcacttctcctcatattacaggcgctccctcccactgcattgaagactgcttcgacgcggcaaccctagccataacactgagcggaaaaacgctgagcttggccaacaaaactctcggcccgaatgagtacggcaaggcttggtttgcggagaaggtgatcaagcctaatgcaaaaaccatcgattttgcaggttttaacggccttctaggagtgatttcacagatagtgaagggacataccccacctccagtggcaccaccggctccaagtagtgtggcactccctttagttactccaaaaccatctataccctga

SEQ ID NO: 8282 - RNA, 1743 nt, synthetic construct
  source 1..1743: mol_type = other RNA
atgagtgcattgacaaacatcaaagcttgcaacacattcaatgattttgctcggctgctaggctttaaggcgaatagcctggcctaccttctgtggggaatgcacgccgatacgaaatataccacctttgatattccaaagaggtctggtggcaagcgcacaatctgcgcccccaacccaaagctgaaactggcccagtcaagactgtcggagctgctccagcaatgtgagaaggaagtggaggtgattcacgccgtgaaaaaatcactcagtcacgggtttaagaaggaacatagcattttgaccaacgcagaggggcactgcggcagacgctacgttttaaatattgacctggaggacttcttcggcactatccattttggccgggtacgtggattcttcatcaaaaatagacagttcgcgctgaatcctaccatagccatgacaatagctcagattgcctgccacgagaataaactgccgcaaggaagcccctgttcacccgtgatctccaatttggtggccaatatcctggatatcaggttggccaagctctccaagatccacgggtgttcctacacacgctacgccgatgacattacttttagcacctctatgcccgacttccccgaaagcatcgcatttaagcagatcgactcgaaccattgggtactcggcaagccactggtcgacgcgattaaggcatgcaagttccgtatcaacctgtccaagactagactgcaatatcgacggtccaggcaagacgtaacaggcatagtggtgaataaacagctcaatgtgcgttcagagtaccgaaaggccctccgcgctatggtgtacaagttgagggagacaggaagcttcagccgaaactatagccagctcggagctaacggtgatacccaggttattgctaaagatgggtccagggcacagctatttgggatgctgagctatgtcattcaggtggaaaggtggcgcaaccggaggattgactcccctcctgagcggctctccgccaacgaatggcttatgcgggagtttcttttctacaccatgtttgcgaacgccgatagaccttgtatcgtttgcgaaggcaaaaccgatagtatctatatcagagaagcaatcaagaacctgggcgcctctttcccttatcttgctaaatcaaatgccggcaataacgaggtcattgtgagtctcgtcagaaacaccgacttgctggccaggcttttcggtctatctggcggggaaacgcggttaaaggactttgttaagaattaccgcgatgaataccgaaagatcaaaggtcctaaggggagtcatccagtcatcatcctcttcgacaatgatagtggcgcaaaagacgtcctgaacctgctggctaacctgttcaaagttattcccgttgtggggagacaatatttccatgtccacgacaatttatacgtgatgctaactagccctgtgggagccggacctcactacattgagaaatgtttcgatgcagccactcttgccatgacgcttggaggcaaaacttttaatccggctaaccagactttgggaccaaacgagtatgggaaaggttttttcgcagagaaggtaatagctcccaacgcacagtctatagacttctcagggttttccaccatgctcgcggaattttcctctattatagtgagtcatgctgcaccatctccatcattacccgtcccccctggtatggctccatctccgtga

SEQ ID NO: 8283 - RNA, 2142 nt, synthetic construct
  source 1..2142: mol_type = other RNA
atgagcgcattgaagaggctgcaggccgccactacattgtccgatgtggctaagattctgggcttcaaacctagagcattggcctacttaatcagagtcatgccagccggcagccggtataccgaatttgagatccccaagcgcatgggcggattcaggcgtatctgtgccccgaacaaaaagctggcattggttcagacacgtctggctgacctactaagcgattgcgccgaggaaatagccgctcagagaagcgtaaaaaagtacgtcgcacacgggttcaggcgcggtcatagcatcctgacaaacgctgacgtgcaccgcgggagaaaatacgtgcttaatgtggacctgctgaacttttttgatgccatccacttcggaaggatacggggattcttccatacatctcaggactttcagctggagctggaggtagcaacagtgatagctcagattgcttgccacgaggctaagctgcctcaggggagtccctgttccccagtgatatccaacctcatcgccaacattcttgacatgagactagcaccactggcgcaacactatggctgctcctacacccgatacgccgatgacctgtcttttagcaccaataggcgagaattcccggaagaactcgccgcacaggtgaaaggacaagagccaatttgggaagtcggaccagcacttctcgctgccatcaagacagccgggttttccattaatcccaagaagacccgcgtgcagtatgactgcagcaggcaggacgtgactggcatcattgtgaataagttcttgaacactccaattgagtaccggagaactctccggtccatggtgcaccatctgactgggaccgggaagttctatttaaaagatgtcgaccctgcgaccggcaaaaagagggagggatctcgagctaagctgcaagggatgctgggatttgcctatcaggtggagaaatggagatcacgcaggagtccagtggtttcgggggcccatactgccatggaaaaactcctgcagcggttcctctattacaccgaatttgcctctccttccatcccggcaattgttttcgagggcaagaccgattctctttatctccgcgaagcaattcggagaacaccctcagccatgcccatgctggctacgggtgtgggtggtggctaccgattacgggtgaaattgcaccgtgagtctgtcatcatgcgcaaattcttcaacctttcaagcggcggcgatcctctcaaaaatttcattcgggacttctctaagttatttcctaggattgttggacctaagggcgaaatgcccgtcatagtgctcatggacaacgactcgggttttagttccaccaagagcatgctgaaaaattgttacggtatctcagtgatgcctggggaccaaaaaatccacgtttttgagaacctctacatactgctgacgagtccttatgctgttggcgcctctcattgtatcgaggactgctttccatcgtccgtactggcaacaaaactgggttccaagtcatttagcaagagtaacgattttgatactagcacgcattacggcaaagagtggttcgcggagaaagtcgtcaagcctggcagtaagggaattgattttaccgggttcaatggcatcatcgatggagtaaaggccattttgctggaacacgccgtgtcattcaaagccaaggcgcttcttcccatggcggccccttctgtcggaggagcttctattgctgctccctccgccgccagacgactaatccccaaagtctccaaggcgccaaaaactttagccgcaagcaccccttcagtggccagcaagtcaagtacggcggttctcgatcctaccggcccagaggctcccaaggtacccaaagcaccaaatatccctaaggctcccaaggctccaaaagcacccaaggctcccaaggccccgaaagcccctaaagctcccaaagctcctaaggctccaaaggcaccaaaagcacccacagggcccgaagcacctaaggttcccaaggccccgaagatccccaaagcccccaaagccccgaaagcaccgaaggccccaaaggcaccaaaggctcctaaggcgccaaaagctccaaaggcgcctagtcccaaatga

SEQ ID NO: 8284 - RNA, 1719 nt, synthetic construct
  source 1..1719: mol_type = other RNA
actactacgatcggattcaagcccaaagcgttgtcatttataaccagagtgaccccaccagccgcacggtatattgagtttgatatccctaagcgctccggaggtacccgtcgaatctgttcccccaacaaacaactgagtctactgcagtcacgattggcagagctgcttaatgaatgcgaagtagaaatagcgcagcagagatcgatcaagagacatgtggcccacggctttagaaagggatactcaatccttaccaatgctgacgtccacagagggaggaggtacgtgctcaatatcgacttgacggatttttttggtaccatccactttgggcgggtgaaagggttcttcgagaactctctggatttccagctgaaagcagagcctgccttagttctagcacagattgcctgccatgagggcaaactgccacaaggaagcccttgcagccctgtgattagcaatctgatcgccaatattctcgacatgcggctcgtagccctctcaaaacggcatggttgttcttacacaagatacgcagacgatctgtccttctccacttccaaactgatcttctctgacgctctggcaacacccagtgaagcgaacaagagtatctggcaagctgggccggacttgattgccgccgtccattccgccggctttaagatcaacccactcaaaacccgggtccagctgtcaaggagcagacaagatgtgaccggcgttgtcgttaatcgacagctgaacacacccgtagagtatcgccgcacactgaggtccatggttcaccgcctttgtagcactggggaatacctcctgcaggagacagacccggcaaccggcaaacagaaggtgggaacacccgcccaacttcagggtatgctggggttcgcctatcaagtggaacgttggaggagtcgtaacgatgaaccagctagtggcgcccagacggctatggagagactgttaaaacgcttcttgtactacaaggagtttgcaagtcccatgctgactgctatagtgtttgagggcaagaccgattccgtctacctgcgggaggcaattaggcgctctggaaccgccttccctatgctaagcaaaggcgctggtacaactttcgagttaaaggttaaactgcaccgggaaagcaaaattatgaagaagctttttggactcacctctggcggcgaccccttgaagaatttcataaaatgttaccgatgggagttttccaggatcgatggcccaaaggggcagaatcccgtgattgtcctcatggacaatgatgacgggtttacaggaactaaggctatgcttttcaacgtctataagatcagcatttcttcaggccagcagttcatacacgtgtgggaaaacctctatatccttctctctagccctttcggtggagctaaacactgcatcgaagactgcttcactgcctccgtgctggccgtgaagttaggcataaaggagttttcgaaaacaaacgatttcgaccctaacatttattatgggaaggagtggctggctgaaaaggtagtgaagccaaactcagccacgattgatttttctggtttcgggaatctattaagtgcgttgcaggacgtgatcctgcaccattctgctaccatgctcagcgcaagggccgctaacacaggcgttccgagcctgcccatgcctctcccaattcctgggggaccagccccctga

SEQ ID NO: 8285 - RNA, 1758 nt, synthetic construct
  source 1..1758: mol_type = other RNA
atgaaaaaacccactcacatcgcacaactgcggagtcttgctgccctgcatgggcttgccaccctcctcggatatgaggcgaagggtctggcctacgtggtctatggtataaaggacaaggataagtatgtggatttcccgattcccaaacggtcaggcggcacacggattatctcggcacctgtgaagtcactgaagctgctgcagagccgcttatccacactgttggcggcatgcgccgaagagatcgaggtcgaaagaggtgggaaaaacaagtttttccacggctttcgcaaaaatcacagtattctgactaatgccacagtccacagaggcaagcgctatgttttcaatgtcgacctttcagacttctttggatctgttcacttcggccgtctgacaggatttttcaccaagaacagacactttgagctggaaccagtggtagctaggatacttgctcagatagcttgtcataacaccgtattgccccaggggtcgccctgtagtccggtgatctcaaacctgatcgctcatattttggacgttaggatggcacaactggctgcacgtaacgactgctactactccaggtacgccgatgatttaacattctctaccaacagaaacgagtttccgagcgcgatcgccactagggttggggattctaatgaatgggtggcgggtaagtctctcctaaagatcgtaaaggatagtcggtttgagctaaaccatagcaaaacacgcatgcagtttcacagattccgccaggatgttacgggagtggtggtcaacaagaaactcaacgtcccctccgaatacgtgcgcgatgtacgagcaatggtgaacagctttgtcaagaccgagaaatttactcttcggaagaaatataggaacgatacaggagcctgggttctcgagacggtccagggaacgaaagaacagctcaggggtatgctgtccttcattgacaatgtacgcgtgtttcctcagaagaagctcgccatggaaaaaaaggacaaaagagaacaacgaattccacgagtggagttcaaagacatggacggagcctctcgtatgtaccggcggtatttgcagtacacccaattctttaatccagaactcccctttgttatctgtgaaggcaaaacagataatgtgtacatcaagtgcgctctacgacaattagccggcacttatcctcagcttgtttcaaagactgcctccgctaataagctgctgctgaacttcttcaactataccaaggtggcggacaggatcttacaccttggggggggcactggcgatttccagactttcatcggaaattatgggtctgagtttaagggattcaaatccgagaagaagaggaatcctgtgattctcctgatcgataatgacgaaggcaccgccaaaatcttttccagcatcaagacagccatcaagtctaaaagtcccgtcgatgggtccgagccattttaccatattgctgacaatttctacgtggtggctattcctagaaaaggcggcaaaagcaccacaatagaggactttttcgaccctgccctgttgaaaaccaagctgggtaccaaaattttcagcgggaaggacgggttcgatccagctaccgagtacggcaagcactactttgccgagtatattgtgaagaaaggacagaaaacgattgacttcagcggcttccatccaatactcgagagactggtggcagtgttgatggcacatgcagtcaaaccttga

SEQ ID NO: 8286 - RNA, 1758 nt, synthetic construct
  source 1..1758: mol_type = other RNA
atgaaaaaccccactcacattgctcagctgagggcccagacttccctgcatggtcttgcccgtctgctcggttacgagcccaagggactggcttatgtcgtttacgggatcggcgacgcgtacaagtacgtggacttccccatcccaaaaagatcgggtggcactcgcatcattagtgcgcctgtgaaatccctcaaacttcttcaggctcgggtgtctacattactcggggcttgcgctgaggagattgaagtggaacgcgggggtaagaaccgatttagccacgggtttcggaagaaccactcaatccttacaaatgccacggtgcaccgcgggaagcgctatgtatttaacgtggatctacacaacttcttcggcacggtccactttggtagagtaagcggatttttcgcaaagaacagacattttaagctggaccctgtggttgcgaggattctcgcccaaattgcatgccataacaaagtcctgccacaaggctctccgtgtagtcccgctataagcaatctcatcgcacacatcttggatgttcggatggcccagttggctgcacggcacgactgctattactcccggtacgccgatgacctaactttttcaacaaatcggaaggaattcccggagtcgatcgcaactcgagtttcagacagcaatgaatggattgccggaaaaagcttgctgaagataattaaggattctagattcgagcttaaccactccaaaaccagaatgcagtttcataggtttcgtcaggacgttaccggtgtggtggtcaacaagaagttaaacgtcccaagcgagtatgtcagggacgtgagagctatggttaattctttcgtgaaaacgggccaattcacactgagaaagagctaccgcaacgatgcgggcgcatgggttgtggaagaagtagccggaaataaggtacaactcaggggcatgctctccttcatagattctgtcagggtgttccctcaaaaaaagctggcaatggaaaagaaagataagcgcgagcagcggattcctagggtggaactgaaggacatggacggcgcctctcgaacatataggcgatacctgcagtacacccagttttttaatcccgaactgcccttcgtgatttgtgagggcaaaacggataatgtctacatcaagtgtgccttgcgtcagctggccgacacatatccacagctcgtgtccaagacagccagtgagaataagttgctcctgaacttcttcaactataccaaagtggccgatcgcatcctgcatttgggggggggcaccggagatttccagacattcatcggaaattatggatccgagttcaagggcttcaaaagtaaggaaaaacgaaacccggtcatcctgctcatcgacaatgacgaaggaaccgctaaaattttcagctcagtcaaaactgcaactaaaagaaagagcccagtggatggcagtgagcctttttaccatatagcagacaatttctacgttgtggccatccctaggctgtcaggaaaatccaccactattgaggacttctttgatccaacactgctgaagaccaaattaggcaccaaggtattctcaggcaaagacggatttgatagtgccaccgagtatgggaaacactattttgcagagtacatagtgaagaaagggcagaagaccatcgatttttctgggtttcatcccatccttgagcggctagtggctgtcttaaccgcccatgccgctaagccttga

SEQ ID NO: 8287 - RNA, 1785 nt, synthetic construct
  source 1..1785: mol_type = other RNA
atgtccgccgatatactgcctctcacaatgaaaacccctacacacattgctagactgaggtccatcagctctcttcactcgcttgcacgcttgctggggtacgagcctaagggactagcctatgtggtgtacggaattgatgataagtacaagtacactgactttcagatccctaagcggagaggcggcgtacgaaccatttccgcaccgatcgagaaactgaagttactccagagaagggtcgccaccttgcttgatgcttgtgtggaggagattgatgccgaaagaggggtgcggaacacactttcacatggattccgtaaaaaacatagcatcctcacaaacgcagcccctcatcggaatcgcagatatgtgttcaacgtggacctgcacaattttttcggcactgtcgactttggccgagtagtgggttacttgaagaagaacaaacatttccaactcaaccccaccgtggcccgtatgctcgctcagattgcctgtcaccagaaagtacttccccagggatccccatgcagtcccgctatcgcaaatctgatcgcacacatactcgatattaggctgggacgcctcgccgcgaggaacgattgtcattactcacgttatgcggacgacctcacttttagcaccaataggccggtgttcccaagcgagatcgccaggagagtgggcgacacgaacgaatgggttgccgggaaaatcctgctcaagatcataaaggaatcacgatttgagatcaacccagagaagaccaggatgcaattcgcaagattccgccaagacgtgaccggcgtcatcgtcaatcgaaccctcaatgttcggcgcgagtatgtgaaaaacgctagagctatggtggattcttatgttaccaagggcgtgttttatagcgagaagcaataccgggacgagaagggagcgtggacgaatgaactggtcgatggaaccgtgggccagctgcgagggattctgtcttacattgactcagtgcggctgttcgaacagcagaagcatgcttctgctaagaagactaaaagagactaccgcgtgcctcgcgtcgagattaaggacatggatagtgcagcaaggacttttaggcggttcctgttgcatacccagttctttaatccagaaaaacccctgataatctgcgaaggaaagactgataaagtttatatccagtgcgcgctacgccaattagttgatgcacacccgcagctggcgacacggacaaaatccggggttgatatccacgtctcttttttcaatttcacgaaagtggccgatcgtatattaagactgggggggggtacgggcgactttcaggacctgatagccaaatatgggacagaatttaagggtttctacgctaaaggccagcgccaacctgtgattctactggtagacaacgacgacggtactaagaagattttcagtactgtgaagaccgcaacaggaagcaaaaccgccattgacggtagcgcttccttttatcacattgccgacaacttttatgtcgtcgccgttccacagttgggcaaaaaagatacaaccatcgagaactttttcgatccagttgtacttactgaacggttaggcacaaaagtcttcagtggcaaggaccagtttgaccccgccacacagtacgggaaacaccacttcgctgagtacgtagtgaagaagaagcagaatactatcaatttcgcaggttttgaacccatcctggccaggctggatgctgtcttgaaggagcatgccgccaaaccctga

SEQ ID NO: 8288 - RNA, 1758 nt, synthetic construct
  source 1..1758: mol_type = other RNA
atgaataagatcacacatattgctaggctccgcccacttagttcgctacatggcctggcccatctgttggggtacactcccaagggcttagcctccatcgtgtatggcactcctgactcctcaaaatataatgactttcggattaggaagcggtcaggcggaactagacttatttccgaaccaaacgatcgcttgaagctcctgcagcgtagactggcgaacctgctgtccgaatgcattgacgacatcgactccgaacgtagagtaacaaactcattcgcccatggatttcgcaagaaacattccatcctcacaaatgcctctcggcaccgacgcaaaaggtacgtttttaacgttgatttgcacgatttcttcgggactgtggatttcggcagaattagcgggtaccttaagaagaacaaacactttctattggacgagcgagtggcaaggatgctcgcacaaatcgcttgtcacaacaaggtgctccctcagggctcaccctgttctcccgtgatggctaacctcatcgcccacatcctggatgtgcggctggctcggttagccgcgctgcatgactgctactacagcagatatgcagacgacctgactttttctacaaatcgagccgacttcccaagctcaatcgccaaaagggtcgaggattcaaacctgtgggttgcgggaaaggcgttagagaaaattgtaagcgagagtcggtttcagctgaacccttctaagaccagaatgcagctgaatcgatttcgccaggacgtgaccgggattgtcgtgaacagcggcatcaatgtccgtagcgaataccaaaagaccgttcgggccatggtgcactccctggtcaccaaaggggtcttccatatacaaaagctccatagggacgacaagggcgcctgggttcgtgaaaagaaagaggggaccagagctcagctaagaggaatgttgacattcatagacaacgtcaggctgtttgagaagacaaaacgcctgccccccgatagggctcaggatcaacgcggacagaaaggagatccggctgagatggattccgccactagaacatttcgccgatttcttatgttcacgcagttctttcaccctgagaaaccattaattctttgtgaagggaaaacggataaagtctacattcaatgcgccctccgacggttaagcacagcatatcctctactgagttcaaaatccgcaaccaagacaaatatacacgtaagtttcttcaactacaccaaaatagcaagcagggtcttgagtctgggcggagggaccggtgatctcaatggtcttgtagccacctacggatctgaatttgcaggcttcaaatctacaacgaaaaggcacccagttatcctgctggtggacaatgatgagggcacgaagggcatttttagcgccgtgaaaactcggaccaagagtacttcgccaatcaccggtaatgaaccttactatcacgtggcagataacctctatgtggtgtcccttccgctggtgaactctaatatggtgaccatagagaacttctttcccaagcatgtgagagacaccaagctcaacggtaaggtcttcagtggtaaaaatcgctttgatgccaagaatcagtatggaaagcacgtgttcgctgagcaggtcattaagaaaatccagaatgctggggacttcagcggtttccacgacatcctgatgcggatccaggctgttttggtggtacactctgcaaagaagccctga

SEQ ID NO: 8289 - RNA, 1752 nt, synthetic construct
  source 1..1752: mol_type = other RNA
atgaccaccactcatatccagaaactgcaggcgactgctggtctgtattcattgtctgatttgctggggtatagcgctaagggtttcgcttacattttgcacggcattagtgacgatcataagtacatccaatttgacattgccaagcgttcaggaggcaagcggattataagtgctcccatacccgagctcaaaatccttcaacggcgactggccgagttacttgaggcttgcgtggtcgacattgataatagcagaaagcttaagaacaccttctctcatggctttcgcccaaaacacagcataatgactaacgccagtttccaccggaagcgaaggtgggtttttaatgtcgacctccaggactttttcggaacaatcaattttggtcgcatttgcggcttcttcgcgaaaaacaaatacttccagctggatcccactgtggccagaatcatcgcacaaattgcatgtcacgagaagaaactgccacagggcagtccatgcagtcctgtgatcgctaatcttatcgctcacattctggatgtgaagttggcccgcctggcttcctcctacggatgtttctatacccgttatgcggatgatttgaccttctctaccaactcagagatattcccagagttaatcgccagcaggatcgacgggtccaacgagtggacagccggaaagaaactgctgagaatcattaaagattgtgccttcgagattaaccctgccaagacaagaatgcagtttcgcgagttcaggcaggatgtcacagggctcgttgtgaatagcaaaattaatgttaggaccgattacgtcaaatccgcgagagctatggtgaattccctcgtggaatccggtgaattttacataaagcgtagatttcgagatgaaaacggagccttccgggatgagacggaaaagggagagcccgacgtgctcagggggatgctcaccttcatcgactcggtgcggcagtttgacgccctgaagaatgtacgcgacatcgacaaagctgaccataggccaacccgccccctcgcaaaagacctgtcatctgcagaccggacgtttcgcaggttcctcctttatacccaatttcacaacccacagaaacctctcattatctgcgagggcaagacagacaaggtctatatacagtgcgccctaaaacagcgaaaagacaaatttcccgacctgagcaaaaaagaagatgaaacagatgggaaactgtcgttttttaactacagcaaggtggcagacagaattcttcacctagggggtggcacgggcgatacagatgcctttatcgccaggtacgggaaggagttcaaggggttctttgagaacaagaaacagcatccggtaattgtattagcagataatgattctggcgccaagtcaacattcggcgttgtgaaaaaggctggaaatatccccagtgtcgatggatccgcgccgtactactatatatgtcggaacttgtatatcatcttcatccctaagattgatggcaaagacactaccatagaagacctatttgacaagagcgtcagagaagcagaactgaacggaaaaaagttttctggctctgacaagttcgacgcaaaaactgagtacgggaagcacctgttcgccgaatatgtgatcaaacctaagcaaaaggagattgacttctccaagtttgattcaatcctgaagagcatcgttgacgtgctggcagatttcgaaaagcggcagcctacttga

SEQ ID NO: 8290 - RNA, 1755 nt, synthetic construct
  source 1..1755: mol_type = other RNA
atgacaacaaggctggcttcattgaaggccgccaactccttgcacacactggcacaggttctcggttatagagcgaaagggctcgcttacgtggtccacggcatccctgattcaataaaatacaccgacttccagattaagaagcgttccggtgggcttagaacgatctctgctcctattcccgaactcaagaagcttcagaaacatctggcccacttactggaggattgtgctgcggagatcaactcaacgaggggaatcaagaaaagcctgtcacatggttttcggaggaagcactccataatgactaatgcagctgcccaccgaggtcgcagatacgtgttcaacattgacctgcaggactttttcggcacaataaattttggacgcgtttggcgattcttcgaaaaacatcgggagttccaactaaatagcgcggtagcgcgcaccatcgctcagatagcttgccacaataaggtgctaccgcagggctctccatgttctcccgccatatccaaccttattgggcatgtgctggacatccggatggcacaattcgccgcaaaagtgggatgccattactcaagatacgctgacgatcttacatttagcactaataagaaggagtttcctgccctgattgccacccgcatgggggataccactcagtggtcccctggcacgaagttaatacgtgagatccgacggtgcggattcgaactcaattttgccaagactcggatgcaattcaaggactttaggcaggacgtgacaggagtcatcgtgaatagtaaagttaatgtccgcaccgaatatgtaaagaacgtaagggccatggtccacgcattggtgacaagaggagaattccagatccgtaaagttttccgagatgattcgggggcatggactgaggctgtggcaaaaggcagtgaagcccagctgaggggcatgttgtcgtttatcgacagcgtccgacactttgaagaatgtagagacactcctaagaataacggagtgccggattacaagctcccccgtagttctctggacgatatggacggcccagcacggatttaccgcagatttttggtctttactcaatttttcaggccagtgcagccactgattttctgtgagggtaaaaccgataacgtgtacatcagatgcgccctccggcagctgtttgccaaataccccgctctggccgccaagaagaagagcggcgagattgagttcaaaatcgacttcttctcccatagcaaagtcgccgacaggattctgcaccttggcggagggaccggggacatgtgcgatttcattgccaaatatggctctgaatttaaggggtttaagcatgacggcaaacgcaacccagtcatcatactaatcgataatgattccggcgcaaacaggatctactccgctatccggtctgccatcaagagtaaagataccattgacggatctaaaccatattatttcgtgcgcgataacctctatattgtgcctgtgcccatgctgggtggcaaccccacagccattgaggacttctttgagaagaaagttctggacaccgtgttaaatggaaaaaagttcagtagagcagacaagtttgatgctgcaacccaatatgggaaacacttgtttgccgagcacgtcgttaagaaggggcagaagagcattgatttcagcaacttcgcagctatcctcgaccggattaacgatgtactgaccatccatgctgcgaaaccctga

SEQ ID NO: 8291 - RNA, 1746 nt, synthetic construct
  source 1..1746: mol_type = other RNA
atgactcgtctgaagaaactcaaagccgcctcgtcactgcacgcctttgccgatgtactcggatacaaggctaaggggttggcctatatcatccatggcattgacgatagcaaaaagtacaaggactttgagatcaaaaagcggagtggtggattgcggaagattagtgccccaatccctgaactgaagcgactgcagaagagcgtggcccatctgcttgaagactgcgtctctgagatcaactcgcaccggaagaccaagggcacattgtgccacgggttcaggccaaaacactctattatgacaaatgcagccatccatagaaagaagcgctatatcttcaacatcgatctgaaggacttttttgggacgatccatttcgggcgagtttggcggttcttcgagaagaaccgggattttgcgcttgatagtagcctggctcggaccattgcacagattgcgtgtcataacagggaactcccacagggctcaccttgtagtccttccatctccaacttaattggacacattctagatatccgcatggcaaagctggcagctcaggctggctgtcaatactcaagatatgccgatgacctgacattttctaccaatagaaaaaacttcccccccgagatcgcgcaaagagtgggcgacacgaacctgtgggtgcccggtaaacaactggctaatgaaattaaaaggtgccgctttgagataaatcctgcaaagactagaatgcaatttaaggacttcaggcaagatgtgaccggcattgtggttaatagcaaacttaatatacgggcagagtatgctaagaacgtacgtgcaatggtgcacagcctagtgactcgcggagagtttactgtacgcaagaccttcagggatgaggccggggcctggattgaggaggtcgaagctggcactgaagctcgcttgagagggatgctctcattcatagactccgtcaggttttttgaactgcatcgacagacaataaagaaatccgttgcatccgacagcagattgagtagacggcctgtgagggaaatggacaggcatgagagggtttaccgtcagttcttgttattcagcaccatttttaggcccctccagcccctcgttatctgtgaaggtaagactgataatgtgtacctgcgctgcgctctgcagaaattatctggaaagtatccaaaactggtcaatgtgtccggggcaaagataacgctccagctgaacttctttaactactctaacacaaccgaccgaattcttcatttaggtggcggcaccggcgacctcgccgaatttatcggcaattatggggctgccttcaagggttttaaatactcagagaagcgtcgaccggtcatagtcgtcgtcgataatgacagcggcgcacagcccatcttcgctgcgatcaaaaaggctacattcagtaaatctgccatcgatggatccctaccttattaccacattcgggacaacctttacgtagtgccggtgcccaaacagaagggaaaagagacagcgattgaggactttttcgaaaaggccgtgcttgacaccaaactgggaggtaaggagttctcacgccaggataaattcgacccagccactcagtacggcaaacacctcttttctgagcacgtggtcaaaaaaaataaagggagcatcaacttcgacggattcgaaccagtgctggatagaatagttcaggtgctggatgcccactccgtgaagtga

SEQ ID NO: 8292 - RNA, 1806 nt, synthetic construct
  source 1..1806: mol_type = other RNA
atgtatcgtagtttgtgccaaggagtgtccgtagttccatttcagaccatctacctttttgagaacatgagcaggctggcttccctgaagagcgccacatccctccacgaccttggacatattctggggtacacagccaaggggctggcgtatatcctgcatggcgtgcccgataccgctaagtatagtgaatttacgatcaagaaacgcagtggagggtccagggtgatttctgcccctatcccagaattaaagagattgcaacagcatctcgccagccttctgaacgattgcatggtggagtccgacgcaaacagaggtgtcgtaaacaccctatctcacggattccgccctaaacattcaatcatgacaaacgcagcaatgcaccgcaaacaccgttacgttttcaacctcgatcttaaagacttcttcgataccataaacttcggacgggtctggaagtttttcgagaaaaacagggaatttggtctgaataccgcaatggcgcgtaccattgctcagatcgcatgccacaaggggactctgccacagggctctccatcttcacccgtcatcagcaacttaattgcgcacattctagacattgccatggtgcagctggcagctaaagccaagtgtcattattctcgctacgctgacgatctgactttttcaacaaatgagtcagaatttcccggcctgatcgcaacccgcatcggtactaccacagaatgggctatcgcccccaaagtcgtgagagagatcgtacgatgtggcttccaagtgaatccgctgaaaacgaggatgcagtataagactcgacggcaggatgtaaccggcattgtggtgaacacaaaagtgaatattcgctccgagtactccagagatgtgagggctaaggtcagtagcctgattacaaaggacacgttctcgatcaacaaaacattccgcaatgatacaggggcctggaccacggagacaaaggatggaactgatgctcaactgagaggcatgctctctttcattgactcagtgcggttgtttgaaagaagacgaaatgaacagatcccaccggagacacacattcctaggatcgaactgaaagagatggatggcaatctgcgggtttatcgggcgttcttgttatttactcagttctacagacccgtccgacctctcattatatgcgaaggaaaaaccgacaatgtttacgtgcggtgtgccctccatagtctagccgctgcccaccccatgcttgccaaaacgaccggaaagataagcgagtgtctcatagactttttctcctacagcaagaccagcgatagggtgttgcatctcgccggtggcaccggtgacttaggtaactttatcgccaattatgccaatgagttctcaaggttcaaaaaaatcgacagtcggaatcctgtgatcatcttgattgacaatgactctggcagcagcaagatattctccgtcattaagaaagttactgagtccaccgttaatgtggatggcagtctgaagttttaccctattaaggataatctgtacgtcgtccctatcccgaagattggcggcaaagaaactactatcgagcacttttttaccaagaagattcttgggactaagctcaacggaaaagtgttttctgggacagacaagtttgacccagctactcagtatgggaaacacctgttcgccgagtacgttataaaaaagaacaaggacgacatcaacttttcaaagttctcgatcatactgaagaacatagaagcagcactcaaattccattatgggatgccctga

SEQ ID NO: 8293 - RNA, 1821 nt, synthetic construct
  source 1..1821: mol_type = other RNA
atggctgcctttaagattacaccgcctaagactacactggagcttttccaaacagctacctcacgcgcagccctagcctcattactgaatatcgagcctaaagacttaacctaccttctgtatgtgctgaaggacgaagataagtactccgtattctctgtaccaaagcgggggggcggggagagacagatttccagcccaatttctcagattaagagcctacaggaaagactggctgacagcctggagcgctgcataaacgacatcgagttgctgaccggtaggagcaattccgcaagccatggctttcggccagagaaatccatactgaccaatgccagcgtacaccgaaataaacgctttgtattcaatctagacctcgaagactttttcccaactataacaggcagaagaatcagagggtttttgatcaacgacaagaacttcaaattccacaaagacgtggctaccaccattgcccacatagcctgtctcgatggtaaactccctcaaggctctccatgctctcccgtcataagcaacttgattgcggggattcttgattttcacctcgctaggctggctaaggcctgtggttgccgatacacaagatacgccgatgacatcaccttttccaccaacaagaaggatttccctaaagagatcgcattttgtgatgttgagcacacccatatatggaaagtcggtaagcagctccgaggcctgattgcgaagagtggcttcgtcatcaatgagaagaagactcggatgcagtattatacatctcgtcagcaagtcactggtttagtggtcaacaagaaaatcaacgtgaccacggaatacaggaaactggtgagggcttacgtctttagtttgatcaaccatgggaagttcacccttaaaactacaactaaggatgcaagcggccaagttaccattaccacggcaacaggaactcgtgcccagctgcatggcatgctcggtttcatccattccgttgataacgtgtatcgcgcagaggtcaaactgcacccctacaactacctaggacaccagcagagcacgaaggaatcagtgggaaatcaggctatctaccgacgcttcctcctgtatacgcggttttatgacaacgacactcccttgatcgtgtgcgagggaaagactgacggagtttacatttcaaacgcagttcaccagtcgaaggcccatttccccaagctccttaaaaagaacgatgatggcaatgacgtcctgtcgttccagctctttaagtatgcccgtaagcacaaaaaaaaggaccatgtgtatctccctaactttagtaccgcgtccatcttgggcgtaggatctggggggggcggaaatttagggaatctgatacggacatatcacaaggaactggagaaattcaagacaccagtgggagcttcacccgttgtgttcatcgtggacaacgatgatgggggacgggcggtgtacaaagtcatcaaaaacatcttgcatatcacagtgtccggccacgaaaggtttgtccacctctttgccaatctgtatatcgtgcctgtgccctttaaagggagtaaggacacttctattgaggacctgtttagtgaagttgacatttccaaaggacttaatagtcgctcattcgatttctctaagaagattgacgccagagcagctgtgggtaaagccgattttgcatacgaattcgtggctaaacaggccgagaggatggattggggcggcttctatccgctgctgcaaaatatttgtgatgcccttgccgattacgcaaaatacaggaaggaaaatgtgtga

SEQ ID NO: 8294 - RNA, 1806 nt, synthetic construct
  source 1..1806: mol_type = other RNA
atggccgccttcaagttgcctgccccaaagtcagcgctggaaaggtttcagtatgctagtagcagggctgccctggcatcacttttgtctattgagcccaaagacctgacttacctgctgtacgtgctgaaaaatagtgagaagtactctttgttctccatccccagaaaagggggtggcctgagggagattaacgccccgatacctaagattaagtcactccagcgtcgcttggccgaaggtctagagctgtgtgttgccgacattgctcgcttgactggacgctcaaattcagctagccacggattttgcccggggaagagtatactgagtaacgcatccgttcataggaacaagagatacgttttcaacctcgacctaaaggatttctttcccactatcaccggcggacggatacgggggttcctgatcaacgacaagaactttaaactgcacaaagacgtcgctaccacaatcgctcatattgcgtgtctggagggcaaattaccccagggcagcccctgctctccagtcatctccaaccttatagccgggatcctggattttcatcttgcacgcctggccaagaccaacggatgcagatataccaggtacgccgatgacataacattctccaccaacaagaaggactttccaaaatctatcgctttctgtgaaaaggatgcccacagatgggagatcggaaaacagctccagggcctgattatcaaaagcggcttcgtggtgaatgaaaagaaaacccgcatgcagtacaagaccagcaggcaacaggtaactggactggtcgttaacacaaaggtgaatgtcacgcgtgaatatagaaaactcgtccgggcatacgttttctcacttgtgaaccatggccgctacacaatcaagacagtggtcaaagatgataaagggcgtctggttgaggaaacagaagaaggccggcgatcccaactacatgggatgttgggttttatccattccgttgataatgtgtaccagagcgatgtgagagatcacccatacaattatcctggccagcaacggtctaacaagaacccaacggggaatctggccatctatcggaagttcctgctgtacaccctattctatgacaataagatgccccttattgtctgtgaaggcaagaccgacggagtatacatcagcaatgccgtacaccagtcgaaggctattttcccacagttgctcacgaagaatgatgacgggaaagacgtgctctcttttcaacttttcaaatatacccgacagcacaaaaagaagaagtctgtgtatatgccgaacttcagtaccgcctccatacttggcgcatcgtccgggggaggtgggaatttaggaaatttaatccgagcttatcacaaggagttaaatagctttaaagcccctattggagatcaccctgtcatcttcattgtggacaatgatgacggtggtagaacagtgtacaagattatcaaagagactctcaagatcgcaatgtcaggccatgaatcttttgtgcggctgtttgcaaatttatacattgtgcctgtgccctttaacgggaacgcccaaaggtccattgaggacctctttactgagactgatattagtaaaggcctcaacggtaaacgattcgactttagcaataacgcaaatagcagcgcgtctgtgggcaaagctgaatttgcatatgagttcgtggctaaacaggcagagactctcgactggacaggattccactccctgctcaacaacatctgcgccgtactggtcgattatgagacaagtgcgtga

SEQ ID NO: 8295 - RNA, 1791 nt, synthetic construct
  source 1..1791: mol_type = other RNA
atggaactgctgcaggccgcaaagtctagacctggcctggccaaactcctgcaaatcgagcacagtcagctgacatacatcctgtacaaaaagagcgatgcagagaaatacaaaacattcgaaattcccaagcgtggtgggggactgaggacaatctccgcccccatagccgagttaaagctcttgcagcggcgactcggagacgtactgtatatgtgtgctgtgaatgtggagaatagcaccggtcgaatcaactatagcgcccacggctttaagccagatcggagcattttaactaacgctgccgtgcacaggaataagagattcgttttcaacgtcgatcttaaagattttttcccgactatatcagcaaagcgcatcagggggtacttaatcaatgataagtactatcgagtggtcccagaggtagccaccacaattgcccatatagcttctagagatggtattttggctcagggcgcaccgagttcaccagttatctccaatctcattgccggaattctagactttcatcttaccagactcgccaaatcttgcggatgtcgttacactaggtatgctgacgatatcaccttttccacgaataaaaaggagtttcccaaggaaattgcccgcctggtggcaggggccgaacataactgggaaccagggggagccctcgtacgtctgattaagaaatccggctttgagattaacggggataaaacacgaatgcagtataagaacagcaggcagcaagtcactggtctagtggtcaacaagaagttgaacgtgacccaagaatacagaaaactggcacgcgcatatgttttttccctgatcacccacggcaagtatacggtgaccaagtttactaaaaacacactcggcaatattgaaaaggaagtgatagaggggacgtttgcgcagctgcacggcatgttaggatttatccactcggttgacaacgtctttagggccgatcggaaaaataacccctacaactacgtcggatatgggggcgaaggcaaaaatggagatcagaaactgcagatcttccggcggttcttgtactacactaacttctactgtaattctgcgccactcattgtttgcgagggaaagaccgacaatgcttatatcagtaacgctgtgcatcagtcaaaggcgctcttcccacaactgctgaagaaaggggatgaggacaatgacgtcctcagttttttccttatgaagtacgataggaaacataagaagcgcagacacatctaccttcctaatttttcaaccgtcagtatccttggcgtggggtcaggaggcgtggacaatctgaaaaaccttctaatagggtatagagcggagatagaccgctttcgcgctaaacccggtcctcaccccgtgatattcatcgtggataacgaccacgcaggaaaaaaagtgttcggcacagccgtggaactgtccagccctaaagtttctagcatcaccggtgacgagaagttcattaacatcttcgccaatatttacatcgttccaatacctaaagtcaagaaacccgaaacttctattgaggatcttttctccgctaaggatattcctgctgctatcaatgggaagcccctgaagttcagcaacgacaatgacaagtcgttcgctggcaaggcagacttcgcctttgagcatgtggtaaaaaatgcggacgccatcgactggggcggcttctatcctctgttgaacaacatttgcgacgccatcgagcatcggaaggcaaagttggagggtgcaatctga

SEQ ID NO: 8296 - RNA, 1839 nt, synthetic construct
  source 1..1839: mol_type = other RNA
atgctcgtgcccgaaattacaacactggaaagatttcaagctgcccactccagagaagctctggccaacctccttgacatcaagcatcagcacttaacttatctcctctacgtgaaaaaagatgctggcaaatacgcgacctttagcatacccaaaaggtctggaggaacacgagagataagggctccaatcaaagagttgaagtccttgcagcggcgcctggccaacaggcttcagaattgtatctccgacgttagtcggattaccggacgggaaaatcagtcaagtcacggcttctgtcctaacaagagcatcttgacaaacgcttcagcgcaccgcaataaaaggtatgttctgaatctggatctgcaggacttttttccaactattacgggccagcgtattagagggttccttatcaacgacaggaacttcaagtttcatcgcgacgtggcaaccacaattgctcatatagcctgcgtggatggggtgctacctcagggttctccgtgctccccagtgatctcgaacttaattgccggcatcttggattcacacctcagtcgcctggctcagaagaacggctgtcactacactagatacgccgatgacattacattcagcaccaacaagaaggagttcccatcccagatcggttttctggataagtcaaccagtgacaaatgggtactagggaaagaattgcgtaggctggtcgccctctgcgggtttgtcataaacgatggtaaaacacggatgcaatgcaagaatagcaggcagcaagttaccgggttggttgtgaatgagaaagtgaatgtaacctccgaatatagacaccttgtccgggcatacgtattcagcctggtgaaccgagggtcatataaaattcggagtaccctcaaaggaggcgacggaaatgagattgtctccgagaaagatggaacccctgagcaactgcatgggatgctgggtttcatccacagtgttgacagcgtattccggacagagctgaagaacaatccgcacaatcacctgcccccttaccagctgagcggtaagactacacccgaccctcttccattaagaaatctgactatctacaggaagttcctcctgtatacgcgcttttacagaaccaccactccactcgtggtgtgcgaaggcaaaacggacatagtttacatctctagcgctgtacatcaatccaaagctgttttccctcagctgataaaaaaaaacgacgccggaaaggatatcctcgcgtttcagttttttaagtatgaccgtaaacacaagaagaaggagcatgtctatatgcccaatttttcgacagcagccattcttggcgtggcatctggcggcgggcctaacctttccaacctgatccgcacctaccataaagaatctaagaagttccagagcccgtgcggtgataagccagtggtgtttgtcgtggataatgactctggcgccacggaggtgttaaaagccattaaggattgttcaggtaaggcatgtgatcgagacgaccccttcattcatgtgtttggcaacctgtacgtggtcttggtgcctcgaaacggactagacaagatggatactgaggggctattcagtccactggacctggccaagggccacaatggaaagaccttcgatttctctaaggacgcagattccagcacatctgtcggaaaagcaccctttgccttcgagtttgtcgcgcccaaagcaaaggaattagactggactggcttccaccccctcctggccaatatcatcgccgccttcgatcattataaggggactatggctgcaatcgtcccctcaccaccttga

SEQ ID NO: 8297 - RNA, 1806 nt, synthetic construct
  source 1..1806: mol_type = other RNA
atgagttcagaaaaaactatcctgcagctgttccaagcagcgacttcccggtcagatgtggccgccctcctggacataaaagtgaaggaccttacataccttctttatgttatgaaggccgaggataagtataaaacgttcgacatacctaagcgcagtggtggcatgagaaagattaatgctccgattaagaaagtcaaaagccttcagcggaagctggccgacaggttggagcagtgtctgacgttgattgagggcacaacaggcctgacaaatccctcaagccatggattccggagaggcaagtctattctcactaatgcggctacgcaccgaaatagacgttttgtgtttaacgtggacctccaggacttcttcccttccatcaccggccgaagaatcagaggtttactcataaaagaccggaaatttgggtttcacaaagatgtcgcaaccaccattgctcatattgcttgccacaacggcgagctgccacaagggggtccttgttctcccgtaatctccaacatgatcgctagtgtgttagactttcacttgagtcgcctagccagggacaacggctgcgcctatacaagatatgctgacgacatcacgttttccacaaataagaaaactttcccctccgcgatcgctgtctgtgacgaggcatctggccataattggaagttgggcaaccagctggccggattaataaaaaagtccggattcagcgtgaacgagaagaaaactaggatgcagtacaggactagtcgccagcaagtgactggcctggtcgtgaataaacgtgtaaacgtgaccaacgaatacaaacggctggtccgagcatatctattttctctgatcaaccacaacaagttcacaataaaaaaggtcgagccatccgagctgggtgacaaggtatctttaatcgatgggactcgagaacagctccatgggatgctggggttcgttcactctgtggactcagtcttccgcacaaatgttaagcagcatccacagaattatccagggatgcagacagatatcaaaaaggacactaagaaaccgaccgggaccctggagctgtaccgtagatttctcttcttcacccgctttttttcgaacacactccccctaatcgtttgcgaaggaaaaaccgatattgtttacctcagcaacgccgtgcaccaaagcaaattggcctttccaaagctcattaccaagaacagtggcggggccgatgtattgaattttaggttcctgaagtatgcgaggaagcacaagcggaaaaaaaatgtttacctgcctaatttctccaccgtccagattctcggagcagggtcgggcggaggaccaaaccttggcaatctcattttaaattaccaaagcgagttccccaaattcagggcacctaagggcaagtaccccgtgatcttcgtggtggacaacgacagcggaggtaaggatgtcttcaataaagtgaagaacattgtgaagatcaccgggcatgagtcttttgttcgcctgtttggtaacttgtacattgtgcctctacccctgaacggtgccgctgaaaaatcaatcgaagatctttttagcccggcagatatcgccaagggaatggatgggaagccattcgatttcacaaaggattcatccgacgccaccagcatcggcaaggccggattcgcctatgattttgtagcaaaacaggcagaagatctggaatggtctggatttcaccctctgctgcagaatatatgcgccgctcttgacgattacgctgcactggccgctaccccctga

SEQ ID NO: 8298 - RNA, 1794 nt, synthetic construct
  source 1..1794: mol_type = other RNA
atgtctagtgaaaagtcaatcctccaactgtttcaagccgcctcatcccggtctgacgttgccgctctgttggacataaagctcaaagacctgacttatctcctctacgtcatgaaggatcatgataagtacaagaccttcgatatagccaaacgctcaggaggtaagaggcagatcagcgcaccaattaagaatgttaaatccctccagagaaagttggcagatcggttagaacaatgtcttaccctgattgaatcggctgcaggtcggaaaaatccgtccagtcacggctttcgccgaggtaaaagcatcctaaccaacgccgcaactcataggaacagacggtatgtctttaatgttgacctcgaggatttcttcccttccataaccggacagcgaattagggggctgcttattaaggataaaaagttcgggtttcacaaggacgtggcgaccactattgctcatatcgcgtgccacaatgggaaactgccacagggttctccctgctctcctgttatcagcaacatggtggccgccatattggattttcacctgagcagactggcacgggataacgggtgtgtctacacaagatatgctgatgacatcactttctcaaccaatcagaaggagtttcccatcgcaattgccgtgcgaaaagaaagcaatgggcacgtgtgggaggcctctaaccagctacaagggctgattaagaaatcagggtttagcatcaacgtgggaaaaacacggatgcaatacaagacctcaaggcagcaggtgacggggttggtcgttaacaaaaaggtcaacgtcactactgaataccgcagattggtgagagcttatgtttttagcctgattaatcggaacggattcacagtcaaaaagagtcgtcgaacagagcttggcgacgagatagtgtctgtggacggcacaagagagcagttacacggcatgttgtcgttcgtgcactccgtggattccgtgttccgtaccaatgttaagcagcatccccagaactaccccggtatgcaggccgacgccaaaaagcctactggcacgttagacctttatcgccgctttctgttctttacaaggttcttcagtaacaccctgcctcttattgtttgcgaaggcaagacagacaacgtatatctgagtaacgcagtacatcaaagcaaggtggagttccccaggttgatcactaaaggcaataatggcccggacgtcctcgcttttcattttctaaaatacgcgaggaaacacaagagaaaaaagcacatatacctgccaaatttcagtacggtacagattttaggagccggatccggaggcgggcctaacctaggaggactgatcctgaactatcacgctgaatataccaagtttcgtgcacccaagggcaaattcccagtcattttcatcgtggataatgactctggcgggaaggcagtctttaataaggtgaaacatatcgccaaggtatccggacatgagccattcgtgcgcctgtttggcaatctgtacatcgtgcctgtgccgcttgtaggcgctgcagagaagtccatcgaggaactttttgccccagccgatctcgctaaagggatggacggcaggagcttcgacttcagcaaagattctagcgatgcgacatcaatcggtaaagctggatttgcctacgacttcgtggcaaagcaggccaaggacctcgactggagtggtttccaccccctcctccagaacatttgtgctgcgctgaatgattacgatgccctgtccgctaccctgtga

SEQ ID NO: 8299 - RNA, 1806 nt, synthetic construct
  source 1..1806: mol_type = other RNA
atgttccccaagtccatgttggagcgcttcaaggtcgccaagtctcgtgaaaccctcgctatgctattagatattaagcacaaggacctcacatatcttctgtacgtgaaaaaagacgtcgagaaatacagcgtgttcagcatggcaaagaagaacggcggctcaagggatatatgcgccccgatcccagagcttaaatctctccagcggaaactggcaactgcgctggagcgttgcattgcagatgtcgaaaccatcacgaagaagaataataaagcttcccatggctttcgccctggaaagagcatcctgaccaacgccgctgtgcacagaaaccgacgctatgtgtttaacgtggacctgcaggatttcttctcttccatcacgggcaaacgtatcaggggatttctgattaaggaccgcaactttgctttcgacgcatctgttgccactgccatcgcacatatcgcctgccgggaaggcaaactcccacagggtagtccttgttcgcctgtcatctcgaacatgatcgctggagtcttggacgttcacctggcgaaattagctcaaatgcatggctgtacgtatactcggtacgccgatgatctgactttttccaccaataaagaagactttccagttgaaatcgcctttagaaatgactcaacaggccacacttggcgagttggggccgaactcaaccgcttgatcttacagagtggattctccattaatgagacgaaaactagaatgcagtacagggacagtagacagcaggtgaccgggttggtggtgaacaaaaaagtcaacgtctctacagagtatcggtaccttgtaagagcttatgttgcttccctggttaaaaacggcactttcacagtaaaaaggcaggcggtcggcgtagatggaaagccccaaacccttgaggaggaaggggtgacagctaaattgcacggcatgctgggcttcattcatagcgtagactcagtgttccggacagatgtgaagaaacacccttacaattaccccggacaacaggcgaacgagaagaagccaaccgggaatctggccatctataggcgatttttgatctataccagattctacgcaaacacagtgcctctgattgtgtgtgagggcaagacagacggagtgtacatcagcaatgcagtccatcaaaccaagaatatctttcccagtctagtgcggaaagatggtgaaggaaaagatgtgcttagcttccagctgctcaagtacgccagaaagcataagaagcgaaagaccgttcacttacccaattatagcacaattaccattcttgggggtggtagtgggggcggtgcgaatctcgggaatctgatacgcgcatatcactctgagctgagtaagtttaaggcccctaggggaaagcagccggtcatttttatagttgataacgattccgggggaaagacagtgttcaaagtggtgaaagacaccctcaagatgactattatagggaccgagtcatttgtccacctgttcgctaacctgtacgtcgtacccgttccattgggagaggacaaggagaggtctattgaagggctgttcgctccaattgacctcgccaagggccttaatggtaaaccgttcgacttttccagcgatagctcctcaggtacttcagtggggaaagccgactttgcatacgaatttgtggctaagcatgccaacgagctagactgggccggcttccaccccctgctcgaaaatatagtaggagcaatggatgactatgccgagagggtgcgggccgcagatctgtga

SEQ ID NO: 8300 - RNA, 1746 nt, synthetic construct
  source 1..1746: mol_type = other RNA
atgctcctggacataaaacaccaggatctcacttacctgctctacgttaagaaggaccctgagcgctataatgtcttttccatcccgaaaagctcagggggtagcagggatatctgtgccccgacctcagaacttaaaagcctccaaagaaagctggccgctgccttggagcaatgcttagtagacatcgccgctctgacaaagcgcaccaataaagcctcccatggattcagacctggtaagagcattctcacaaacgccgcggctcacaggaataggcgctacgtctttaacctagacctgaaagatttcttcccatcgatttctggtcagagaattcggggattcctgattaatgaccgatattttgctttcgacgctaaggtagcaaccaccattgcacatatagcttgtcgtgatggcgtcctcccccaggggagtccatgctctccggtgataagcaacatgatcgctggaattctagatgcccacctgtcaaaactggcacagatgcacggctgtacgtatacccggtacgcagacgatcttaccttctccaccaataaagaggtgtttccagcagccatcgcatacagagacgacagcaaggaacattcttggcacgtcggagcagagctgcagaggttgatcctgcggtccggcttcagtatcaatgagaagaaaactcgcatgcagtaccgcgacagcagacagcaagtgactggcttggtggtgaacaaaaaagtgaacgtgagtacagagtatagatatcttgtccgagcctatgtggcctccttggtaaagaacgggaagtatacggtgaaacgccaggttcctgacgtacatggcaagctccagacttttgaggaagaaggcacacccgcaaagctccacggcatgctggggttcatccattctgtggattccgtctttaggacggacattaagcggcatccttataactatcctgggcagcaggctaatgaaaagaaacccaccggtaacttagccatctacagacgatttctgatctacactcggttttacgccaatacagttcctctgattgtttgcgaggggaagaccgatggggtctacattagtaacgccgtgcaccagagtaaaaacttgttcccatcgctggtaaaaaaaaatgtcgagaaagaggatgtgctgtcatttcaacttctaaaatatgctaggaagcacaagaagaagaagatggttcatttacccaactacagcaccattactatcctgggaggagggtccggtggaggagccaacctaggcaatttgatccgggcttaccatggggagctcgccaagttcaaatctcctggaggcaagcaaccagtcatttttatagttgataacgacagcggcggtaaaactgtgtttaaagtggttaaggacacacttaagctgactataacaggcgatgagagtttcgtgcacttgttcgccaatctgtacatcgtgcccgttccacttggcaacgcgaaggaaaggtccattgaagacttattttcacaggtggacatcgcaaaaggactgaatgggaagccctttgatttctcctctgaatcatctagcacaaccagtgtgggcaaggcagatttcgcttacgagttcgtcgccaaacaggcgaaggaactggattgggccggcttccaccccctccttgctaatatcgtgtctgcgatggacgattatgccgcgcgtctggctgccgctgcagcataa

SEQ ID NO: 8301 - RNA, 1746 nt, synthetic construct
  source 1..1746: mol_type = other RNA
atgctgctggatatcaagcatcaagacttaacctacctgttatacgtgaagaaggatgcggagaagtacaacgtgttttctatcccgaaaaagagcgggggctcgagggacattcacgcacctatccctgagctgaaatcactccaaagaaaactggccactgccctcgaagagtgcatcgctgatatcgagaagctcaccaatcgcaagaataatgcaagccacgggtttcgcccgggaaagagcattctgacaaatgcatctgctcatcgcaataagcgttatgttttcaatatcgatctgaaggacttttttccaagcattacaggtaagagaattagggggttccttattaatgatcggaatttcggcttcgatgcaagcgtggcaactaccatcgctcacatcgcctgtcgcgacggaagacttcctcagggctctccctgttccccagtcataagcaatatgatcgccggaattctggacgctcatctgtccaaactcgccaaagcccatgggtgcatatatacacggtatgcagatgatatcacattctcaacgaataaagaggaatttcctactgccattgcatactgtgacgacgctaatgaacattgttggcgggtggggtctgagctctatcggttggtactccgatgcggctttagtgtaaacgaaaaaaagacccggatgcagtatcgagacagcaggcaacaggtgacaggactgattgtcaacaaaaagattaacgtctccacggagtatagatacctggtgagggcctatgtggctgccctcgtcaagaatggaaagtacaccattaaacggcaggtggcagacgctactggtaaattggagacagtgactgaagatggaacccccgcccagttgcacggcatgttggggttcatacactcagtcgattccgtcttccgtacggacgttaagaaacatccttacaattaccccggacaacaggtgtccgacaaaaagcccaccggcaatcttgccatatacaggcgcttcttaatctacacacgattctatgctaacaccctgccattgatagtttgcgagggcaagaccgatggcgtatacatcagtaacgccgtccaccagtccaagactattttcccctctctggttaaaaaagacggggaggggaaggacgtgctgtcctttcagttgctcaagtatgcccgcaagcacaaaaaaaagaagatggtacaccttccgaactattctacaattactatccttggcggcggaagcggcggtggagcaaacctaggtaacctgataagagcataccacggagaactgacaaggtttaaagctccccgaggcgaacagccagtgattttcatagttgacaacgactcaggcggtagaaccgtgtttcgtgtggtcaaagaggttgctaagatcaacatcacgggggaggaaaggttcatccatctcttttccaacctatatatcgtgcccatcccactggggagtgccaaggagcggtcgattgagtccctattttcagatgcggatatcgcgaaaggtctgaacggaaagccatttgacttctcagcggacagttctagtgccaccagcgctggtaaggccgactttgcctacgaattcgtggctaaacacgctaaagatatcgattggactggcttccatcctcttctggaaaacattgtcggggcaatgaacgattacagtgccagagtggccgcagcggccctatga

SEQ ID NO: 8302 - RNA, 1920 nt, synthetic construct
  source 1..1920: mol_type = other RNA
atggctttcggcaacaatgtcagaacctatgcggcctccgggattattagacgtacaccctgtgtcgctcgcggccaattcgccatggagtgcctgaggggcccacattctatgctgctgcctaagaacaagctgcagtggtttcaagccgccaaaagccgcgccgagcttgccatattgttggacattaagcacaaagatctgacatacttactctacgtgaaaaaagaccctgagaagtacaagatcttctcgattcctaagaaatcagggggcagtcgcgatatccacgcacccatacctgaattaaagtccctgcagcgaaaacttgccactgcgctagaggagtgcatcgccgatgtggaggagctcactaacgaaaaaaataaagcaagccacggattttgccccggaaagagtattctaacaaacgccagtgtgcataggaataaacgatatgtgttcaatatcgacctggaagactttttcccctctatcaccggacagcgggtgagagggttctttattaaagacaagaacttcgcgttcgatccaagcgtggcaactgccatcgcccacattgcatgcagggatggtaaattgccccaggggagcccttgttctccggtgatctcaaacctgatcgctggcatcttggacgtccatctttccaagcttgctaaggttcacgggtgcatatataccagatacgccgacgacatcacattttccaccaataaagagaacttcccagctaccatcgcttaccgagacgaggctaacgagcactgttggaaggttggggaggaactgcgtagactgattctgaagtgtaggtttagcatcaacgaaaaaaaaaccagaatgcagtaccgctcaagtaggcagcaggtcactgggctggtggtgaataaacgagttaatgttacgagcgaatatcggtatttggtacgggcttatgtagccgctctcgtgaagaacgggaaatacactatcaagaggcagatagtagatgccacagggaagcaggagacaattagcacggatggtacccccgcccagctccatggtatgcttggcttcattcattcagttgattcagtattccgcaccgatgtaaggaaacacccgtataattatcctggacaacaggctaacgacaagaagcccactgggaacctggcaatctaccggcgcttcctgatctacaccagattttacgccaacgcactccccctcatcgtgtgtgagggcaagaccgatggcgtgtacattagcaatgcagtccaccaaacaaaatcgatttttccaagtctggtgaagaaagataaggatggcaaggacgtcttatctttccagctgcttaagtacgcacggaagcacaaaaagaaagacgccgtctatctcccaaactactctacgatcactattctgggtggcgggtccggtggcggagctaatttgggcaacctgatacgggcgtaccatggagaactgggaaaatttaaggctccacgtggtaagcagcccgtcatattcatcgtggataacgacagcggcgggaaaaaagtgttcagcgtcatcaaggaagttctgaagaaaaatctcaccggagaagagccttttgtgcggctgttctcaaatttgtatattgtgccgataccattaggtggaaataaggaaaggtccatcgaacagctcttttccgatgtggatattgcaaagggcctaaatggaaaatcttttgacttttctgcggactcttccagtacaacttccgtgggcaaggtcgacttcgcatacgagtttgtggcaaagcaagccaagaatattgactggaagggatttcatcctctccttcagaacatagttgccgcaatcgacgattatgctgctcacgttgtcgccgagggcctatga

SEQ ID NO: 8303 - RNA, 1839 nt, synthetic construct
  source 1..1839: mol_type = other RNA
atggatactgcttatctgtatgtcaccattggaagtagaaagtcagtatgtggtgccacatttacggatggccatcatttccctaccgtagtcttaagttcattgtccagactgaaggctgccacctctagggcacatttggcaagcatcctgggtatcaagctccaggatctgacttacctgctctataagaagcccatctacaaaaagtacacttccttcgaaatccctaaaagaagcggcggcaagcgtaaaatcagcgcacctatagacagcctgaagtcgttgcagcggaaggtggcggaagtcctgcaggagtgcatttccgagatagaaacctctacaaagaaaatcaatcgcgctgcccatggatttagacttgataagtccattctgacaaacgccgctatgcaccggaataagcggtacgtttttaacattgacctggaggactttttcccatccattacatttcccaggatccgggggtttctgaccagcgataagaacttcaatctggccccagttgtggccaccactattgcgcaaatcgcgtgtttagagtctaaactcccacaagggtcaccatgcagccccgtgatatcaaacctcattgccgggatccttgacgtacacctgagccgcctagctaaggtgaatggatgtacatataccagatatgccgacgacatcacattctccacgaacaaaaaagactttcccatcgcaatagcaatcgagagtcagggtaatgctaatgtctgggtactgggccgtcagcttgccggtctgatcaagaagagcggcttctccgtcaacgtctctaagacccggatgcagtatcgaacgtcacggcaacaagtgacagggctagtggtgaacaaaaaaatctcggccccgaatgagtaccgacaccaggtgagggcatacgtcaactcgctggtaagaaggggtttttacatggtggataacggggaaaaagtggaagaaggggggattcagaaacttcatggaatgcttgggtttatccacgcagtggagagcgtgtacagaaccgacctccagcggcaaccatataattaccctggcgtggttatagacgagaggaggcccactggcaatttgagcatttatcgaaggttcttgttatatactcgcttctatgctaatcaccagcctttgcttatctgcgagggaaagactgacaacgtttatattggcaacgctattcaccagcgtaaatccgaatttcctctcctcatcaaaaagaatgacgatggaaaagatgtcatcagtttccagttcttcaagtacgccaggaaacatcgccgaaaaagtgatatctacctgccaaactatagcaccgctatgatcttaggcaacggtagcggagggggacccaatcttgccgggctaatgtccgcctaccgctcagagctcaaaaagttcaccagtccaggcgggaagtgcccggtgattttcattgttgattccgattctggcggaaagcctgtgtttaaggtgattgaaggcatcactaagaagaaaccttcaggtacagagctcttcatccacgtgtttgaaaacgtgtacgttattcccatttcaaaggatggcaaaagcaatgtctccatagaacacctgtttagtgagaacgataaaagcatattgatggacggcaagcccttcgacttttctggcgaatcttccgactctattctcggaaaagcgtctttcgcttacgactttgttgccaagtacccggagaagatcgactggtctggattctcacgcctgctgaaatctataagtgatattctggagctgcacaaagcatga

SEQ ID NO: 8304 - RNA, 1779 nt, synthetic construct
  source 1..1779: mol_type = other RNA
atgtcctcctggggcagcacatacaaaatgcgcaagattgaagccttaaagtccgttaagtccataaacggactggcggacctcctgggctttaaggcttcggccttaggctacattttgtttaaactgcctgatgcacagaaatacaactcattcacgatccccaaacgttctgggggtcgacgctcgatcagtgcccctgtccccagattgatgcttcttcagaagaaaatatccaccctgctgaacgattgcctggcagagattgagggaaagcttagcagtccggctcatggctttaagctcgggagatcaatctttacaaacgcggctcaccacagaggcagacgctatgtccttaaccttgacctgaaagatttcttcccaagtatccattttggaaggatcgccggttacttcgagaagtccagggactttggtctggacccaaaaatagccaggattctagccaacgtattgtgtcataagtcatctcttccccagggaagtcccagctcaccggttgtttctaatctgttggcccggatgctcgatatccacctggccaaacttgcaaaacgcaatcgtctgacctataccagatatgcagatgatctgacattctcaactaacctgaatgtttttcctgaggcggtcgccaaaagggtcagcgagcatgtgtggcagctgggtcccgagctcatctctaccatcgggagttgcggatttagcattaacgatctgaagactcggatgctgtaccggagcagtcgacaagaggtgaccggcctcgtggtgaacgataaggttagcgtgccggtggagtatcggagatgggccagagctgctgttgcccgtctcgtgaagaccggagcatatttcaagcccactcctaaaggctttatcgggcctcaacctgctacacccgatgccgggtccctagaccacctcgaaggctgtttaagccacatctataatgctcaccggtttcagcggtcacaggctgctctgggaagagcactgcaccacgcgccagacgagctaaattccgacgaacacgtctacaggaggttcttattttacaccaagttctatgtgccagaaaaaccagtgatcgtgtgtgaaggggagacagatagtatatacattgccgctgctatttccgcaatggggggttactatccagatctcatagacgctaagctgaaacctggcgagcagaaccggttcaacgtccgcttcttcaagcattcttctattgccggcaggttgctggagctgaatggcggcacggatgccctgaagaacttctgcaggatttacgtggaccagaccaaaaagttcaaaggcggtttattgtctcagccaacaattgtgattgtagacaacgataaggctggccgagacgtggtcaattatgcaaagggaatcgccaagaatcaggggctcccagcaatcaaaggactgaattacgtattcacccgccccaatttgtacgtggtcagcattcagtctcctgccaacgcacctgactgcgtcatcgaagacctctttcccgcacatctactcaatactaaactcggggggaaggtgttgactctctccaatcaaaaggtaggtgacaatgaatacggaaagatgtatttcgccaaacatgtagttccacacgccgatcccaaagacttctctgggtttagccaacttctggacactctggtggaagtgatcgcggacttttcaagccgagtgcaagtccagccggccacaaagaaggcgtga

SEQ ID NO: 8305 - RNA, 1722 nt, synthetic construct
  source 1..1722: mol_type = other RNA
atgaaacttggcaagcttcaggcagccacctcaactatcgatctggcgaacctcctgggatatcaaccgtcggcgttccactacttgatctataaactctctgaggccgccaagtactctgtctttcagattcccaaacggaatggcggaacgcgagaaatcagagccccagagccaaaactgaaactgctgcagcagcatctagcagaatatctgtctgaatgtctgaaggagattgaatcaagctccgactatgccagccctgcacacggcttcaagcctgggcgctccatttttactaatgcagaaatacacagacagaggcgctttgtcttgaatatcgatctcaaggacttctttactacaatccactttggacgggttaagggctacttcgagaaaagtcgggagtttaggcttaactccaccattgcactcgcgattgctaagatagcttgttatgacaggtgcctgccacaaggagcccctacaagtccagtgatctccaacctgatcggacgcgtactggacgggcatatgtgcaaactcgcaaaaaagcataaggtgacttatagcagatacgcagatgacctgactttctcgaccaatctaaaggagttcccgagcgcacttgccattcagaatgaggagcacaagtggcaccatggcaaagagctcggtgaggtggtgaagcacgccggctttgagatcaacgagaagaagacacgtgtgcagtaccgcgcaagccgccaggaggtgacaggtctgatcgttaatgaccgagtgtctatcagggctgaatacagagcttgggcgagagtggctgtgcacaggttggtgcataaggatgggtttttcgaaccaatcgctaaaaccttcgtcgggcctctcccaaatgagaaggctcctgggtcattgcggaagctcgaagggattctgtctttcatctacagtgcccaggtttttcgcagagagatgataattgagaagggcgggcagaacaaagagaagaaagccgaactgcattccgatgaacgactgtatcaaaaattcctctactacaccaagttctatcggaatgaaaagcccctgatcgtctgcgagggcaagaccgacaacgtgtatatacgagccgctatagtggcaatgggtgaaaagttccctacattaaaacaggaaaaaggcgagaaggacagccttcttgtacgtttttaccctcaccccaagtatggaaacaggctgctcgaaatgggcggaggaactgctgggttacggaatttttctcacacctacgtagataagagtagaaaattctcccaaattgcccccaggaatcccgttattatcgtcctggacgccgacgatgctggcaaatcagtatacagctttgcccagaagaatcacgccaaaaaggatgattttcagggtattgtctttttgcatccgaacctgtacttcatttgtatccctgagccaaaaaactccacacataaagcaattgaagggcttttcccctcagtcttgacggatcaaaagttaggcgacaaaagtttcaactggaagaacacgccactgaaggagaaagaatatggtaaagcctactttgctaaaaacatagtgcctttggccacccccgaaatgttcgttgaatttacacccttactagagggaatcgcggctgccatcgagcacttccgtaaactgcccgaggccaagagctga

SEQ ID NO: 8306 - RNA, 1806 nt, synthetic construct
  source 1..1806: mol_type = other RNA
atgggaccactcgattaccaagccgtgctttacatgtcgcagctaatcgctctgcgtaacgcagacacaagacgcgagatggctgccctcctgggctacgaatctagcaagctcacctatgccctgcacggcttgaaagaggagagtcgttacactcagttcgccattcctaagaaaaacggtgggcaccgcaccatctctgcgcctgatgacgctacaaaggcattacagaggaagctggctgccctgctggccaattgcgtgagagagatccgctccgttgaaagccctaggctgccaggccagagaagaggagtactgagccacggattcgaacccggcctaagcatcatcacaaatgctcgggtgcatcgaaaacggcggtgggtctttaatatcgatctggccgatttctttgattctatccatttcggacgggttagaggatattttgaaaacaacaggaactttcagctcaagcctatagccgcgcttgtcatcgctcagattgcttgcttcaagagcaagctgcctcaggggagtccgagctcaccggtcatcgccaacctggttgcctccattctagacatacatctgtcccggcttgcaacccaggtagggtgtagctatacaaggtatgctgacgacctgaccttctctaccaaccaggaggaatttccttcagccattgcacaccaagtggatcgcgactctaacagatgggaggcctctaaagagctcgtagatgtgatctcccgatcggggtttaaactgaattcccggaagacacgcatgcagtacaggcactcacgccaggaagtcactgggctggtggtaaacagggtcgtaaatgtccctagtgagtatcggagagaggtgagagcgcgtgtccatcggctcataactaagggcgagttttacattagtggtatcggcgaagcaggccaaagcacccaggtcgctgggactcccgcacaactgaggggcatgcttgccttcattgacagggtggacttattcaatctcaatttggcccgggagtcaaagggcgaaccacccatcactcccgcatcagacttggtggatttgacgcggaatgaagaaacgtataggaagttcctgtatttcacagagttctatgcaacaccacttccactcgtgatatgcgaaggatccaccgattacgtttacttagtgcatgcaattcgcgctttggtggatgactttcccgagctggcttacaggaccggggacgaagagattaaatttaagatccgtttctaccggtacccacgcaacagcacgcgccgtttgacaaggatccgaggtggcaccgctgatctcaagaaatttgtggccacttatggcgcggaggtgcagagattcaaagctgggggtcagcaacaccccgtgatagtggacaatgatgccgcaggcagagaggtctacggacccgcaaaaaaactaggagtcgtttttaacaagagtcggccccttacccgagtgagtgccaatctgtatctcactgccacccctttactgggtgccgacgagtcttgtattgagtcactgttcaagacggaagatacagccagattagttgatgggaagtcctttgacccggacgacaaagccgaccgatccctgacatactctaaggcggtgttcgcccaccagattgtggcaaaacacgctgcacacatcaactttgatcgcttcaggcccttgctcgctagcctttcagacgctgttactatgcatagagagtcccgaaccgaagaggttgccccagcggccattacttga

SEQ ID NO: 8307 - RNA, 1815 nt, synthetic construct
  source 1..1815: mol_type = other RNA
atgatggttaactatctgaaagaacttcagcaagctaaatcattacaagacctcgctaaactcttgggtactaatgagtccaacctaaacatcctgctctacaaaattagtaggaagtcactgtatagaaccttcgagatccctaagaaaggaggcggcttcaggatcatctcttccccagacgaaagcctgaaagtcgttcagaagcgcctggccagcatactgtcttccatattggagccgaactatcagttgaaacacaagaagaaacttcaaaatcccaagaaagagcgggccacccgggcttactctaacaagagcgtgagtcatgcatttaagcagaacctaagtatagcgaccaatgccgaacagcatctgaagaaaaagtacgtgctgaacttggatctcgaggatttttttggcagcatcaatttcggcagagtgcggggcttcttcattaaggacaagcagttcaagctggaccccgtggtggccacacacattgctaatatcatttgccatatggacaaattgccccagggatcaccctgttccccggtgatgtctaatttgattggacgcctgttagataggcacttactccgattagcaaaccggcgtggttgtttctacactcgatacgccgatgatctcacttttagctttaatggcccaaaatttccaaccgaaattgctatcctcgaacaggaccagtgggtcatcggggacgccctgaccgaggtgattgaaaaatcgggctttaagattaagaagtctaaggtcaggatgcattataggacttctagacagatggtgacagggttggtcgtgaattgccacgtaaacgtgccagccgaatactaccgcgacacaagaagtatgtgtctcaacatctttacgactggatcctgttacctgaaaacaaatcggaataagaaccttagtatgcagcaactggaggggcgactcaattacatctaccagatcaagaaattcaagaacatctatgctgaccaggggggatatcgccactccagacacaatggaaagtacaaatcggactcaaatctggaccggtccacccaatatgccgacaactcccatcaggttagcctggatggtataaaaaacatctacggccgttttcttttttacaagaattttttcgccccacaaatgcctctgatttattgtgaagggaagactgaccccgtgtacttaaaatgcgcacttctcgcgctggaaactaagtattcaggcatggtcagcagtggcaagcttaatgtcaggttttttgccggcaataatctcgacggggagatgatgaagcttgtcgatggtacaggtgggatgaagtacctgattagctcttacaatcgcatgaaaaaggagtgcaaattcaacggcgtgcccctgcaccctgtaattattgtagtggataacgattccgccggactggaggtgaagaaggcagctaaaaaaaaacgttccatgacgaacggggtctttcacattttccacaacctctatatcctagagatacctaaaaaccctaccgacgcggtggaaaccgttatcgaggattatttcacagataaaaccctgaacatgaagttcaaaggaaaaacattcaagtcaggggatctggacgagaaggatgcagtaaaccatttcggaaaagcagttctgtctatgcttgtgaagaagagatgcaaaaagatcgatttttcaaagttcagcgaaatattcgacaaggttgatgagattatcaaagactatcagacgatcctaagcacaaagaccagccaggagtga

SEQ ID NO: 8308 - RNA, 1686 nt, synthetic construct
  source 1..1686: mol_type = other RNA
atgagttatctcgagcgactcaaaagttgctcaaatctgaaagagttcgcagagtatctggggtacaaacctagtaacctttcttatctgctgtacgtgttgaacgatgacttgaaatatcgaaccttcgaaatctccaagaaaagcaaagaggcccgggtgattaaagcaccagaaaagtctcttaaagggctccagcgtagactggccagccgcttggagaattgtcagaaggaaatcgagagcaacctgggcattgtgaaccccgtaagccatggtttcagaaaagggcacagcattgcgacaaatgccaacatccacaaaaggaaacgctacgtgtttaatctagacattaaggacttcttcggcacattggattttggcagggttcggggattcttcataaagaactataactacgagctggctcccgaggtggcaacgataatcgcacagatctcatgctttgataactctctccctcaaggaagtccatgtagccctataattagcaaccttattggcaatatccttgatgtgaaactccttaagctggctaaaaagaatggatgtcactacagcagatacgctgacgatctcacatttagcactaatcagaaagtttttcccgctgacattgccatccaagaccctattaagggcgactgggattgcggcgcggagatctacaagatcatgaagttggtgaggttccagattaatgactccaagacacggatgctgtatcgcaatagtcggcagttagttactggcctggtggtcaacagaaaggtaaatattgcagcagactattggcgcgatactagagctatgctgtggaacctcttcaatactggatcgttttttatcaaagacaactcagaagaggtggccgaagggaccctgagccagctcaacggccgcttagatttcatctaccagattgacgcctataataccaacaagagtaaaggagagaatgttaaaaccgctaagaaagaagcctacaagaagtttctgttcttcaagtccttctatgtcaacgaaatgccaactatagtatgtgagggtaaaacagatcccatttacctaaaatgcgctctcgaatctctcgccgattcacacagggaacttatcgataaggacggaaagctgaatatcgggctgttcaattactccaaggtggccgcggacgtcctggagttatctggcggtaacgccccgatatctaagttcctggaccaataccagaagatgttttcattgtttagggtcaactcctcccaaaatccaacgattataatcctagacaatgacggcgcgggactgcgaacccttaatcatgccaaaagaggggccacctctgaggttaaaatggacggtttcgatgagcccatacagtgcttgccggaaaacatttatgtctttaggattccacggatcattgacaaagacctggaaattgaagattactttaaggaggaggcttttcagatcaagctgaacgagaagtcctttaaacgtaagggtgtcatcgataagaagaaggagttcgggaagtttttattcgctgaaaagatcgtgaagaacaacaagaagaacatagatttctctcagttttcactgatctttaatgtgatccagcaaatcatctcccattcgaaagcatccgcccctaccgattga

SEQ ID NO: 8309 - RNA, 1734 nt, synthetic construct
  source 1..1734: mol_type = other RNA
atgaacgatttttcaaagttgaaggcccttcagaagacgactacattatcagagcttgcccatctgctccgagtccagccaaagacactgtcttacaacatatacatcatcgacaagaacaaaacaacgactaagaagtattccgaattctctatccctaagaaaagtggaggaactaggatcattctggcccccaatcaaaatctgaaattcatccagtcccagttgtcaaagattctgtattcatgtatcgacgagattaacaaagagaaaggtgttacaggtagtctatcttttgggtaccgtaaaaagtcgtccattttcgacaacgctaaggtccacaagaagaagaaattcgttttcaacattgacctgaagaactatttcgacagcataaactttgggagggtaaggggcttcttcatcaagaaccggaatttttgcctggacgagaatgtagctaccgtgattgcacagatcgcttgtcataataacattctcccacaggggagtccagtcagtcctgtgatttctaatctgattggccacattttggatattcgattgagcaagatagcaagcagctgcgggtgttcctactcaagatactgtgatgacattaccttctccaccaatgaaaaagtgttcccgaaaaaactggcctattctaatacagacaagacctggcatccgtccaaactgcttatctccattgtcagccagtctggctttgagattaatatgcagaaagtgcgcatgagcctgttttacagccagcaacgggtcactggcttaactgtgaataagaaggttaatacgactcgcgcttacagagatctggtgcgagccctggtgcactccctctgcactaaaggagactttgagtttcgcggtgacttttacaaagataagatctccgaaaccaataaacttaacagtctacaaggcatgctcaactatatctcaaggatcgagtaccaagaacttagaggcaatagggagaacaaacggttctatccaaacataaacaaactcaccaagagtgaaataacccttcgtgattatgtgctctttcgctactttttcaatcctgagaaagtcacaatctttggggaaggaaagaccgataaaagtcacctgaagcattatctgaacttcaggtcgaacattgatacaagcaagaatccaatgcccgagagcttttctgactggaagaatatgaattttcacgatttcgagtcaagaattttcgacgtcatcagcaaaagcggaggcacaggcgacatcaaaaagctggtaaccgagtacaagaaatactgcaacaagttctgcatccccgaggttcagaatcccgtgataatactggttgatgatgacgacggatccgcggatctcttgatgaaactggagaaggtgaagaaagataagctcattaaagtggtgagaaaggacttctatcacatcgacaataacctgtacttaatctttctacctcggatcaactcaaccgataccgatatcgaatctttctatagcaaggaagttatagacatcccccgcaatgggttgtactttgagaaatccaacctctctaataacaagcggaactattctaagaaagtattcgcaactgagattatacctagaaaccaggaattagtggattggagcaaattcgaccagatcttcgaaaaagtgcaactcgccatcgaacattttcagagtaagaagtga

SEQ ID NO: 8310 - RNA, 1752 nt, synthetic construct
  source 1..1752: mol_type = other RNA
atgagcgcccttaagaaactcaaaagtgcatgcgatataaatgacctcgccaagctgctgaattttaaatcctctaacatcgcatacatcatttaccggttgaaggaagaggagaaatattcatcctttgagatcaagaagtcctccggcgggctgagaacaattgatgcaccagagcccaaactaaagaatcttcagagcaatctggcatatctcctacaggagtgcctgactgaaatcgagaagacctcccaaattaaatcaaccgcctcacaagcttttcagcccaagaaatccattatcaccaacgcctccctacatcggaagaaaaggttcctgttcaatttagatatcgagaactacttcggcagcattaattttggtcgagttcgcgggttcttcatcaaaaataagaatttcgagctcgatcccaagattgccaccctgattgcacagatcgcttgttatcgcaaccgtttaccccagggaagccctgccagcccaataattagcaacctcatttctcacatccttgatatgaggctcatcgaactttctgcaaagaataaatgcttctacacaaggtatgctgacgatataacatttagtacgaatcttacggagttcccacctgaaatcgcctatgagagcgaagataagatctggagcccttcacagaagctcactaagctgatcctgaaaaacgggttcaacataaactatcagaaagtgcggatgcaactccattttagcagacaggaagtgactggactaactactaacagaatcattaacacaccgattgagtatcgaaaaaatgctcgggccatggtgcgcagtttgatcatgaaaggctcttttcacatgcctaaagaagagcaggaagcctccgtggaacaacttcacggaattctgtctttcatagaccacgtgaagttggtcacaaagcacgggcattcaaacgacccccattcgttacctgccgccaaagaggagaaaaaatcatctttcgagaaagactttgcggattttctgttttataagtactgttacgcgccgaccaagccactcattatttgtgaaggtaagaccgacaacatctacctgaaatgcgctattaagtcattggattccaagtaccccaaactgatacaccctaataacaaacaggacttcaagattgacttcttcaaatactctagaagtcaggggggcgactcgcagaagggacgtctgttagaattgagagggggcgagggtaatttgaagaatttcatctctgcctatgataagaagtgtaccaagatccgagctcccgggaagcttcacccagtcattgtactgatagacaacgataagggcggcaagcagattctgagcctgatcaagaatctgaaaagagagactagtacggtcacaggaaatgaggactactactttatcaacaacaacctgtacgttatcccaataccggatattatgggaaacaaaaatacaaccatcgaggactttttttacaagaagaccctgaaccggaagattaacggtagggtttttaaccgcaagaatgaccacagtggcaaaaatttctacggcaaatacgaatttgctcaaaaaatcgtacagaaggacttgaagaacatcaacttcaagaaattcatcaagatcctcgataggtttgaactggtgatatccgactataaaaggtatctcaagagtaaagcgctgcagaatagccgcgctaatcattga

SEQ ID NO: 8311 - RNA, 1722 nt, synthetic construct
  source 1..1722: mol_type = other RNA
atgaccactatggtgtcccggttacaggcttgcattgggaggtctgatctctccagtctgctggggttcaagcccaaggcattcgcgtacgtcctttttcatgtggctgacgctgaaaagtatacagacttcgaaattcccaaaaagaacggaggggtgcgtgtaatatcagctcccatccctcaactgaaactgctgcagtcacgactcagcgagtgtctgcagacctgcctcgctgaaatcgaaaaagccgatggcgtgaaggagtcctgcgccatctctcatggctttcggaagggcaggtctatttacagtaatgcggaagtgcacaagggccgcaggtgggtgttcaatatcgacctggaggactttttcccttcaattaacttcggcagggtgagagggtacttcattaaaaacaagaactttgccctctcacccgacgttgcaactgtgatcgcccagatcgcttgccataaaaatgctttaccacagggaagtccgtgctcccctgtcattagtaaccttctggcccacatgttggatatgaggatcagtcgaatagctaagaaagcccggtgttcctacacaagatatgcagatgacctcactttcagctgtagcaaaaaactctttcctgatgggattgcccaattatcccaggcggaccagggcgtgtggattccatctgataaacttcgccatacgatcttctcttccggtttcaagatcaacaaaagtaagactcgtatgcaggtttactggagcaggcaagatgccacgggcctggtcgtcaacgccaaagtcaacgttccacgcgaatacgtgaaaacagcaagagcccagtgtcatcaactgataacgaagggaagcgtgttcaataaggaggagttgtgggggcaggacgtcaaagtgccctatgatcctgctaaactacaaggcaagctgtctcacatattcaatatcaaagggcaggatctgaatttcgagagacagaagggttcactgaaaacatggccaaatttttaccgggactatcgcagcttcctcgactatcagtcgttcggatccagcccaaagcctgtgtttctgttcgagggaaaaaccgacaacatttatatccgttgtgctttgaattctctggccgctgactatccggaactgatctctgatggggctccaaagcagttaatggtgcgcctctttaactacagccggccaaccaatgccgtacagcagcttgcaggaggcaccggtgacctgcaactcttgattaacaattacgagcttagactgagaggattttcggcagcgacactggcctttcctgttatcctcgtggtagacaatgataaaggatccaccgacctattcaaggcagcaggaagtaagtcagacaccaaagcgaaagtcgatggttcccagcccttttatcacataaccaagaatctttacctcgtccctacaccaacccccaaggggatggttgagagctatattgaaacatttctgcccaacagcgttttgaagaagaagctaggcaaaaagacttttcacctgccggagaagggctttgacgtgactaaacactttggcaaggtactattggccgagcagatcgtgcagcggcaacaaaaggccatctcatttgtcggtttcaagcctcttttggataacatgcgagccgcaatgcaggattacgccgccaagatggcaccctga

SEQ ID NO: 8312 - RNA, 1776 nt, synthetic construct
  source 1..1776: mol_type = other RNA
atgacattgacggtaatcctccgcattgagagcgcctgcaaacttaccatgtccattgaacgcatgaaccagctgaagaactctcaggggaaatttggattcgcaaacgccctgggtatttctctcaaacagctcaccagggcagtgtacggtattccagtccaaaataggtacagcacttttctgatccccaaatccaccggtggccacagggtgatacatgtgccccaccgagagattaagtttgtccagaaggctctggctaaccttcttcagatctgtctctccgaaatcgagacaaagaagggagtggtgaggccagtgagccatggatttcaccccgggcgatctatttttagcaatgcgtgggcgcacaggaataagaactatgtcatgaacttcgatttggagaatttttttcactccattcactttggtagaatatgttccttcttcgagaaaaacaacgactttctcctgcacccgaaagtggccaatctgattgcaaacctgtcctgtcaccggatagatggaggcggtacattcctgccacagggaagtccttgctctccaatcatcagtaactttatagctatgcctctagaccagaaattaaggaaattagcccgagataacggatgtcggtactcacggtacgccgatgatatcaccttttccactaataaggacctattccccgacgatattgccattttcgacgtgtcatctaagaagtggatcgccggcagcggaatcctgaaagtcatttccaagagtgggtttaagctgaatattcagaagactaacatgtcaatcgctggcacccgccagatagtgactggcctggtcgttaataagcaggtaagcgttagtcgaccagtttacaagtgggctagagcggcggccgatcatatgttcaaggacggcgttgccttcaagagagatcctagcacagcttcaatccatacgacggatcgccaagttaccctcgggcacatcattggccaggtgaatcatatttgctacgcacgtagaaagtcgaatatcccattactgaattctagaaagatggtggggcccgaattgctctatcgccggttgacctattatgagcggttctttgctcataaggaaacccttatcatctgcgagggcgagacagataacacctacctcaaaatcgccatcgacaagctcgggcataagtttaagaacgtagcccgcagggcagacggaaacccccaggtaaaactgttgaatgtgaccccgcacatcacaatctatacagcactcaatggcggctccgaccaacaaaaaagcttccttcaaaactacgacaatgatatgtcaatcgtgggcgaacgttgggctgacaaatgcgtgataattttcggcgacaacgattctggggccaactcaattatgcagatattgagaggaaagagcatcattcctggggacataaaaactgcagacttcacttattacactcgtaatctttatgtcatcctgacacctattcccaacaaaaatagcatctctatgattgaagacttcctagaccctaacgccagtcgggttaagctggaaaataaagtgttccatctgggcgggaaaggtttcgatgaaaaaaaacactatgggaagaaagctctgagtgagcacgtccggcagaatgccagtaagtacgacttttccaagttcgagattatcctgaaaaggatagacctagccatcgatgattactcgtcaagactggctgcattaaagctgtga

SEQ ID NO: 8313 - RNA, 1728 nt, synthetic construct
  source 1..1728: mol_type = other RNA
atgtccaatggccagctggatcgattaaagaatgcccaaggaaagcttggtctagcaatggctctgggggtccccctgcgtcaactcacaagggctgtgtatggcataccaatccccaacaggtatactgtttttgagattcgaaaatcttccggcgggtcgaggatcattcacgtacctcacagagaaataaaattcgtacagaagagcctcgcccagttactgcagagctgtctgtctgaaattgaaacccgcaatggcgttaagcacccagtgtctcatgggtttcaccccaaacggagtattttcagcaatgcttggccgcaccgaaacaagaactacgtgatgaatctggatcttgaggactttttccattctatccattttgggagagtgtacggatattttgaaaaaaacaacgacttcctcctgaatcctaaggtggcaaatttaatagccaacatctcctgccacagaaatgacgtgggtggaacctttctgccgcaagggagcccctgttcgccagtcataagcaacctgatagcaaggccccttgattcaaagctgagaatcttcgctaaagagaataagtgccggtatactcggtacgctgacgacataactttttccacgaacctcgataactttccagaaagtatcgctctgctggattcagtcaagaaatactgggtggtgggtagtggtactacgaagattatcactaaatctggcttccggttgaatctgggaaagacgagaatgagtgttgccgggacacgccagatggtcaccggactagtggtcaaccggcaggtgtccgttaataagaccacttacaaatgggccagagcagcatccgatcgccttttcaaagagggcgttgcctttaaacgggacccttcaaccgcctctattcataccacagatcgtcaggtcaccattgcccagttgatcggtcaggtgaatcacatttgtcatgcgcgccgcaagagcaacattccattactgcattcaagggatatggtcggacctgagctgttgtaccgaaggctgacctactacgaccgcttcttctccaataaaaacacactcatcatttgcgagggagaaactgacaacatatacctgaagatcgcgcttaaaaaattcggcgcgaacttcaaaaatctctataatcacgtggacgacaaggccaccgttcagctgttgaatatcaccacacacgtaacctcatatacagccctcaacggcggctcagaccagcagaaaagcttccttcagaactttgacaatgacatgaggattgtgaaggacaggtgggccgataagcctgtgatcctattgggggataacgatagtggcgccaatgcaattatgcaaatcttgcgtgggaagagcattatcgctggggacatcaagacagcccaattcacacactatatcaaaaacctctatgtgatcttcacacccgtaacttcaaagacggataacagtatgatcgaggactttctggatcctaaggcttccaaggctattcttggaggtaagagctttcacttgggagggaagggctttgatgagaaaaaacattacggcaaaaaggcactcgccgaacatgtgaaggagaacgctgataagtacgacttctccagcttcaactctatcctaaaaagactggacctggcagtcggcgattatgcggagagactcgctcggtctatggcctga

SEQ ID NO: 8314 - RNA, 1761 nt, synthetic construct
  source 1..1761: mol_type = other RNA
atgtcctctcttccaagcgaaagtaccctggagagacttaaggcctgcaaggggaagcttggccttgcgatgctgctcggcgtacagttgaagcatctgacccacgccctatacggcattccgatgcctgtgcgctatgctgtgtttactattccaaaatccagcggaggggtaagaattatccatgctcctaacgacagactcaagtttgtgcaaagtgccctggctgctgtcctgcaggagtgtctgatagaaatcgaaactaagtcaggggtccagcggcctgtatctcacgccttccaccccaaacgtagcatcttcagtaatgcttgggttcacagacgcaagcggtttgtcgttaactttgacctgcaggatttttttcctagcctacacttcggtcgcgtgtgcaaattcttcgaaaagagctccgacttccagctccatcccaaagtggccaacctgatcgctaatctggcaacccacccagatggagctgggggcaccttcctgccacaaggatcaccctgttcacctgtgattagtaacctcttaaccaggccactggatcttagactgcgaaagctcgcacagcgctgcgactgtaggtattcacggtatgccgacgatctcacattctcgtcaaacactactgcatttcccgaagccatagctaagctagacaacgagtgttggattgctggggacgaattcgagaagatcgtagtccaatctggcttcttcctgaatcacgctaagacacgcatggctctgaaaggtaccagacaggtcgtcactgggttggtggtcaacaaacaagtttctgtgaaccgagatacgtacaagtggctgcgtgctgcatgtgattctatgttcaagaagggaatcgcgtcacggcatgatccacggacggtgaaggtttacaccatggccaggaaattggaactgaagcagttaattggacatgcagagcacgtgtttcatgcaaggcggaagtccggtattgagctgcccgccatgtccctgatgaaaggacccgagctcctcttgaaacgtctgatttattacgagcgcttctttgcgcatgataggcccatcgttatttgcgagggcgacaccgactatgtttacctgaggatagccttggccaaattcggtcatcagttcgcaaatctggcgccttcgaaagaaggattaccggcaattcggtttttgagatttactcctgtgatcggcaggttcacagggctccaaggagggtctgatcagcttaagacatttttgcagaattgggatgtgaatatggccatggtgggcgacaggtatcccagccagccagttatcctctttatggacaatgacagcggagcaaacgcgacaatgcagatcctccgaggcaaaaaggtgatctcccaagatatcaaaatgatggaattcacgcacgctacaaaaaacctttacgtgatcttcactccagtgcctgatgtgaaaagccagtcctgcatagaggattttgtggaccctacagccaaaagtgttaagctggacggcaaaacatttcacccgggtgggaatgcaacctaccagggcaagaaatggagcgacaccctgcactacggcaaacgagtcctagccgagaaggtagtggccgagaatgtggccaaatacgacttttctttattcaagcccatactcgatagattagataaggcaatcgccgactatcccaagcaggtcgccaaaattgtcgcctccaagtga

SEQ ID NO: 8315 - RNA, 1647 nt, synthetic construct
  source 1..1647: mol_type = other RNA
atgaagtacctcaaaaggttgcaggacgcaagaacaactgaagacttcgctaagctgctcggtttcaaggccgggaacgtgagttatctcgtatatcattattccggccagaaatactacagcttccaaataccaaaaaagaatggaggcactcggaccatcaacgcacctaacgatgagctcaaaaaccttcagaggcggctctcagactacttgtataaatgcttagaggaaatccacctccaaaacaatattcatgacacagtgtcctatggatatcagaagaacaagtgcatctacgacaatgcccttatccatcggaatcgaaggtacgtgtttaatgttgacctaaaggacttcttcaattctatcaacttcggtagagtgagaggcttcttcattaacaacaagaactttaagctggatccccacattgccaccctcattgcacagacagcgtgtaacgacaatattctcccccagggctccccgctgagccctataattactattctgatcgggggaatattggaccatcgcatactacgtctgactcacaaaattaggtgcagctactctaggtacgtggatgatttgacctttagcacgaacctgaaaactttcccccctgagattgctttttttgatgagacaggtaaatgggtcatcggaaaggagcttaataacatcttgaaaacgagtggttttgaatctaacgaaaagaaagtctccatgcaatacaaggatagtcgacaaacaagcgttggcctgatagtaaataaaaaggtggacgtgccacgcgaatattataaaaccgtaagagccatgtgtaattcgctaatcacccgtggctactttgtcaaaaaagacgccgctgaggatgaaccccccactcttaaccagcttgaggggatgctgaattacattttctcagtgaagtccaagaataccaatgtccgggtgaaagaccactatccaggcttccagaacatatacatcgatttctatatctaccgctttttcttcgctaacgagaagccgatcttattcactgagggcaaaacggacatcatttatattagatctgcgctgaaacatctcaaggccgagtacccaaaactgatcacctcggaggggctgctgaactttcagctgatgtggatcaacgactatttacagtccgtcttccacatctctagcggatgttccggatcactgaaactgctcgttcagtatgagtcatttctgaagcgctacaaaaagaccgaatctatgaaccaagttttttttctgttcgaccacgatagtgggattaaggagatcgtgaacaaatacaagaagtacgattccgccaaggattacttcagcaagaatgacttttctagtttaagtgtcgaagtctataagaatgtgcggtttatctttacacacgaggaacatgataagtacatcgaacagtatttcgatgaggctcttctgtcagagaaaattaatggcaagtcatttacacctgagaacaatgtgcacgatcctgaacactatttcgggaagcaggtttttgcaaccaagataatcaagaaaaagcaggacagcattgattacagcaattttcgaccactgttcaatgaattgtccaaatacctgtga

SEQ ID NO: 8316 - RNA, 1689 nt, synthetic construct
  source 1..1689: mol_type = other RNA
atgtccttcctcactaaactgaaacaggccaaaaatgtgagtgacgtagctcatattttgggatgcagtccagccgctctgacgtatacaatctacaagaataacgcgaaatacaccacattcaagattaagaagaagtccggtggggagagatgtattacttcacctgatcggaagcttaaagaactccagaaaaggctcgctaaaggcctgcaagagtattttgatgagattaacaaaggacgcgataccgagacttccgcccatggttttgtgaaaggcaaatcaattctaacgaacgcctacaaacacaagaacaagaatctcgtcttaaatatcgatctggagaattttttcgacaccatcaactttggccgtgtgagaggttactttatctataataaagggttcgcactaacagagaaagtcgcttctgtcatcgcacaaatcgcatgcaacgaaaataagctgccccaggggagtccttgttcacccattatcagcaatcttatcggacagatactggacgttaagctttcctctatggccaaaaagaacaaatgcttctatacccgctacgtagatgatatcacattttcaacgaatcagaaagccttcccagagtcaatcgcaaatatcaacgatacacaagtgataatcgggaagaagctgagaaacgaaatagagaaggccggctttaaggttaacgatagtaaaactaggatgcagcttcggaacagcaggcaggacgtgacgggcctggtggtgaatcaaaaggtgagtgtcagatctgagatgagacacttagcacgtgccatgaccgacagtttcttcaaaaacaatactgcgtttatcagcatagatgggaaggaggagaatatttctatcgaacgcctcaacgggattttgagctttatctataacattaggaccggcgtatatggggcaaacggctgtaagaacactagcttgcacgactctttcgaaagaatgtacgcttgcttcttgttctataagaattttgccgccaacaagtctaccgttataatttgcgagggagagacagacaatatttacttgaagtacgcttttcgatccctcgtgggttgttatcctgaactgcaggtgattaagaagggagtaaaaaagcggctggatctgtctatctatcgacagaccaaaacccttgagaatctgctcaatatcaccgatggaacaggcaacaacatcaagttcattaaaacctaccgccagtccatgcgacggtatgcttcccccccgaaagtttttccagtgatcgttctgctagacaatgattcgggttcatcctccatagacggaataatcaatcgcgacttcatcgacacaagggaggtgtgcgatggctttacatacgtctgtgaaaatctgtacattgtcaagactcccctgatcgataagaagaaggaatcgaaaattgaagacttctttgacagccacacattaagcaaaaccctcggctctaaaacctttactagcgaaaacaagttcgacaaagagcagcattatgggaagaaaaaattcgccgaaataattgtgaagcaaaactacaaggagattgacttcagcaactttaagaagattatcgacctgttcaatgacgtcatactgcactaccaggaaaagcggaaccagaggtttaacttctga

SEQ ID NO: 8317 - RNA, 1674 nt, synthetic construct
  source 1..1674: mol_type = other RNA
atgagctttctcgctaagcttaaacaagcccagtccacatcggatattgccaaaatccttggatgtagcccagcagcgcttacctatacgctgtataaaaatcgaaccaagtacacagagttcaaaattaagaagaagaacggaggagaaagaatcatttcagtgcctgagaaaaagctgaaagaactccagaggcggttgtccaagggcttacaggagtgcataaatgaaatcaacgctaagaggaagttcgagacttcttctcacggcttcgttaaaggaaaaagcatctttactaacgcttacaagcataagaacaagaatctggtgctgaacatcgatctcgctaacttcttcgactccatcaatttcggccgtgtgcggggatatttcatacataaccgcgagtttgccctatctgacaaagtgagcagtattttggcccagattgtctgctacgacaataagctcccccagggatccccgtgttctccagtgatttctaatctgatagcccagattcttgacgtgaaattgtccgctctggccaagaagcacaattgttactacacacgttatgtcgatgacattaccttttcaaccaaccaaaacaaattctcagccagcatcatctcctttcaggaacgagaggttatcgtaagcgggcagttgaaaaaggaaatagagagggcagggtttaaaatcaactccgggaaaaccagactacagtttaagaattcaaggcaggatgtgacaggtctggtggtgaacaaaaaggtaaacgtcaaacacgaattgaaacatatcgcaagagccatgaccaattcattttttaagctaaacagcgcgtacatctcaattgataatcgcgttgaggaagtgtctctggacaggctaaacggaatgctcagttttatataccacattcgctccaagatgaatgacaacaatgacaccaagaataaaggcacacttgatagtttcgacaaaatgtactctaagttcctgttttacaagacctttgcagctaacaagagtacagtggtaatttgtgagggcgagactgacaatatctatctgcagtacgcgttccaaaatctggtcggtagctatccagagttgcagctgatcaaaaaaggcgtcaagaagaagatcaacattttcctgtacaagcagaccaaaacattaagtcacctgctgaatgttactgatggcacgggtaacaacatcaaactcataaagacctacaagcagaatatgtctggtttcgtatgccctccccaaaactatcccgtgatccttctcatggataacgacagtgggtccaatgggatcgaaggcttaattaatcgggacttttcagatactcgcaaaatacatgatgggtatacctatgtctgcgagaatttatatgtggtgaagacgcctctgatagacggcaaaaaggaaactaaaatcgaggacttcttcgattgcaagactctcagcaaaaagctgggggataagacatttagcgcatcgaacaattttgacaaaagcctctatttcggcaagagaaaattcgccgaactgatcgttaaacagaaccacaaggagattgatttctccaacttcaagatgattatcgacctgttttacctcgtcatttgtgattaccaaaagcggctgagttga

SEQ ID NO: 8318 - RNA, 1347 nt, synthetic construct
  source 1..1347: mol_type = other RNA
atgtcctttctggcgaagcttaaggagtcccagaacatctctgatatcgcaaatctgttgggatgcagcccaaaaagtctcgcatacacgatatacaagtcacagaacaattacatcacattcaagattaggaagaagaacggtgggcatcgggatatcaaagcacctgctaagaaacttaaggaattacagcggcgtttggcaaagggcctccaggaatgcatcgaggagatcaatggcaaaaaaaataagcgaatcagttctcatgggtatacaaagggcaagtcaatctttaccaatgcctatgagcataagaataaaaacctggtgctgaatcttgatttggagaatttcttcgactcaattaacttcggcagagtaagaggttacttcatccacaacaaaaacttcatgttgcccgagaagaccgccacaattattgctcaaatcgcgtgccatgagaattctcttccacagggatccccttgttctccggtcataagcaatatgatcgcccagattctggacgtgaaattgtccgccctggctaagaagaacaagtgcttttatactaggtatgtcgacgatctcaccatcagcaccaatcgaaatatcttccccaatgatattatggaactccacgaccacaaacccattattggaaagtccctgattaatgagattaaacgctcaggctttacaatcaacgacaacaaaactagggttcagtgtaaggactcgcgccaagatgtcaccggcctaatagtaaacaaaaaggtgaacgtgaagagcgagtttaaacacctggcccgcgccatggcaaataacttcttcaaaaacaaccaagcctttattagtctgaacggtgaaaaaactcccattagtctggagaagctcaacgggatgctgtcttttatttaccagataaggaatcgaatggatatgcagaatgctaatggacaacctagaaaaactcacgatagcttcgaaaagacctacagcgactttctcttttacaagaactttgctgcgaataatagaactgtggttatatgtgaaggggaaacagacaatatctacctaaactacgctttcaagaacctagtgagctattatccagagttacagaactatgggaaaggaatcaaaaagcgcattgatatccacctgtttaagcagacaaaactgctgtaccgtctcctgaatataactgacggggccggtaacaacataaaactgctgaacacgtatcagaagcggatgtcaaggttctccagtcctcgggagtccttccaattatactgttatcttatcaccaccgccgaccagctcggctctaaagaatga

SEQ ID NO: 8319 - RNA, 1707 nt, synthetic construct
  source 1..1707: mol_type = other RNA
atgagcgctttggagactcttaagaagctgaagaacctaaaagatgtggcagtgtttctggactgtaagcccaaattcttgtcgtacctgttgttttttgagaaggacaaatactcggaattcgaacttcggaagaaatcagggggggtccgaatcattcatgcccctaataagaagctcaaggctatacaaaagaagctgagcgacgttctctacgaatgccaggatgagatttaccctaaacagaagttcaaagtcctgagtcacgggtttgttcggaaagagaagatcaagaacaagatcttaatccatggcgcgctaagtaatgcaaaagcgcacaaaaacaagaataacgtgtttaacatcgacctggagaactatttcggctccttcaattttggacgggtaagggggttcttcattaagaacaaagacttcctgttgacagacaaatgcgccactgtgatcgctcagatcgcctgctataataattccttacctcagggatcaccatgtagccctataataagcaacctcatcagcagaagcctggacgtaaaactcgcaaatctagccaaacggaatagcgctacttactcccgttacgtggatgatatcaccatttctacgaacaagaagatattccctaagaatattgcgctgaatgattcccataaaatttctcttggagacgaattcagtaaaattatttccagttcaggcttcaccgtcaactctaagaagacacgcctccagtattcagacagcagacaggaagtgaccggcctcgtggtgaataagttcgtgaacataccacacgagtataggtctaacctcagacccaaagctcattcccttttcctgaccaacagttacttctatgtggataatgagggtaataaatgtgaagggagtattgataagctgaacggcctgttttcctacatccactttatccgaaaaaatacgatcaatcacgggaagtacatccgcgacaagaacggagagcttgccctcgatgggtcagactacttatatagccaattcctgtactacaaatactttgctaacaacgataagcctatcgtcatctgcgagggaaaaacagacgtgatttatctgaaggccgtgctcaaaactctggctgccgactatccagacctgattgaggtgaacaatgacaagacttctctgaagatccaaatcttaccagcatcaaaaaccgtccaggatttacttggcctactcaccggcaccgcagacttgagaaaatttatcctgtcttatgaggcccgcctggaagactttaaaagcccctcccttctgaatccagtcattgtattggtagacaacgatgatggtccacgtaagatcaacaacgccataaaggacaaatataagataagcccggaagcaggcaagccgtctatcatcttttccaatatggtctatgtgaggactcccgaactggagaaaaagaaagaaacatccatcgaggatttcttttccgacggtattcgcaaaattaaaattgatggtaggacgttcagtcccgatattgacgatgataccacagcccactttggaaaaaagacatttgctgaagaggttattctcaagaagaggaagaccctggattttacatcattcaagcccgttttgaatctgctcgttgagtctatcagaatatacaagaaaggcgcctga

SEQ ID NO: 8320 - RNA, 936 nt, synthetic construct
  source 1..936: mol_type = other RNA
atgactacactggagacactcaagaaattgaaagacttgaaagacgtggcaggtttccttgactgtaagcctaaatttctgtcttatctcctgttcttcgaaaaggagaagtacacaatttttaaggtgccgaagaagaacgggggcgtaagggaaatctatgccccaaaccagaaactcaaagccattcaaaaaaagctcagcgacatactgtacgaatgctattccgaaatctaccctaagaacaaatacaaagtcattagccacggctttgtgaagaaagagaacaactcaaaaaaggaggtcatttatggggcgctgtccaacgccgtcgagcataaaaataagcgcaacgtgcttaatgtggatctggagaattactttggatccttcaactttggtcgggtgcgcggatttttcataaagaataaggatttcgccctgagtgaaaaatgcgcaaccgtgatagcccagattgcttgttataataacctgctaccccaggggtccccttgttctcccattatcgcaaatctgatcactaggcctctggacatcaagttggcttgtttggcgaagaagaactctgccacttatagcagatacgtcgatgatatcaccatctcgacgaacaaaaagaccttaccaaaatgcttttgcctgaataacaagcacgagatttttcccggaaaagctctcgttgagatcatcaacaaaagcggcttcagcataaatgataataagacacgactccaatactccgattctcgtcaggaggtcaccggattagtagttaataagttcgttaatgtgccctatgaataccggcacaatcttagaccaaaggctcatagtctattcaatgagaactcatacttctacgaagacaacgagggcaacaggctttcaggcagtatcgaaaagctgaatgggtga

SEQ ID NO: 8321 - RNA, 1737 nt, synthetic construct
  source 1..1737: mol_type = other RNA
atgatgagctcactcgagtccctgaaaaagctaaagaacttgaaggatgttgctacctttctgggttgtaaaccaaaagccctgtcctacctcttgttcttcgatgagaacaagtaccgtacgtttgagattaaaaagaagtcaggtggctcccggaaaatcctcgcgcctaatgacaaacttaaggcgatccagaagatactgtctaatgtcttatacgactgctatgcggagatctatccaactaagaagtatagcgtaatttcccatggatatgtcaggaaggaaaagaatcagattaacaaggagaacaatcacacgaaagatcaaaacctttcttatgggactataaccaattctatcccgcacaagaacaagcataatgtgcttaacatagatctggctgattacttttcgtcctttaatcttgggagggttagaggcttttttatcaagaacgagagtttcaagctaagcaccgaatgcgcaacagtgctggcccaaattgcatgctatgaaaatgaactgccgcagggtagtccatgttctcccattatcgctaacctgataagcagaagccttgacgtgaagctagctgggctggcaaaagagaattccgccacatacactcgctatgtggatgacatcaccatttccacaaacaaaaaagtcttccccacgaaaatcgccggcgtgattgataacaaagtgacactgggcaaatcactgcagcggattgtgattaagtccggatttactatcaacccccctaaatcaaggttgcaattctcagacagcaggcaggaagtcaccggtcttatcgtgaataagttcgttaatgtaccatcaaactaccgacataccttaagacctatggtccatagcctctttaagaacaatacctacacctatatgaacgacgaaggagacaatgtaaaaggatctatcgatcggctgaatggaatgctgagctatatccactacatccggtccaacactataaacaaggggaaatacgtgcgcgacgataaaggcgggataagattggacggaagcgatcagctatacgctgacttcttgttctacaaatatttcgccaacaatacccgtcccgttctcatctgtgaaggcaaaaccgatgtgatttatctcaagagcaccctgaaagccttggctgacaattaccctagtctcatcgagaaggatggatctaaaacccacctgaaaattcagatcctgcctgcatccaaaacaattcagaatttacttgggctgctctctggggccgacgacctcaaaaaattcatggagacttacgaagcaagattttcaaaatatgccaagccaagtgcactgcatcccgtgattgtgttagtcgacaatgacgaaggtccccgaaacatcaactccaagattaagaacaagtacaaggtcattccaagtcctgggactccagtgaaggtatggggcaacttactgtacgtgcaaactcccgagatcgtgggcatgaaaaacacagccatcgaggatttcttctcttctgaaattcggaagatcaaggtcgaaggccgcacattcagccctcagacggagacagagacaatagctcactacggcaagagggtttttgccgaggacgttatttcgaagaagcgcaagatcctcaattttgacagctttaagcccatattggatctgctggtgagtagtatcgatctccacaatctgaaaaagtga

SEQ ID NO: 8322 - RNA, 1758 nt, synthetic construct
  source 1..1758: mol_type = other RNA
atggctaccggcggcagtccatacgagtgcgacaaatcagtgtatagacctcttccctctattttcaacatggatattatgagcaagctggcagatatccggtctttgaagagcttatccgacgtcgcagactttctgggttgtgagcccaaaaacctggcatactcactgtattttgccaaaaacaagtacaaatccttcgagatctataagaaatcaggaggcgttaggattatcaatgctcctaatgagaaactgaagagtcttcagaaaatccttgccgggtacctcagtgagtgtctagacgagatttacaatactcacggtggcaataagatttctcacggatttgtcaagggcaaaacaattatcaccaatgcgagccagcaccggaacaaaaacctagttttcaatatcgatctgagcgacttttttaacacaataaactttgggcgagtaagaggattcttcatcaagaacaagtacttttccatggatgagaaagcggccaccgtattttcccagatcgcatgccatgaaggcagattaccccaggggagcccttgttctccagtgatctccaacctgatactgaatatccttgatatacgactggcttcgttggccttcaaaaatagttgcaattacacccgctatgccgatgaccttactttcagtacaaatcgtaaggaattcccaatcgacatagtgaaagacgagctaggcgattgggtggtcgggaacaaacttcataaggagatcaccaaatgcggattcattatcaataagagcaagacgcgcctccaatacaaagactctcgccaggatgtgactggattggtggttaataaattcgtgaatgtcccgtctgactacaggcgtctcactaaaagcatggcccacgaactatttcggactaacgaattctacataaagttacctgatggggaaagcatagaaggtacccagaaccaactcaacgggatgctgtcatacatttatagtaccaggaagataaccatccacaagaacttcgactcaaccatccccagagacggcaaaggcattcccattctcgatgcttccgacagactgtatagcgatttcctcttctacaagaattttgtggctaacgacaaacccattgttatctgtgagggcaagacagacgtggtctatctcaaacatgctattaaatccaggtatgagaaatacccgaacttggttgaaattaagaagaaggaaaaggccctgaagatccaaattctgggagcaagttttctcgtcaatcacttgctggatctgctcaccgggacaacagccatcaaacggtttgtggaatcttatgccactcggctgagcaaatataaatgccccccactgaacaaccctgtaatcatcctgactgataatgacgatggcatcaaaggtctgatacacgcgattaatggtaagtataaggaatcagaagaccgagatggaatttactttattacgtccaacttgtacctcatacgcacccctctgctgaatgacaagaactcctctaagatcgaggatttcttcactaaggagctgttggccaggaagctcgatggaaagacatttcatccagacaacgacaccgataatacaatgcattactcaaagcaggtgttcgtggagaagattattaagaaggagtataagtccatcgactttagcgggttcgactcgatcattaacttacttgagaagacgatcatcgatcacaaatga

SEQ ID NO: 8323 - RNA, 1674 nt, synthetic construct
  source 1..1674: mol_type = other RNA
atgtcaaaactgacggagatatcacagctccaaagtctcagggacgtcgcaattttcctggggtgtgagcccaagaatcttgcctattcactgtactttgagaagaacaagtataagtccttcgaaattcacaagaaatctggaggcgtcaggattatcaacgctcccaacgaaaagctcaagtctctgcaaaaaatcttggcctgtcagctgaatgaatgccttgaggagatatacaggatgcacggcgggaataagattagccatggttttacaaaggggaagactattatcacaaatgcaagcaagcaccggaataaacgcctggtgttcaatattgacctgacagacttcttctctaccattaattttggccgggtccgcggcttcttcatcaagaataaccatttcaacttgaacgaaaaggccgctacgatccttgcacaaattgcctgccacgagggaaaactgcctcaggggtcgccttgcagcccagtgattagcaacctcattctgaatatccttgatgtgcggcttgccaaacttgccagtacaaatagttgcacttacaccagatacgccgatgatttaaccttttccaccaacaaaaacgattttcctagcgatatagctcgacagtccgcagagaacacatggatccctggttctagggtgcggaaagaaatcctaagatccggttttagtgtaaatgacaagaagaccagactacagtactatgattccaggcaggacgttaccggattagtggtcaataaggtggttaatgtgcccagcgagtacagacggcttgtgaagagtatggttcatcagttatttaacaccaacgagttctatctgaaactgtctgacggagagtctctggaaggctcccaggaacagctgggaggcatgctaaactatatttacagcactcgtaagacaaccattcatcatgggaaggtcaaacgcgatgctgagggcaacctgctcttggacgcttcagatcgaatgtacgccgatttcttgttctacaaatattttgtggcgaataacaagccaatcattatttgtgaggggaaaactgacgtagcctatatgaaatatgcgatcaagtcacgaagcaatcactttccaagcctcgtggaagaaaccgaaggtaaaaagcaactcaaaatacagatcttggcagcttcaaatactgtgaatcacttgttggatctcctgaatggcacctcctctatcaaaaaattcatagagctgtacgacagtaagttaaagaagtataagaaccccatcctgaaaaacccggttataatactaacagacaatgactccggaagttcaaacctgataccgactatccgtggaaagtacaagaactccgaggaaaaggacggtttttacttcatcacgaagaacctctatctgatcaaaacaccactcatcaacgggaatgactcgtctaaaatcgaggatttctttaccaaggagctcctgtctagaaaactggacggcaagacttttcaccccgataacgatacggataataccatgcattacagcaaaaacgtatttgtggaaaagatcattcgcaaagagtataaatccattgacttttccggcttcgacagcatcctgaatttcatcactaacgtcatcagcacacacaaatga

SEQ ID NO: 8324 - RNA, 1677 nt, synthetic construct
  source 1..1677: mol_type = other RNA
atgtccgaactcatagaaatatcaaaactgcaaaacctgagtgatgtggcccattatctcggatgcaagccacagtccctcgcttacactctgtatcatgaaaagaacaagtacacgacgttcgaaataaagaagaaaaatggtggtgtccggctgatcaactccccttgtgacaagctgaaggtacttcagcggatcctggctaataaattgtcagaatgcctcgacgaaatttacaaagagaatggaggcaataagatttcccacggcttcgtgaaaaataagaccattatcaccaacgcgagtgaacaccgaaacaagaacctcgtgtttaacatcgacttaactgacttcttcaataccataaacttcggacgtgttcggggctttttcatcaagaacaacaacttcatgcttaatgaaaaggtggccaccatctttgctcagatcgcctgccatgacggcaaactgcctcaaggaagcccctgttcaccagtgatctctaatctgatcctgaatatcttagatatccgccttgcaaagcttgctttttcaagtaattgctactacacacgatacgccgatgatttgacattttccacaaacaaaaaggtcttcagtaagaacattgttaagtaccgggatgacggagcaccagagtcagggcctcttctgacaaaagaaatttctaggagcggcttcattatcaatgacaaaaagactagactccagttctgtgattccaggcaggatgtgacagggctgatagtaaacaaagttgttaacattccctctgactatcgcagactcatcaaggctatgactcatgagctgttctgcaagaatagctactatatcaaaaacgccaacaaaaaggatcagaaaggaaacctggagcagctgaatggcatgctatcttatatctactctgtccggaaaaacaccatacacaaaaatatcaccacaagggacagcaagggtaatccgaggctagacgccaatgagaagatctacagcgattttctcttttatagatacttcgtcgcaaacgacaaacccattctaatctgtgagggcaagacagacgtggcctacattaaatacgcaatccgaagccgctccagcagatataactctttggtagaggaagaatatggggagaagaaactgaagattcaggtgttgaacagcagcggacaagtcaaccatttgctggatctcttgaatgggacctccagcatcaaaaagttcattgagaactatagtgcgcgtcttaaaaagtacgagaagcctctgtttactaatcccgtgattattctcactgataatgacgacggctcatccaaactggtgccagccataaaaggcaaatacagggggagtaaggagataaacggttttcacttcatcacgaacaatctgtttcttattaagactccgctatttccagataaacctgatagcaagattgaggacttcttcaccaaagagttattatcgagaaaactgaatgggaagacctttcaccccgataatgacacagacaataccatccactattcgaagaacatcttcgtggaggagattatccgcaaagagtataagtctattgatttttccgggtttgatgagatactggacttgattgtgtctgtcattgacgaatataagaagtga

SEQ ID NO: 8325 - RNA, 1917 nt, synthetic construct
  source 1..1917: mol_type = other RNA
atgagctggagatttcttggaagctgccaagtgtgcgttcgcgtgcccatcaacctttttaaatggggccggcgggttaaccggctacttctcctgaagtcggcaaagactaagcctgatctcgctcgaatactgggtgttaaaccatccgctctaacccattgtttatacatcgtgaagcctgaaaaccagtatgtgcagttcgagatcccaaagaggaatggggggaagcgttttatctctgccccctcaggcatgttaaaaaccctgcagagcagcctatcagatctcctgctggactgcctcgatgaaattatctttctaaagttcccagactcagagattactcgcccgaaggcaaagaactcgctttttttgaaggtgaagtgtagcggctctgagacaaagcaaccatctctgtcccacggctttgaacgcaagagaagcatcataacaaatgctatgatgcacctgggcaaaaaacacgtgttcaacattgatttggaaaacttcttctcatcctttaactttggaagagtgcgtggttttttcatcaagaacgggaactttctgctggagcccgagatcgcgactgtgatcgcaaagattgcctgttacaataacgaattgccccagggaagtccttgttccccggtcatttctaatctgattacccatgctctcgatatcaaattggccgcggtcgctgctaagcacagctgcacttatacccggtatgcagacgacattacattctccaccagaaaggagagcctccctagtagtatagctaagagcgataatcatactttcgtggccgggaaagtcatacgcaatgagatcgttaggtctggcttttctattaatgagtcgaaaacacggaatcagtacaaggacagtagacaggaggtgactggactggtcgtcaataaaaagcccaataccaagaaagaatactggagactggtgagggcccagtgtaaccacctgttcaataccggggagtttaaggaaacaataaatggagcggaggttagtggcaatattcacaggctggagggcaagcttacatttattgaccaggttgaccactacaatcggctccgacaaggggagaaactgaaccccaagtatcacctcaaaaaagacgctattagaaaatcaaacccctctatccggcgatatcttcatacctctagggagacaactttcagtaagttcctgttctacaggtggttctatggaaacactaaaccaaccatcctgaccgaaggccagaccgacaatatatacttgaagtctgctatctggaagttagcagcaaatttccctaaactcgcgacggggaaaagtgccacagagccttataaggccttaacacggttctttaaatacaatgagaggaccaggtatctgttagagctgttcggcgggggagattacttgcgtgacttcgtggacaactataaagaactgttcaacgcctataaagcccctaagccgtcccatcctgtcattattttcgtggataacgactccggccccaacaatctgattaacaaagtcaagcgagtaaagggcatcgaaatctttccagcaggtgtcgggctggccgatatccgccagtcagaatttgtacatatcttctgcaacttgtacctggtgctcaccccacaaggtgccggatcctccgagacggacatagagtacttttttagcgatgccgatagacttagggaacacaaaggtaagcgcttcaacacagtggcagaccgagatgaagtgaatgacctcagcaaagaagccttcgccacgcatattgtaaaaacgcagaagggaatcattgatttctcacgctttactcatctccttgaaagaatcgagaaggtaatcgaccactacaactccataaaatga

SEQ ID NO: 8326 - RNA, 1836 nt, synthetic construct
  source 1..1836: mol_type = other RNA
atgaagaaactggacctgcttaaagccgctaagacaaaacccgatctggcaaagctcctcggggtaaagccctccgcactaacctattgtctttataaaacaaagccggagacacagtatgtgcagttcgagattcccaaaaagaatggaggtaaccgtattatttctgccccctccgggatgctgaagaatatacaggcctccttaagtgaattactgttagactgcctagatgagatcatcatcgacaaatttcctaattcagagatcgccaggcagaaagcaaagaatagtatcatcttgaagctcaaatgcagcgggagtgaaatcaagcaaccatctctgtctcacgggtttgagagaaagcgttccatcatcaccaatgcgatgatgcatctggggaaaaagcatgtgttcaatattgacctggagaacttcttcggtagcttcaactttgggcgggtgaggggtttctttatcaagaataagaacttcctcctggaacctgagattgcgaccgtaattgccaaaattgcttgttataacaacgaactcccccagggtagcccttgttcccccgtgatatctaacctgatcacacacgccctggacataaaactggccgcagtcgcatcgaagtatagttgcacctacagccgatatgcggacgatatcactttttctacaaggaaggattccctgccgtcgtccatcgctaaatcagataatcacacctttgttgctggaaaggtcatcaaaagcgagataaaacggtccggctttagtataaatgaaacaaagaccaggaaccagtacaaggactctcggcaggaagtcaccggattggtagtgaataagaaacctaacactaagaaggaatactggagactggtgcgagcccagtgcaatcatctcttccgcaccggccaatttaaggaaatcgtggacggagtcgaggtggtcggaaacatcaatcggctcgagggtaagttgaacttcatagaccaggttgatcattacaatcggttaagacagtcagagaagctgaaccctaagtaccacttgaaaaaagatgctctgaagaatggctatgccaagtcccgcagatacctacatacttctagggaaaagacgttcagcaagtttctcttctatagaatgttctacggcaacaagaaacctacgattcttactgaggggaagacagacaacgtgtatcttaaggcagctattcacaaactcgctgctttatttcctaaactggccatagagaaaaccgcccttgccccatacaagctccttactcagtttgtcgaatataacgagcgaaccaaatacctgcttgagttgtttggcggcactgactatctgaaagacttcgtgattcattaccgccattacttccacgattacaaagcaccaaagccatcaaatccagtaattattttcgtggacaatgattctggccccaaaaacctgattaactacgtcaacggcgttgagggcatccaaatttttcccgcgggcgttgctgacatccgccaaagcgatttcgttcacattttctgtaacctctacttggtgcttaccccacaagtggaaggatgcccagagacggatatcgaatactttttctcaaatgtggacagactgaaacagcacaagggaaaatgtttcaacactgtcgccgacagggatccgagcaatgatctgtcaaaggaagcatttgccacacatatagtgaacgctcacaaaaatgacatcgattttagtcgctttactagcctattggagcggctggagaaagttattgatcactataacctcatcaagtga

SEQ ID NO: 8327 - RNA, 1836 nt, synthetic construct
  source 1..1836: mol_type = other RNA
atgaagacgctgcagtcgctgaaagaggccaagactaagccccagctggcaaagatccttggaatcaaaccttctaccctgacacactgcttatatgtgcttaatacgaacaaccaatacatcaagtttgagatacccaagaagaacggtggaatccgggttatccacgccccaaccccaatcctgaagatgatacagaaatcactttcgaagcttttactaaactgtttggacgagattatcttcaccaaatttccaaatagcgaactggccagacagaaggccaaaaattccggaattctgaaggtgaagattagcaacgcagagataaaacagccttccttgtctcacgggtttgaaaggaacaggtctattattaccaacgcgatgatgcatctagataaaaagttcgtattcaacatcgacctgcatgacttttttggatcttttaatttcggcagagtgcggggctactttattaagaaccgtaattttgagctccaccctgatatcgcaacagtgattgctaagatcgcctgttatcagaataaattgcctcagggcagcccctgtagccccgtaattagcaatctgatcactcacgctctagatattaaactcgcaaagcttgccaaactgagctcatctacatacacaagatatgccgatgacataacattttcaaccagactgtcagaactgccgaaatccatagcagaaaaagagaatcacaaatacgaaccaagtaaaaagatcacgaaagagatcaacaggtcaggattctccatcaatacctccaaaactaggaatcagtatgctgactcccgtcaagacgtgaccggcttaatcgtcaacaagaaaccgaacactaagaaagaatactgcagattggctcgcagtcagtgcaatcacctgttcaagcggggcgagtttaaggaacttatcaacgggaacgaagagaaaggtaatatcaactctttggagggcaaactcaatttcatcgatcagatcgaccattataaccgcctgaggcaaactaagaagctcaaccctaagtatcagctcaaaaaggatactatcaagaacggcaacgccaagctccgccgctacctgcactccagtcgtgagaaaactttcagtcagttcatattctaccgacacttttatgggaacgagcttcctaccatcttgacagaagggaaaacggacaatgtttacctgaagagcgccataaacaaactcagcgcccagttccccgaattatccagaagtaagaccagtcaagcagagtataagctcctgctgaagttcttcaattacaacgaacgcactcgatttctgttagagttgtttggaggtaccgattacctcagagactttatcgtcaactacaagaagaacttctcttactaccaagctcccaaacccaagaagcctgtcattatcctggtggacaatgatagcggcccaagggacctcataaattatgccaagaatatagagggcgttatgatttaccccgctggtaccacagaaatccgggatgccgacttcgttcacattttccataatctctatctggtcctgaccccaaagaaaccggggcataatgagacagacattgagcttttctttaaggatgtggatcgcctaaggatttacaacgggaaacactttaatacagccgcgcagcgggataagaatcgagatctctccaaggaagcttttgctgaacatgtgattcatgctcagaaagacgtcattgacttctcagagttcccagcaattctggagcggctggtgaaagcgatgaatcattatgacaccattaaatga

SEQ ID NO: 8328 - RNA, 1650 nt, synthetic construct
  source 1..1650: mol_type = other RNA
atgattcaaagttcactttctgggctgttgctcgattgtcttgacgaaattatccacaacaaatttccagaatcggaattggctcgacagaaagcaaagaactctaaaattctgaagatcaagtgttcctcagctgagattaaacagccatcactctctcatggctttgaaagaaagcgcagtataataaccaacgcaatgatgcacttaggcaaaaagtatgtgttcaacattgacctggaggattttttcgggagcttcaatttcggaagagtgcggggattcttcatcaagaatcgcaattttctcttagatcctgagattgctactgtgatcgctaaaatcgcctgttgcaataatgaactgccacagggaagcccttgctcacctgtgatcactaacctgataacacattcactggatattaagctagccgccattgcaaaaaaaaattcctttacgtacacccggtatgccgatgatataacgtttagtactcgcaagagcgatttttcaagctccatcgcgaagaaacagaacaacaagtacgtaatcagcaaaagggtgcgcaatgagattatactgtccgggtttatcatcaacgagtctaagactagaaatcagtacaaggacagtaggcaggaggtcacaggcttggtcgtgaataagaaacccaacacgaagaaagagtactggagactcgtgagggcgcagtgcaatcacctattcaagaatggagagtttgtcgagataatcgattccaaagagacaaagggtaatattaacagacttgaggggaagctgaacttcatcgaccaaattgaccactataatcgactccgtcagggtgaaaagctgaacccgaaatatcatctgaaaaaagatgccatcaagaagggtcaagccaagtcccgtcggtgcctccataacagtagggaaaagacattctctaagtttctcttctacaggttgttttacggaaacaaccttcccactattctcaccgaaggcaaaactgacaatgtgtatctgaaagcagcgatccacaagctggctagcctcttccctaagctggcagtcgttaaaagtgcaagctccccgtataagatcttgaccaatttcatcgattacaatgaacggacaaaatacttactggagctctatgggggcgccgactatctgaaagacttcatcatccactacaagaacaatttcaactactacaaagcccccaaacccagcaatcccgttataatttttgtggacaatgatagcgggccaaaagacctaatcaactacgtgtccaagatcaatgatattaagattagccccaccggcctgatggacataaggtcttcagagttcgttcatatcttccacaacctttatttagtcctgacccctcagattaagggctacgctgaaaccgacattgaacatttttttacagacaccgatcggctgcgcccacataaaggcaaggtatttaacacagcctccaagcgagatcctgacaacgacttgtccaaggagtcgttcgctactcacatcgtgcacgccaagaagcatgacattgacttttctggattcacctctctgctggagagacttgaaaaagttatcaaccactatgataccgtaaaagagtga

SEQ ID NO: 8329 - RNA, 1644 nt, synthetic construct
  source 1..1644: mol_type = other RNA
atgcagagctcgcttagtcgcttgttactcgactgccttgatgaaatcgtatgcatcaagtttcccgattctgagctggcccgacagaaagccaaaaactctaaaatcctgaagctcaaatgctccaattccgagatcaaacagcccagcttgtcccacggattcgagcggaaacggagtattatcactaacgcgatgatgcacctgggaaaaaaatatgtcttcaatatcgacctcgataacttcttcggatcttttaatttcgggagagtcaggggcttctttatcaagaatagaaatttcgcgttggaccctgagatcgctacagtgattgctaaaattgcctgttacaacaacgaactcccacagggtagcccttgcagccctgtgatcactaacttgattacccactccctggatattaagctagctgcaatagctagtaggaacagttcaacattcacgcgttacgcagacgatattacatttagcactcgcaagggcgagtttccctccgccatcgccaaaaaccaaaacggcaagtacatagtgtctaagaaaatccgaggcgagatcacccgctcagggttcatcatcaatgacgggaagacgagaaatcaatataaagactcccgtcaagacgtcaccggactggtagtgaataagaaacccaacactaagaaggagtattggagattagtgcgagctcagtgtgaccacctgtttaaacatggcgagttcctggaagtaattgacggcaaagagatcaaaggcaacgtcaacacccttgccggaaagctcaactttattgaccaggtggaccattacaatagactaaggcagggtgaaaagctgaatcctaagtatcacttgaagaaggacgccaataagaatgggcacgcaaaaaagcggcggtaccttcattcatcaagagagaaaacattttccgaattcctgttctatcggcttttctacggaaacgagctgccaacaatactgaccgagggcaagacggataatatttatctcaaggctgcaatccataagctcgccagttctttcccaaaccttgctgtggcagagagccctggtctgtcatacaagccacgcaccaaattcgttaattacaacgaaaggactaagtatctcctggaactgtatggtggcgctgactacttgaaagatttcgttatccactataagcagcattttaaccgttacaaggcccccaaaccatctaatccggttattatcctagtcgataacgatagcggccccaaggatctgataaactacgtcagcaaggtggacaatataggtatttttccaaccggggtgcccgatatacgcgcaagcgaattcgtgcacatattctgtaacctgtatctggtgttaacaccgcaggtgaagggatacactgggactgacattgagcatttttttaaggacgcggataggttacggcctcataaagggaagttttttaacaccgtatctaaaagggatcacgacaatgatctctccaaggaatcatttgccacccatatcgttcacgcccataagcacgaaattgactttagtgggtttacatcgctcctggaacgcctggtcaaagttattaatcacttcgataccgtgaaatga

SEQ ID NO: 8330 - RNA, 1857 nt, synthetic construct
  source 1..1857: mol_type = other RNA
atgaacagactgcaatcactgaaggaggcaaagaccaaacccgacctagctaaattgctcgatgttaaacctagcgctttgacttactgcttatatatcttgaagcccgaaaaccagtacacccaattcaaaattccgaagaaaaatggaggagagagaaccatcaatgcccctaatgggttactgaagtctatccagagcagtctttctaaactgttactggactgtctggacgagattattttcaacaaattccccgattctgagctcgctgctgagaaggccaacaacagcaaagtattgaaaatcaagtgttccgccgcagagatcaagcagccaagtttgtcccatgggtttgagcggaaaagatctattataaccaatgccatgatgcacctcggcaaaaaaaatgttttcaacatcgacctggagaatttttttggcagctttaactttgggcgggttcggggcttcttcatcaaaaaccgtaactttgagttagaccaggagatcgcaactgtgattgcgaaaatagcttgctacaataatgagcttccgcaaggctcgccatctagccctgtcattaccaatctgataacacattccctcgatattaaattggccgcgctcgccgtgaagaactcttgcacgtacactaggtacgctgatgacattacattcagtaccaggaaaatcgactttcccagcttcatagccaatgataagtgcggcaaattcgccccgagcaagaagcttcgcagcgagattgtccggtctgggtttcttatcaacgacaaaaagacacgaaaccagtataaagactcaagacaggatgtaactggcctcatcgtgaacaagaagcccaataccaaaaaggaatactggcgcctggtgcgcgcgcagtgtgatcacttgttcaaatatgggacatttgtggaaaagatcgatgacatagaaatcaaagggaacatcaataggcttgaaggtaaactgaacttcattgaccagctggaccactataataggctccggcaggccgagaagcttaacccaaagtaccagcttaagaaggatcctacaaagaatactcaggctaagactcgtcgctatctgcatggcggaagggagtctacgttctcacgttttctcttctaccgactgttctatggtaatactctccctaccattctgacagaaggcaagactgataacgtatatctgaaggcagctatccacaaactggccgccttatttcccaaactggccagcgaaaagagtgccggatcaccctataagagtctcacgcgcttcctggactataatgagcgaaccaagtatctcctagagctgtttggtggagctgattaccttaaggactttgtgatccattacaagtcgtactataagtactataccgcaccagaaccttcccatccagtgatcatttttgtcgacaatgacacggggccaaaagacctcattaactacatcaacaagattgataacgcgtcaatattcccaaaaggactgaaagatattagaagcagtgattttgtccacgtgttccacaacctgtacctggttctaacacctcagaccaaaggttactccgaaacagacatagaacatttcttcaaggacaaggacagactgcggcaatacaaaggaaagtcattcaataccgtctccctgcgcgatcctaacaatgacttgtcaaaggaggcattttccaagcacatcattcatgcaaataaacacgatatcgatttctccggctttacatccctcctagaaaggctggtgaaggtgatagaacactttaatagtctgaagatcaagaacagctccgcaccctga

SEQ ID NO: 8331 - RNA, 1842 nt, synthetic construct
  source 1..1842: mol_type = other RNA
atggagagactccagctacttaaaaatgctaagaccaaacccgatttggccgcgcttctgaatattaaaccaagcgtgctcactttctgcctttataaggtcaaaccacagaaccagtatacccagtttatcatccccaagaaaaacggcggagaacgcattattaatgccccaactggagtattaaagtcaatacaatctgccctgtccaacctcctgctggactgtctcgatgagataacccggaataagtttccaaagtctgagctcgtgatcgaaaaagctaagcatagtaaggtgctgaaagttaagtgctccaatagtcaatctaaacaaccgaccctgtcacacggattcgaacgaaagagatccataattacaaacgccatgatgcacctaggcaaacgccacgtgtttaacatcgacctcgaggatttctttgcttcattcaatttcggcagggttaggggattctttatcaagaacaagaactttgagctggagcctgatatcgctaccgttatagctcagattgcctgtcacaataatgaactgcctcaaggcagtccttgctcccccgtcatcactaatttaattacccattccctggatatcaagctgtctgccctcgcaagcaagaattcgtgtacctacactagatacgctgatgatataactttcagcacccgcaagaaagaattccctattgatattgcaaggaaaaaaggagagcagtttatcagcggcaaaaaacttcggagcgagataatcagaagtgggtttaagattaacaagggcaagaccaggaatcagtataaggacagcaggcaagatgtgacaggcctgatcgtgaacaagaaacccaacacaaaaaaagagtattggcggaaggtgcgcgcacagtgtgactacttatttaagtacggtgagtttatcgacacagtgaacgggaaagaggtcaaaggaaatattcactctctggaagggaagcttaactttattgatcaggtggaccattacaacagattgcggcagacgctgcccttaaacagtaagtatcagttgaagaaggacgcgattaaaaatggacaggcaaagttgcggcgatacctccactcaggcagagaggagacattcagtaagttccttttttatcgcctgttctacgcaaacgagtctcctacaatattgactgaaggtaaaacggacaacatttacctgaaggcagccatccacaaactggctggttcatacccaagactcgcgtcggaaaagaatgacaacagcccatacaaactgctaacccgttttgtcgaatacaatgaacgaaccaagtatctactcgagctgtacgggggtgccgactacttgaaggacttcgtagtccattataaacaccacttcaaatactatgaggcccccaaccctcagaacccggtggtaatttttgtggataatgactccgggccgaacaacctgatcaactatgtaaacaagatcaatgggaagtgcatctatccagagcatatcaatgatatccgtgcttccgagttcgttcacgtgtttcataacctctatcttgtcttgacaccccaggtggccggcttcaaagaaactgacattgaacacttctttgtggaatccgaccggttaaggccttacaaaggcatgatcttcaatacgattagcaagaggaaccccgaaaaagatctgagcaaggatgcctttgccacacatatcatccacgcaaaaaagaatgagatcgacttcaatgggttcaaatctctgctggaccgcattgtcaaggttatcgagcattacgactcaataaataagaagtga

SEQ ID NO: 8332 - RNA, 1836 nt, synthetic construct
  source 1..1836: mol_type = other RNA
atgacccggttacaagcgcttaagaaagccaagaccaaacctgaacttgctcatctgctcaatattaagccttccgtgctgacttactgcctctataaaataaagccgcagaaccagtacacccagttcaagattcctaagaagaacggcggggaacggacgatcaacgcaccaactgggacactaaaatctatccagagcgctttgtctgagctcctcttggattgtagcgacgagatcactcgcaataaataccccgagtctgagttagccagagagaaggcgaaacactcaaaaatcctgaaagtaaagtgtagcaactcgatcatcaaacagcccacattgagccatggatttgaacggaagcgctccataattaccaatgccatgatgcatctcgggaaaaagcacgtctttaatatagacttagaggatttcttcgggtcatttaattttggtcgggtgagaggcttcttcattaaaaataagcagttcgagttggagccagagatcgccacagtgatcgcacagattgcctgctataataacgagctcccccagggaagtccatgcagtccagttatcaccaatcttataacacacagtctggacatcaagctcgccgctctggcttctaagaactcttgtacttacacccgatacgcagacgacattactttctcaacaaggaagaaagaattcccgtcattcatagctcaacagaaggacgatcagttttttgccagtaaaaagctgaggagcgagattgtgagatccgggtttaagattaaccctagtaagacgaggaatcagtacaaagattcacgtcaagacgttaccggtttgatcgtgaacaaaaaacccaacacgaagaaagaatattggagaaccgttcgcgcccaatgcgactatctatttaaatatggcgagttcatcgaagtgatcgacggagaaggggtgaaaggcaacattaacagtctggaaggtaagctgaacttcattgaccaggtcgatcattacaatcgcctgcggcagacactgccccttaatcctaagtaccaattcaagaaggataccataaagaacggtcaggcaaagctgcgcaggtacctccattcaagccgtgaggatacatttagcaaattcctcttctatcggtttttttacgcttcggaacttcccactatcctgacagaaggaaagacggataacgtataccttaaagcagcaatccacagactggcttcttcctatccagagctggccctcgagaagaagggcgatagcccatataagctgctgacccgatttgttgaatacaacgaaaggaccaaatatctgctagagctatacggcggggccgactatctgaaggactttgtcattcactataaacagaacttccgcttctataaggcacctaaacctgagaatcctgtaatcatcttcgtcgataacgactccggacccaataatctgattaattacgtgagcggcattcaaggcaagtacatatacccggaatccgtgaaagatatcagagcgtccgagtttgtccacatcttccataatctctatctggtgttgaccccacaggttgctggatttaaggaaactgatatcgaacacttctttaccgacaacgaccgattgagagaatacaaaggcatgtgtttcaatacaatcctgaacaggaagcccgagaaggatttatccaaagatgccttcgcgactcatattgtccacgccaaaaaaaacgagatcgattttgacggatttaagattcttctggacaggatggtcaaggtgatagagcactatgtgtctattaagtga

SEQ ID NO: 8333 - RNA, 1836 nt, synthetic construct
  source 1..1836: mol_type = other RNA
atggagcgcctccagacgcttaagcaagcgaagacaaaacccgatctagcaaatatactgggcattaaaccatccactctcacgtactgcttatataaactgaagccccagaatcagtatgcccagttcaacgtgccaaaaaaaaacggaggcgtgagggtgattaatgcccctactggcactctgaagtctatccaggctgcccttagtatcttgctgttagactgctgggatgagatcctcaagtctaagttccctgctagcgaaatctccagagagaaggccaaacatggaaaaacactgaaagtaaaatgcagcaactcagaaaccaaacagccttctctatcccacgggtttgaaaggaaaagatccatcataaccaatgcaatgatgcatctgggtcagaagcacgtttttaacattgatctggaggactttttcgggtcgtttaactttggtcgagtacggggctttttcatcaaaaatagggacttcgagttggaccccgaggttgccaccgtcattgcacaaatcgcatgtttcaacaacgaacttccacaaggaagcccttgcagcccagtgataacaaatctgatcacccatagtttagacatcaagttggcagctcttgcctcccggaactcttgcacctatacccggtacgcagatgacatcaccttctcaactaggaagagctccctccccaagtgtatagcccagaatcgtgacggggagttcttagtgggtaaaaaactgagatccgagataactcgctcaggttttaatatcaacgacaaaaagacacggaatcagtacaaagactcgcggcaagatgtaacaggactcattgtgaacaaaaagccaaatacgaagaaggaatactggagaaccgtgcgggctcagtgtaaccatctgttcaacaatgggttcttcattgagtctattaacgggaaggacgttaagggaaatataaaccgactggagggcaagctgaatttcatcgatcatgtcgaccattataatcgtctgaggcagacactgcccttgaaccccaagtaccagtataaaaaagacgctattaagaacgggcaagccaagctgcggcgctacctccacaccggaagagaggatacattttcaaagttcttgttctaccgccttttctatgccaatgatctccctacaattctaactgagggaaaaaccgacaatgtctatctgaaagcggccattcacaagttggccggcggctttccgaaactagccactgagaagaatgggaattcaccttataagctgctcactcgttttgtggaatataacgataggacgaagtacctgctggaactgtatggcggcgcggactaccttaaggatttcgttatcaactacaaccaccactacaagtactataaagctccaacccccaataatcccgtcattatctttgtggataacgacactgggcctagtggtttgatcagctacattaacaaaatacaggatagtgtgatctacccagatggcgtcaagaacattcgcgactctgattttgtccacatcttccacaacctgtacctggttctcaccccgaaagagaatggttacgatggcacagacatcgaacattttttcgtagaaaaagacagactcaggaaacacaagggaaagtgttttaatacagtggcagaccgcgatagcgaaaatgacctcagtaaggacgcgtttgctaaccatattgtccacgctcgaaagcacgagatcgattttagccgattcaacacccttttagaaagaattgtgaaggtgattgagcactatgattccatcaagtga

SEQ ID NO: 8334 - RNA, 1833 nt, synthetic construct
  source 1..1833: mol_type = other RNA
atgtcaaagcttcaggaccttaaaaaggcaaccacaaaaccagatctggcacatgtgctgggtgttaagccctcagtcttaacgtactgtctctatgtgctcaagactgaaaaccaatacacacagttcaaaatacccaagaaaactgggggcgagagagtcattaacgcacctactggcaagctgaaaacgatacaaagcctgctcagcaatttgctgctggattgtctggacgagattaaccacaaggcttttccaaagtctcagctggccaaagagacagtgaagaacgcagaagtgttgaagatcaagtgttcaacagccctggtgaagcagccagccctgagccacggatttgagcggaaacgttccatcatcacaaatgctatgatgcacctcggaaagaaacaagtgttcaacattgacctggaggatttctttggatcgtttaactttggcagagtgaggggattcttcatcaagaatcggaatttcgagctgcaccctgaaatcgccaccgtcattgcaaagatcgcgtgccacaatgacgaactcccacaaggcagtccttgcagtcccgtcatcaccaacctcattacacatgcactggacataaaattagccaggatggccagtaaaaactcttgcatctataccaggtatgctgacgatatgacctttagctcccgcgagtctacactctccaagaacattgcctatgaagacgataatatattcgttgtatccaagaaactgcgtgcggaaatcacgcggtccggtttcaccatcaatgataaaaagaccaggaaccagtacaaggactctcgccaggaggtcactggcctcgtggtgaataagaagccgaacacaaagaatgagtactggcgaactgcgcgatcccagtgtgatcgccttttcaaaactggcgggtttaccgagctagttaatggcgaagttgtgcccggcaatataaatcgactggagggcagactcaatttcatcgaccaggtggatcattataatagattgcgccagaaacttccgctcaaccccatttatcagaccaagaaagaggtactgaagaagaccaaccaggccaagctacgcaggtatttgcattcaggtcgtgaggacactttctctaagtttctgttttaccggttgttctacgccaatgaactgccgacaatcttaaccgaaggcaaaactgacaacatttacttgaaagcagcgattcagatgctagctaaaaatttccctagactggctactgaaaaaactgccgtgtccccttacaagttactgctaagatttgtcgagtacaccgagcggaccaagtttcttctcgagcttcacgggggggccgattacttgagagatttcgtgattaactacaagaagcactttgagtactataaggctcccaggcctgaaaatccagtgatcattttcgtcgataacgacacagggcccaacgatcttattaactacgtcaacaaaatcgaaggaatcaccatctatccatcaagtcagaatgaagttcgcaaatcggacttcgttcacgtattctgcaacttatatctggtgcttacgcctcgggatagcaacggtaatacagacattgaacatttcttcacgaacaaggacaggctcaggcagtacaaaggacgatgctttaatgtagagagcaaacgggatgttaaaaatgacctgagcaaagacgcctttgctaaccatgtcgtgcatgccaacaaggcttctatagactttgatggatttagtgggatgctggggcaaattgctaaagtgatcgagcactatgatagcatctga

SEQ ID NO: 8335 - RNA, 1833 nt, synthetic construct
  source 1..1833: mol_type = other RNA
atgtccaggctacaagaattgaagaaagcaaccactaagcccgacctggcaaaactgttgggcataaaacccacaatgcttacgtactgtctctatattctgaagaccgagaaccagtatgcccaattcaacatcccaaagaagaatggaggggaacggacaatcaatgcacccaccggcatcttaaaaagtattcagtctcttctgtcaaagctcctgctggattgcctggatgaaatcaatcacaagaaatttccgaagtctgaactggcacgcgaggtggccagaaacagcaaggttctcaagattaaatgtagcaacgcgctcattaaacagcccagcctgagccacggattcgagcgcaaaagatctatcataacaaacgcgatgatgcatatcggtcggaagaatgttttcaacatggatctggaaaatttcttcggctcatttaactttgggcgagtcagagggttcttcattaagaacaagcattttgagctgaacgatgaaattgccacggtcatagccaagattgcctgtcataacaatgagctacctcaaggcagcccttgctctccagtgatcactaatttaatctttcactccctcgacatcaatcttgccaaattggcctctaagaatagctgtgtgtacacccgatacgctgatgacataacattctcaagtagggagaaagagttacctaaagatattgcacacgaggacaacggagaatttgtactctcaaagaagctgaggtatgaaatcacacgcagtggtttcatcgtgaacgacaaaaaaactcgcaaccagcataaagattcccggcaggaggttaccgggttgattgtcaacaagaagccaaacacaaaaaaagaatactggcgcactgtgagggctcagtgcaacagtctctttaaaacgggggtgtttaccgagatcgaaaatgggaaagctatcccaggatccatcaataggctcgaaggcaagctgaatttcatcgatcagatcgaccattacaaccgtctgaggcaggcaccacccctcaacccaaaataccagccgaagaaggaagctattaaaaatggccaagccaagttgagaagatatttacactccggaagagaggacactttttcaaagttcctgttttaccgcttgttttatgccaatgagttgcccaccatcctgacggagggaaagacagataatgtgtatcttaagagtgctattcacatgttggcgaagaattacccgcagctgtctagcgaaaaaaccgataaatccccatacaagcttctgctgcgtttcgtagagtatactgagcgtaccaagtatcttctcgagctctatgggggtaccgactacctaaaggacttcatcatcggctataaacagcaccttaagttttacaaagctcctagacccgagaaacctgtcattattttcgtagataatgacactggtcctaaggacttaatcaactacgtcaacaaaatagatggcaaggagataagccctagcacagaagttgatattcggtcctcagagtttgtccatatcttctataacctgtacctggtgctcacacccaaagacaacaatatcaacaccgacatcgaatacttctttacagagaaggaccgactgcggcagtacaagggcaaatgctttaatattgtgtccaagagggacctagataatgatctgtcgaaagaggcctttgccacccatgtgattcacgctaataagaaggacatagatttctcgggattcactggcatgctggaccggattgtgaaggtgcttaagcactatgactctataaaatga

SEQ ID NO: 8336 - RNA, 1848 nt, synthetic construct
  source 1..1848: mol_type = other RNA
atggttaagttgaaagccctgaaagaggctaagacgaaaccagacctcgctcgcttattaggcatcaaaccgagccttctaacacactgcctttacgtgattaagacagaaaatcagtacatccagtttaagatccccaaaaagaatggtggggaaaggattataaatgcgccaaccgacaaactgaaatttatccaatccgctctttcaaatttgctgttagattgcttggatgagatcaattatgataagtttcccaagtccgatttcagtaacatcacaagcaaaagagctaaggtgctcaagataaaaattccaaacagcaacattcgtcagcagagcctgtcccacggattcgagcgcaagaggtcaattattaccaatgcaatgatgcacctgggcaaaaagtacgtgctgaatatcgatctggaagactttttcgggtcttttaactttggccgggtgcggggattctttattaaaaaccgcaactttgagctctcccccgaaatagctaccgtcattgcgaaaatcgcttgccacaataacgagctgcctcaagggagtccatgtagcccagtaataacaaaccttatcgtccattccctggacatcaaactggccaaactggccgaaaaaaattcgtgtatctacacccgatatgccgatgacattaccttctcttgtagaaaaagggatctccccaaggccatagcatatgagcttaacggcgagttcattttatcaaagaaattgcggtcagaaatcactcgaagtgggtttaacataaaccataagaaaacgcggaaccagtataaagactctcgacaggacgtgaccggcctcatcgtaaacaagaagcctaatactaagaaagagtattggcgcacagttcgggcccagtgcgacaatctgttcaaaactggtgccttcaccgaactggtcgacggaaaagacgtcgagggtaacattaatcggctggaagggaaactaaattttatcgatcaggtggaccattacaacaggctgcggcagacacctcctctcaacccaaaataccagaccaaggaggatctgattaaaaataaccaagccaagctgagaaggtacttgcacaatggaagggagaagacgttctctaaattcctattctatcgcctcttttacgccaatgagctgcccactattctgacagagggaaagactgataacgtgtacctcaaagctgcaattcacatgctgtcaaaagattttcctaagctctccagcgtgcaaaccactacgagtaagtacaagcttttgttgcgtttcttcgaatataaggttaggactagatatctactggagctctacggcggcgcagattatcttaagtcctttgtgatcaactatcgctaccagtacaattactacaaggcacccaagccggagaatcctgtgattattgtagtggacaatgacacaggtccaaatggcttgatcaattacgtgaacgggataaccgagaaaaagatcttccctagcgcatctaaggacatccgaacatcggagtttgtccacatctttaacaacctgtacctggtgttaactcccaagggactgggcgggtgcaacaccgatattgaatattttttcactgacaaggaccgtctgagaacctataaaataaaggactctctcaagtgtttcaatacagttgacaagagagatcccaacaatgacctttccaaggaagtcttcgccacccatatcgttcatgcgaacaagaaagatattgatttcagcggattcaaggtgatactcgaaagaatcgtcaaggccatcgaccactatgatagtatcaagtga

SEQ ID NO: 8337 - RNA, 1836 nt, synthetic construct
  source 1..1836: mol_type = other RNA
atgcagaagctgcaactgttaaagaaaactaaaaccaagcctgatctggcccacttgttaggaattaaaccatctgccctgacttactgcctctacatcgttaagacagagaatcagtattcccaattcaaggttcccaaaaaaaacggtggcgaacggattatcaatgcgcccacagccgctttgaagtcgatccagagttcactgagcaatctgttactagactgcctggacgaaataaacgccgagaagttcccaagtagtgagattgtgaaggaaaaggcgaagaattctaaggttttgaaggtgaaatgctccaacgcaaagacgaagcaaccatccctgagtcacgggtttgagaggaagcggtcaattattaccaacgccatgatgcatctcggcaagaagcatgttttgaacatcgatttggaggacttctttggcagctttaattttggacgggtgcgaggatttttcatcaagaataaacacttcgagctctctccggagatcgcgactgtaatcgccaagattgcctgtcacaaaaacgagctgccacaggggagcccttgttcccctgtcataacaaacctgatagtccattctcttgacatcaaactcgcaaggctggcatccaacaacagctgtatttacactcgctacgcagatgacataacatttagcaccagaaatagagaacttcccgtggctctggcctctgaaagggacggagaatttatcctcagcaaaaaactccgttccgaaattcgccgcagtggttttctgatcaatgataaaaaaacgcgcaatcagtacaaggactctcgacaagatgtgacaggcctgatagtaaataagaagcccaacaccaaaaaagagtactggcggaccgtgcgagcccagtgtaattcactatttaaaactggcgggtttacagaactagtcaacggggaagtagtgaagggtaacgctaacgtccttgagggcaaactgaatttcatcgaccaggtggaccattacaaccgcttgcgccagtcaccacccctgaatcctaagtacaataccaagaaagaagccatcaagaacaatcaggcgaagttaagacggtacctccatagcgggagagaggatactttcagcaaatacctgttttattcccttttctatggcaatgaacttcccactatacttacggaaggtaagacggacaatgtgtatctcaagtctgctgtgcatatgttggctaagtcattcccaaaacttgcttcagagaaaacagccaccagccgatacgagctcctgctgaggttcgtggagtataccgaacgtactaggtatctgctcgagttatatggcgggacagactacctgaaggatttcattatcaactatcgtcagcactttaaattctacaaggctccgaaacctaagaaacccgtcattattttggtggataatgatgtgggacctaagaacctcatcaattatgtcaaccacattgagggcaaaagcatcttccccagctctgccaaggatatcagagcttccgactttgtgcacatattccacaacgtttatctggtgctgacccctcttggaaaagaaaactcggagacagacattgagtatttcttctccgacgcagatcggctgagaaaatacaatggaaagtgctttaacaccgtgagtaaaagggacccagattcggatctatccaaggactcatttgcaacccacgtcgtacacgcaaacaagaaagatctcgacttctctaggtttaaggggattttcgatagaatggttaaagtcatcgagcattacgacagtatcaagtga

SEQ ID NO: 8338 - RNA, 1833 nt, synthetic construct
  source 1..1833: mol_type = other RNA
atggagcagttaaaaagtcttaaaaaggttacgaccaagcctgagtttgctcaattgttgggcattaagccatccgtattcacctattgcctctacgtgatacgccccgagaatcaatacagccagtttaagatcccgaagaaaaatgacggctataggacaattaacgcacctaccggaaccttgaagacaatccagtctgcattatctaatctcttactcgactgcctggacgagatcaataaagacaaattccctagtagcgagatgttcaaggcagaagccatcaattcaaaattcctcaagatcaaatgctctaatagtgtgattaagcagcctagtctgtcacatgggtttgaaaggaaacgctcgatcattactaacgccatgatgcacgttggaaggaaaaatgtcttcaacatcgatcttgagaactttttcggcagctttaattttggccgcgtgcgaggtttctttatcaagaacaagaacttcaagctctgtcccgacatagcaactatcattgctcaaatcgcctgcaataacaatgaactgccccagggcagtccttgctcccccgtaattactaacctcattgttcatagcctggacctgcgactagcgaagctggcttcgaatgattcctgtatttatacacggtatgccgatgatataaccttctctacaagagaaaacaagttccctataaacatagccaaggaagacgacaataagtttcactccagcaagaaattgaactccgaaattaaatcagctggttttgtcataaacgataagaagacacgaaaccagtacaaggattctagacaggacgtcacgggcctgattgtgaataagaagccgaataccaagaaagagtattggcggactgtgcgcgcccagtgtgactcactgtttaagactggggaattcaaagagctggttggggatagctatatcatcgggaacattaatagactggagggcaagctgaactttattgatcaggtggatcactacaacaagctgaggcaaagtgtgcccttgaatccaaagtattacctgaagaaagaggccaataaatcccaggccaagaaaagacgctacttatacaccggccgtgagattaccttttccaatttccttttctaccgtctgttctacgcatccgaactgccaactatcctcacagaaggtaaaacagataacgtctatcttaaagcggccatccatatgcttgctgacaagcactctagcttagccagcgctaaatcaggtaattccagctataaattgctcctgaagtttgtggagtacagcgagagaacgaagtatctgctggaactgtacggaggaacagattacctaatggacttcatcaaaaactacaacctgaactacaacctctataaagcgccgaaacccaataatcccgtcattatcgtagtggataacgacgatggacctaaagggctgattaattacatcaacaagatcaaggacgcaaagcttttcccacagacagctaaagatatcaggtcaagcgagtttatccacatcttcaacaacctctatctggtgctaaccccacggacggaagacaactgtccaactgatatcgagtacttttttactgacaaagatcggctgcgggaatacaagaacaaatgtttcaatacccactctaatagggacaccgagaatgatctttctaaagactcctttgctaaccatataatccatgccaataagaacgacattgacttctcacggttcaacgggctcctaaacagaataggaaaggtgattgagcactataatttgggcaaatga

SEQ ID NO: 8339 - RNA, 1839 nt, synthetic construct
  source 1..1839: mol_type = other RNA
atgacacagcttcaagccctaaaagatgctaaaaccaagccggacttggcccgcctcctcaacattaagccatccatctttacgcactgcatctacatcgtcgatactaagaaccagtatacccagtttacaatccctaagaaaaatggcggcgaacggaccattaactccccctcagataaactgaagaagatccagaagagtctctcaaacctgcttctggactgtctcgatgaaataaataagctgcagtttcccgacagtgagatcagtcgccctcgggctagcaactcaaaatatcttaaggtgaagtgctccaattctaaaatcaaacagccttctctcagccatggctttgaacgcaagaggagcattattaccaactcaatgatgcatgtgggcaagaagcacgtttttaacattgatcttgaggactttttcgggagcttcaattttggcagggtacgcggattcttcattaaaaacaagaacttcctcctcgagcccgagatagctacggcgatagctaaaatcgcctgctacaataacgagctgcctcaaggtagtccctgttcgcccgtgattacaaatctgataacacacagcttggacatcaaattatcgaagttagcgttctataactcttgcatttattctcggtatgccgatgatattactttctccactaatgaaagcaagatgccaagacatattgcgagatcagtggacggggaattgattgtgggaaagaagctttattccgagatcaggaggtcaggcttctccataaacaagaataaaacccgagatcagtacaaggattctaggcaagacgtaacaggtctggtggttaataagaaacctaacacaaagaaggagtactggcggacagtccgtgcacaatgtaacatgctgtttaagaccgggagctttaacgaggttttgaacggtgaaataatcaaaggtaacatcaatcgcctcgaaggacgtctgaactttattgatcaggtggatcactacaataggctgagacagcacccagcactggaagctaaatatcagagtaaaaaggaggccctgcacctgagaaatatggccaagctgaggcggcatctgcataacggccgagagaacaccttcagcaagtttatcttctacagactattctacgcaaatgaaacccccactgtgctgacagagggcaaaactgataacgtctacatgaaagctgcaatccatatgctcgcttcatcttacccgcagctggcacaggagaataatggcagtaccccatacaaactactgatgaagtttgtcgaatactccgaaagaactcgatatttgctggagctgttcggaggggcagactaccttaagacttttgtcatgcactaccgccagcactacaaatactataaggctcctaaagccgataatccagtgatcatcttagtagacaatgacgagggaccaaaggaccttatcaactatgtcaatgggataaagtctaaacacgtttaccctacgagctccaaggacattcgatctgcagactttgtgcacatcttccataacttgtacttagtgatgaccccgagagggaataataatcaacacaccgacatagagtatttcttcaaagatttcgaccgtctcaggaaatatcagggaaaatgtttcaacaccatttctaaacggaaccccaacactgacctctccaaggatagttttgccaatcacatcatccatgcccacaagaagtccattgactttagcggattcgatgccatcctgaatcggatcctattggccattgaccattataaaagcagaaaatga

SEQ ID NO: 8340 - RNA, 1851 nt, synthetic construct
  source 1..1851: mol_type = other RNA
atgcagaagatcgaagcactccgcaaaattaccacaaaaccagagctggcagccctgctcggcatcaaggccagcgtactgacctatgctctgtatatagtgaagccccagaatcagtacatccagtttaagatcaagaagaagaatggcggcgagagactgatctcggcgcctactgacaaactgaaatctattcaaagcgctctgagcgatcttctgttggactgtctggatgaaatctacaagtccaagtttcccgattccgaaattgctaagcagaagcttaagcactcgaaggtgctaaagatcaaaattgggtctgccaaaaacaagcaacctagcctctcacacggatttgaacgcaataggtcaatcattaccaacgccattatgcatatagggaaaaaaaacgtcctcaacatcgacttggaggattttttcggttcgttcaacttcggacgaattaggggcttctttatcaagaatgagaactttaagctggactccaacattgccactgttatagcccatatagcgtgttgcaacaaggagttaccccagggtagcccttgctctcccgtcattaccaatttgatcgctcatagtctggatattcgtctcgccgccctggccaaaaaacactcctgcacatatacacgatacgcagatgatattaccttttccacccgcgaagataccttcccagaatccgtaatgagacaagaaggaggtggctacatagctggaaagaagctcagaagtgagatcagacgcgccgggtttagcataaaagagagtaaaactcggattcagtatgccgacagccggcaggacgtgacggggttaattgtgaaccagaaacccaacgtgaaacgagagtattggcgcaccgtccgggcccagtgtaattcactttttaagacaggcaagttcgttgaggtggccggagaggagcaaaccgtcggcaatatcaacgtgctagagggtcggctgaacttcatagaccagctggaccactataatcgacttcgtcagaaacctgctctggatccgaattaccatcttaagcgcgatgctttagtccagcagaaaaaggcaaagcaacgttctcacttattgaattctagggaaaaggtgtttagtaagttcctgttctataggtacttctatgcattcgataagcccttgatcctgacagaaggcaaaactgacaacacctacctcaaatctgctatctggaaacttgcggcgcattacccaaagctggctaaggccaaatctaatactagtgcttacgagctcctgctgagatttttcaactacacagagaggacgaatttcctcttagaactagcgggaggcggggattattttaaagacttcgccagtggctacgcagagaattataagaagtacaaagcccctcggccagagcacccagtgattataatcgtagataatgacagtgggccgaaggaccttgtcaacctaatcgcaaccaagaagatcgggagcatttaccctacgaaccccgcacactcaaacgtggacgtgagaaattccgactttgtgcacttgtttcataacctctacatcatccttactccactcagcgctgggtcttccagctcagacattgaactgctgttcaaagacgtggatcggctgaggttgtataaaggaaagtctttcaatacagctactaaaagggataatagcaaagacctctccaaggaggcatttgcaacacatatcgtgtcagcccagaaaaacatcgtcaatttcgatggtttcaaagaactgttggacagagttgtttccgttattaaccactacgactcagtaaagtga

SEQ ID NO: 8341 - RNA, 1848 nt, synthetic construct
  source 1..1848: mol_type = other RNA
atgaggaagttgaactcactggcacagatcaccactaaagcagagctggccgccctcctgggaattaagacctcgttcttaacacactgcctctatgtcattaagcctgcaaatcagtacacgcagtttaagatcgctaaaaagaacggcggcgagaggacaattaacgcccccacgaatagattgaagagcatacagtccgccctatcccatttactacttgactgcctggatgaacttaatagaaagaaataccctgcgagcgaactggccaagtccagtgcccagcattcccatatccttaaggtgaaatgttcaaacactaagaccaaacagcctagcctaagccatggttttgagcggaaacgatctatcatcacaaatgctatgatgcacaccaacaagaaaaacgttttaaacattgacctcaaggagtttttcaactcatttaactttggaagggtcaggggtttcttcataaagaatgacaacttcaagctggacccccacatcgcaaccgtgatcgctcagattgcatgttataataacgagttaccacaggggtccccatgcagcccggttattaccaacctgatcacgcacagtctggatatacggttggccttgcttgctcaaaagcattcttgtacttatactcgatatgccgatgatataacatttagtactcgtgagagtatctttcccccgcaaattatgagagaagaaaacgggcagttcatagctggtaagaaacttcgctccgagataaggcggtctggcttctcaattaacaacaagaaaaccaggattcagctcaaggattcaagacaagacgtgactggcttggtggtcaaccaaaagcccaacactaagaaggaatactggagaatcgccagagctcagtgcaataatctctttaatacaggcgctttcactaaaaccgtgaatggagagacaataaagggcaatgtgcgcgagctggaaggccaactgaatttcattgaccagctggatcactacaaccgcctgcggcaaaagtcccctctgaatcccaaatatcatctgaagaaggacgagattatcaaacagaagaaagcgaaacaacgcagctacctttttagcggccgggaaaaaactttcagccagttcctcttctaccagtttttctacgcctctgacaagcctaccattctcaccgaagggaagaccgataatgtgtatctaaagaccgcaatcaacattctggctgcaaattttcctgaccttgccaaaacaaagacagtcaccacaccttatgaattactcctgcggttcgtagagtactcggagcgtaccaaattcctgctcgagctgcatggaggtaccgactatcttaagcactttatcatgggctacgagagcaagctgaaacgttataaagctcccaaacccaagcacccagtgattatcgttatcgacaacgacacgggaccgcagggactcctgcattacgtggccaatatctcttctgccattattagtccaaactccctgattctgaaacaggattaccgaaaagctgattttatccacatctttcacaacctctatatcgtcttgacaccacggggggccgggaacacacacacagacatcgagtatttcttcaaagatatcgataggctccgaacctacaaagggaaatgtttcaatactgtagcgaatagagatgaagaacgcgacctgtcaaaggatgcctttgcaaaacagattataaaggcgcagaagaaagttgtagacttctctaatttgaagccactgttggagcgctttgtgatggtgatcaaacactacagtactatcaattga

SEQ ID NO: 8342 - RNA, 1908 nt, synthetic construct
  source 1..1908: mol_type = other RNA
atgacaaagctagaattactccaggcagccaagacaaagtcagacctcgccagtattctcaatatcccccccagggcgctcacataccggttatataaaataagaccagagtcgcagtaccacactttttcgatcccaaagaaaaccggaggttcacgcaccatcagggctcccgagaaagaactgaaaaacatacagtcagcactgtctaaccttctgctcgactgtttggacgaaatcaataaaaagaggtttcctaacagcgagcttgccagccctaaagctcggcacgcaagaacactgaaggtgaagtgtaactccgctcgacagaagcaaccctccatttcccatggcttcgagagaaatcggagcatcattacaaacgccatgatgcacattggacagaagaatgtcctgaatctagacctcgctaatttttttgagagctttaacttcggcagggtccgagggtatttcctcaagaacgaaaactttaagctgacacccgaggtatcaaccaccatagctcagatcgcatgtacagacaactctctgcctcaggggagcccatgcagccctgttataaccaacttgattactcagtccttagatatccgcttggccgcgctggcaaatcgccatagttgcatctatactcggtatgccgatgatataacctttagtacacgcaagaagagttttccctcccagatcatcagaaattctcagggcatccagacactggggaagaaattggcttcagaaattaggagatcagggttttctgttaatcccaagaaaacccgggttttgtatcactcttctcggcaggaggtgactggacttgtcgtgaaccaaaaaccttcagttaagaaagactattggcgccttgtgcgagcccagtgtcatcagttgtttacccatggtagctaccttgaagaagtggacgataattttgtgaccgggagcattactgagcttgaaggaaaactgaatttcatcgaccagatcgatcattacaatcgcctgagagagaaaccaccattggatccacgataccactacaagaaggacgctctggccaaatctagcagcagcaaaagtcgtgagtacctgttcaacaatagggaaaagacattctcacaattcctattcttcaagtacttctacgcaaatagtacgccaacgattctgactgagggtcacactgataacatttatctcaagaccgcactactgcaactgtcttcgaattatccgtccctcacaaaaggatcaccacccaagctgagctgccacctatttaactacacggaacgtactaaattcttgctggagctggccggcggcacggactatctgaaatctttcgtggagaagtacaacactcgttacgagaagtacaacgctcccaccccgacccagcctgtaattatcgtggtcgataatgatagtggtccatccagcctgctgcactctctcaagaagtatgatcaagcgaagctctttcctacgaacttaaagattagcgatataaacgacgtaaagaagtccgagttcatctggattttccataacctgtacttagtcctgaccccgctcaagggaaagaacgataccgacatcgagtccctttttaaagagaaagaacggctgcggaaacacaatggcaaatgcttcaacaccgtggagaagagaaacgaggaaaaagacctttctaaagacagctttgccaggaatattatccgcgccaacagaaaatccatcgacttctccaacttccatgggctcctgaataggataactgccgtgcaaaaacactatgaaggcattaagaatgacaatggctccaaggatatccagccgttccttgcgacattgctgaaaccctcccagagtcctccttga

SEQ ID NO: 8343 - RNA, 1839 nt, synthetic construct
  source 1..1839: mol_type = other RNA
atgggtagactcgacgaactgagggctgtcaagacgaaatcggaattagcgaaactcctgggaattaagccatcgttcctcacgtaccaattatatgtggtagggctggcttctcagtacaagaacttccacatccccaagaaatcaggcgggttgcggtccatcacagcaccagatgctaaactgaaaagcatccagtccgccttaagtaatctactcctggactgcgtggatgagattaacaaagagactttccctagatcagagttggctaacgaaaaggcccagcacgccaaagtcctgaaaattaagtgtaacagtgctcgcaccaagcagccgtctcttagtcacggcttcgagcgtaaaagatctattctcaccaatgcaatggttcatgttggacagaaaaacgtcctgaatatcgacctccaggacttctttgccagcttcaactttggtagagttcgcggcttcttcattaaaaacagggaattttcactcacgcccgagatagctactacaatcgccaaaatcgcttgctttaataatgaactgcctcaagggtccccaagtagccccgtaattacaaacttgatcacccatagcctggatataaagctcgccggcctggcagaaaaatacagctgtctgtacagtagatatgcagacgatataactttctcaactcgggaggagacttttccacatcagataatgcgtgaaacccgaggggaataccagcctgggaaaaggctcagaagtgagatccgaaggtccggatttacgatcaacaataaaaagacccgcattctatatcggtcttctaggcaggatgtcacagggcttgtggtgaatcagaagccatctgtgaaaaaggaatactggcgcactgctagagcccaatgtcattcgctgttccggaccggaaaatttactaagtccacagatggtcagatcttcgagggtaacataaacgaattggagggccagctcaactttattgaccaggtggaccattacaaccggctacgacagaaacccgccctgaatccacggtaccacctgaagaaggacgaactgtcaaagaataaagactccaagaagaagaggcaatatttactgaacagccgagagaagacattctccaagttccttttctatcgcattttttatgccaataccaagaccaccattctgaccgaaggaaaaaccgataatacctacttgaagagcgccatcagagagctgagccactcttatccctcccttgctaaacctaatccttatgagcttcaatgccagttcctgaattattctgagcgcacaaagtttctcctcgaattgcacgggggaggcgattacttcaagagctttgtggagagttacttggagaaatttcgtggattcaccgcgcctaagcccaaccatcctgtcatcatttttgtggataacgacaaaggcccccaggagcttatctccaggatcaagggcctcaagggcgtgcagatccacccgatccatcttgatattcagaaggatataaggcaagcagaattcctgcaccttcgcgccaatctgtacttaattctgactccgcaaactagctccctaggcgagacagacatagagtactttttcaaggataaggaccggctgaggcagcacaatggtaagtcctttaacacagtgaaaaaacgggacgaggcaaaagatctgagcaaggccgcctttgcacagcatatcgtaaagtcacaaaagaagtctatcgactttagcgacttcacattgctgctggatcgaattgttgcggtgcagaatcactatgactcaatcaaatga

SEQ ID NO: 8344 - RNA, 1833 nt, synthetic construct
  source 1..1833: mol_type = other RNA
atgagccgacttgaaaatctccgggccgtagtcagtcgaccacagctcgcaaacctgctggggatcaggccatcgttcctcacgtataccttgtatgtgcgcggggtgtcaagccaatattgtaagttctcaatcccaaaaaaggccggaggcaaaagatacatcaaggcccctcagaaagaactcaagtacatccaatccgcgctgagcactctattgctggactgccttgacgagattaacaaagaaaagtttccaaagtctgagcttgtctcacccaaggcagaacacagtaaaactcttaaagtgaagtgcaactccgcacgggtcaaacagccaagtctgtcacatggctttgagcgtcagcgttctatcattaccaattcaatgatgcacttagggaaaaagaacgttctgaacatcgatctgaaggacttctttcagtcttttaactttgggcgagtgagaggcttcttcattaaaaacgagtacttcaagctggaccctaccatagcaacaactattgcgcaaatagcctgctatgataatcagctcccccagggatctccgtgttcccccgtcattacaaatctgattgcccattctctcgacattcgcttggctcgcttggcaaagaagtactcttgtacctatagcagatacgctgacgacattactttctccaccagggagaggatcttccccccgcagctcatgcgagaggatgatggtatctatacacctgggaagaggctgaagtccgagatacagagaagcggattcagcctgaatgatcggaaaactagaatcctgtaccgggacagtaggcaggatgtcacaggtctggttgttaatcagaagccaaacgtgaagaaggaatattggaggaccgtccgcgctcaatgccattggctttttaacattggtgcatttacaatggtcgtggatggcaaagatatcgagggaaatatcaacgctctggagggcaagctaaattttatagatcagctggaccactacaacaggttacgccagaagcccgccctgaatcccaaataccagctgaaacgggaggtgaaggggcgtgattcactcaaagctagacgctacttgttttcagccagagagaagactttctcccagttcctcttctatagactgttctatgcgaacgacaagcctactatccttaccgaaggtaaaaccgacaacatttacttaaagtccgccattcaatccttagccgcgtcgtaccctaagctcgccatcgagaatccttatcaactgttgtgtcattttgtgtcctacacagaacgcacccggttcttgctagagctttatggcggagctgattacctgaaaggcttcatagactcctataaggacaattttgaaatgtacaaggctccgaaaccccgccacccagtgatcgtgtttgtggacaatgatagcgggcccaaggatattatcagccgggtgaatggattaggcgaggcctctgttttccctcccaagatcgagaaggtaaaagacgttagaaaagccgacttcactcacctcatgaaaaatctctatctagtactgacgcctaggtctgaagctgataaagacacggatatcgagttcttctttaaggacgaagatcgactgcggaaatttaatggcaaatacttcaacaccgtagataaccgtgacgaaaccaaggacctgagtaaggaagcatttgctaggaacattgtgaaatttcagcggaaaagcattgactttagtaagttcacaagcctgcttgacagggttgtggccgtgatcgatcactacgagacaataaaatga

SEQ ID NO: 8345 - RNA, 1830 nt, synthetic construct
  source 1..1830: mol_type = other RNA
atgtccaaactggccaaattgcgagcggcaaagacaaaacctgaactggctgatgttcttggagtgcatccttcattcctgacgtatactttatatgtgcgcggcactaacagtctctacacttcattcaacatacctaagaaatccggtggcgtccgcaccattcaatctcccgatagcgggctcaagtccatacagtcagcactctctaacctcttgcttgattgcatagatgagatcaacctggccaactttccagattcagagctggcaagtcctaaagctagccactcgaatatcctaaaggtcaagtgtaactccgcaaagacgaaacagccatccttgtctcacggatttacccgtcaccgctctattattactaacgcaatgatgcacgtcaataagaaagccatccttaacattgatctgaaggacttcttttcgagcttcaatttcggcagggtgagggggttttttattaagaacaagaacttcgagctcgatgacaatgtggccaccaccatagcccagattgcctgtcatgacaatgaacttccacagggtagcccatgctcacccgtgatcaccaacctgatcacccacagcctggatatccgactggccgacctagcgagaaagaatagctgcacatactccaggtacgccgacgacatcacattttccacagggaaacgaaaatttccctctgagattgtgtcggaggagaatggtatttgtgctctgggaaaaaaacttaagtccgaagtgcggaggagtggcttttctattaacagtaagaagactcgggttttatacaaggatagtaggcaggatgtaactggcctaatcgtgaacaagaaacccaacatcaaagcggagtattggagaacagtgcgggctcaatgcaatttgctcttcaagacgggtaagttctatgacttgatcaacaacaaggaagttgaaggcaatatttatgagctggaggggaagttaaattttatagaccagctggaccactacaataggctgcggcagaaacctgcgttgaatcctcaatatcacagacagaaggacgcacttgctaaaggcgggaaccagaaacagcgacgctacttatataacaatcgggaaaagaccttctctaacttcctgttctataaactgttctatgctaatcccctgaccatgatcctgactgaaggcaaaaccgataacatttacctgaaggcagccctgagtaggctcgctacagcctttcccagcctggctaaatcacagccgtacgagccactgtgccaattctttaagtacacagagcggacgaggtttctgctggaactccatgggggaggtgactactttaaatccttcgtggggtcctacgaagagcgctaccgtctctataaagccccaaagcccgctaaccccgttatcatcttcgtcgataatgataccggaccggaccagttgataagccgtattaagggaatgaagggcatcggcatctatccgacatcactgaacaaaggcgatatcagaaagagtgacttcgtccacataagcaataacttatacctcatccttactcctcagagcaacacaggagacaatacagacatcgagtatttttttaccgactttgacagaaagcgcccatacaatgggaagtgtttcaatactgtgaagctcagaaatgacaatgttgatctatctaaggatgcctttagccggcatattgtgcaggccaaaaaaaatgtcattgacttctctggattccataagttgctcgaaagaatcgtacttgtacaaaaccattacaaaaccctgtga

SEQ ID NO: 8346 - RNA, 1821 nt, synthetic construct
  source 1..1821: mol_type = other RNA
atgtctaggctcgacaggctgaaggccgtcaatacgaagcctcagttcgcaagacttctgggtatacatcccagcttgctgacatatacgctctacaaaaagcggcccgagcactgctatcatgagttcaaaattcctaagaagagtggcggcaaacggacaatcaacgcgccggacgaaaagctgaagtcgattcagagagctttggcagacctactgctcgattgccttgatgagattaatgccgtgtactttccatctgcagagactctgaagccaaaggcaaagcacgccgatatccttaaggttaaatgtaatagcgctttgtcaaagcagccagctttgagtcacggatttgagagaaaacgctctattctcacgaatgcagtgatgcacttagataagaagcacctcttaaatatcgacttaaaggacttcttcccctcatttaattttggccgtgtgagggggttcttcatcaagaacaaccactttaagctgcacccgtctacagccacacttattgctcagatcgccatccttaacaacgaattaccgcaggggagcccctgttctcccgtcatcgccaatcttataacccaccatcttgatatccgcctggcgagtctagccgctaagtattcctgcacttatacccggtacgccgacgatatcacgttcagtacccgaagagccgcattccccagacagatcatgaacgagaaagatgggggatacattccttccaagcgtcttgcatccgaagtaaatagggccggctttcgcattaactctcagaaaactaggattctctacagagatagccgacaggaggtgaccggcctagttgcaaataagaaagtgggagtcaagaaggagtattggcgaaccctgcgggcccagtgccattccttgttcaccactgactcattcacaaaaatcgtcgatggcaaaaaggttgaaggcaacatcaatgagctcgaaggccaactgaatttcgttgatcaagtcgacagatacaaccgcttgcgccagaaacagccactgaacccattgctggccctgcggtcagagcaaaagaacggagacaaaaagagtaagaggcacctgctcaataatcgagagcggaccctgagcgactttctcttttacaagctgtttatttcgaactccaaaaccacaatcctcaccgaagggaagactgacaacacctatttaaaatccgcgatccaggccctggccaaacgcttccctactctcgctgaaactaaaccctaccagcctctggtacaattcatgaactacagcgaaaggacccggtttctgctggagctgttcggaggatgtgactacctcaaggcatttgccgaaaactatagctccaggcgcaagaagtatctgaaagagaaaccaacaagtcccgtaatactacttttagataatgaccaggggcctaaagacctgataaatcggttctccaaggataagtctattactctcttgccctcaacaagcaaaaacataagagatgctgagtttgtgcatgtgtgcgacaatttgtatctcgtgctcacaccaatttctcctaaacggaaagaaacagacatagagtacttcttcatggctaaaactagactgctaaaggatagcaaaaccggtaaatgttttaacaccatctcaaaaagggatgaaaagcgtgacctgtcaaaggaggcttttgcgcaactggtgaagactaacaaagggagcatcaacttctcccgctttggtcctctgctgacccgaattacaaaggtgcagaaacattacgccgctctgtga

SEQ ID NO: 8347 - RNA, 1857 nt, synthetic construct
  source 1..1857: mol_type = other RNA
atgagcaagctaaaatatctcaagagtgtctccaccaagcccggttttgccaaagccctcggtgtcgacgccgtattcctgacacgatgtctttacataaatcagccagaaacacagtatcaccagttctctattgccaagaaatccgggggcaagagggtgattactgccccgtccgacgaattaaaatcactgcagaaaagactgagcatacttcttctggattgcattgatgagattaacgctaccaaataccctaactcccaaagagcaaggcctaagctgcgaaagaatggcgatccagattacgccgccgaggtcctcaagatcaaggtgccaacaaccgaaatcaagcagccatctctgtctcacggattcgtacgcgagcgtagcataatcactaatgctatgatgcatgtcggaaagaagcatgtcctaaacatcgacctcaaagatttcttcgatagctttaatttcggtagagtgaggggcttcttcatcaaaaacgttaacttccagttagacccccacattgctactgtgatcgctcagattgcctgttttgataacaaactgccccagggctcaccctgctctccagttataactaatctcataacccatgcactggacatcaggctcgcttcgttagcaaagaagtataagtgtacttacacccggtatgcagatgacattacattttcaacccgtaaggcggactttcctcctcaaataatgagacaggatactgacgggtacattgcaggtaagaaactgaggtctgagatcgagcgcgcaggctttgcgatgaatacctccaagactaggattcagtacaaagacagtcggcaggatgttacaggactggtcgtgaacaagaaaccgaacacaaaaaaggaatattggcggctcgcgcgagccaaatgcaaccagctatttaaaaccggaaaattcacgacgatacacgacgggaatgagattgagggtaacctgaatgagctggaaggccagctgaactttatcgatcaagtggaccactacaatagaatgagacaaaaagctcccttgagcatggagtacgagcataaaaaagtaaccaagtccactagaaacatcttgacagggcgagaacggacgtttagccagttcctttactatcggctattttgcgggaacgacaaaccaacaattctctgtgagggaaaaactgataacgtctacctgaaatcagccatctcagaacttagtacaagctacccccaattatctgtgaccaaggatggcaagtatgaattgctggttcgctttgtagaatactccaagcggaccaggtttctgctggagttgtttgggggcgccgactatcttcgcgggttcattgataactttgagaaaaacatgcgcctgtatgataaggtgaagccaaaacaccccgtgatcgttttcctcgacaatgacgaaggccctaagcaaatcgtgaacctcctgaaacagaagtcctttcaggataaaatcgaactgattccgagctctatgaataaaatggacgacatccgctcctcggagtttatccatgtggtgaagaacctttatgtcatcttcacgcctttgaccgaagatggaaaggagacagacatcgagtatttcttcgatgaaaaaacccggttgtttaaacaccctaagaatggaaaatgcttcaacacaattagtaagcgtaatagcaagaaggacctctcaaaagaggctttcgctacccatgtgatcaaggagaagaagaaggacgttaatttcaatggcctgaagcccttgctggacagtattgtgaaggtgattaatcactacgacagtatcaagtga

SEQ ID NO: 8348 - RNA, 1854 nt, synthetic construct
  source 1..1854: mol_type = other RNA
atgagcaagctcaggcatcttaagagtacatccagcaagccgggctttgctaaagtccttgatgtggatgcagcttttctaacaaggtgcctgtacatcaaaaaaccggagactcaataccaccaatttagcatcgccaagaaatctgggggaacacgggtgatcaacgctccgtcagaagaactgaaatcgctgcagaaatcccttagtaagctgctcctggattgcatcgatgagataaatgccactaaatatcccaattcccagtggtcaaagcctaagctgcgaaagaatggcgagacggattatgctgccgaagtgctgaaaataaaaattccaaccgccgaaaccaagcagccaagcttgtcacatggattcgtgagggagaggtctattattacaaacgccatgatgcacgtgggcatgaaacatgtgttgaacatcgacctgaaggacttctttgattcgttcaatttcggcagagtgcgaggatttttcattcggaacgcgaactttcaactggacccccacgtcgccacagtaattgcgcagattgcttgttacgacaacaaactgccacagggtggaccttgctctcccgtgatcaccaatctgattacacactcccttgacatacggctcgcaagtctggcgcgcaaatataagtgcacgtacacacggtacgctgatgatatgacattcagcacccggagagctgacttcccagcacagattatgaggcaaagctccaacgagtacctcgcaggcaaacgtctacgtagagagattgagtctgcgggctttgcaatcaattctaacaaaactcgcgttcaactgaagaacagccgacaggaggttaccgggttagtagtgaataggaagcccaataccaagaaggagtactggcgtctcgcccgggccaaatgtaaccatctatttaaaatcggacgcttcaccgtggccaaaaacggcaataatgttgagggtaatttaaacgagttggagggtcagttgaattttattgaccaggtcgaccactataatcgcatgaggcagaaggccccttctattcctgagtatgcatcctccaaaatagggaagaataccaagaacctgctcacggggagagaaaaaactttctcccagttcctttactacaggttattttacggcaacgataagcctactgtcctctgtgagggaaaaactgataatgtttatctgaagtcagccattagtgagcttaacaagtattaccctttactcgtcgatgtaaaggacgaagaatatgatctatctatccgctttgttagatatagcaaacgcactcgattcctgctggagatctttgggggggccgactatctcagaggcttcattgacaatttcgagaagaacgtgaagctctacgaggctatcaagcctaaaaatcccgtaatagtgtttctggacaatgatgaaggaccacagcagatcgtcaagctcctgagtaccgaacgcttccagaaaaagatcgaaattatcccatctaagctgaacaagaaaaacgacatacggaaatcacacttcatacatgttgtcaagaacttgtacgtggtgttcacccccttgacccatgaaggtaaagagactgacatcgagtacttttttaatgataaggccagattgatcaagcacagtaacggcaaatgttataatacagtcaagaacagagacgcaaaaaaagacctgtcaaaagacgctttcgcaacgcacatcatcaaggaaaacaagaagagcatcgatttcgaagggcttaagcccctgttaaactccattgtgaatgtgattaaccactacgaaaagatcaagtga

SEQ ID NO: 8349 - RNA, 1854 nt, synthetic construct
  source 1..1854: mol_type = other RNA
atgagcaagcttaatagactccgcctgatttccaccaagccctctttcgctagaatcctcggtgttgacgccgcattcctgacgaggtgtttgtatataaacaaaccagagaaccagtatcatcagttccctgtgaagaagaaaagcggaggggaacgaatcatccatgcccccagtgacgaattgaaatctctccagaagtgcctgtctatattactgctggactgcatcgatgagatcaatgcgaagaaatatccccactcccagcacgttaagccaaagctccgcaagaatggagagcctgattacgccgctgaggtcctgaagataaagattccctctgcattaagcaaacagtcaaccctcgctcacgggtttgtgagagatcgaagtataatcaccaatgccatgatgcatgtgggccagaggcacgtgctcaatatcgatctgaaagactttttcggctcctttaactttggcagagtgcgagggtttttcatcaaaaatgctcacttccaactggaccctcatatcgccaccgtaattgctcagattgcgtgttttgataacaaacttccacaaggcagtccatgttcacctgtgattacaaacctcatcgcccatagcctcgatatcaggcttgcgtccctggccaaaaagtacaagtgcacttacactaggtacgccgatgacattacatttagcactagacaggctgagttccccgcaggacttatgaagcaagatgctaattgttatgtcccgggtcgaaagttaaagagcgaaattgaacgggccggcttttacattaatggaaacaaaacccggatacagcacaaagactctcgccaggaggtgacaggacttattgtgaataagaagccaaacatccgtaaagaatattggagattagtccgggcaaaatgcaatcagctattcaagaccgggaaatttacatctaaagaggaagagaaggaggttgaaggcaatttgtacgagctggagggtcagcttaattttatagaccaggtggatcactacaaccgtctgagacagaaaagccctctatcaaacgaatatgctgtcaataaggtagggaagaacacccggctgattctgacagggcgtgagaaaactttctcacaattcttgttctaccggatgttttgtgggaatgagaaaccgacaatgctgtgcgagggcaagaccgacaatgtttacctgaaggccgccatctcctcattgaaaggaaactacccgcaactggcacgggtttccggcgagaagtatgagctgctggtaaggtttgtggaatatagtaaaagaacgcgcttcttcttagaattgttcgggggcgccgactatctgcgcggttttatcgactcgttcgaaaggaacatgaagatttacaactcaatcaagccagtcaaccccgtgatcatattcctggataatgataagggatctcagcagatcgtaaacctattgacaagcaaaacatttgtgaaccggattaagctgtttcctgtgaccctcgacgcaaagcaggacattaggaagagcgagttcatacacatcgttaaaaatctgtatgtgatcttcaccccccttactaacactggcaacgagactgacattgaatacttttttgacgagaagacgcgcctcatgaaacatagtaacggaaaatgctttaacaccctacaaaataggaattccaaagcagatctctccaaagattcgttcgcgactcatatcgtcaaggaaaagaaaaaagacatcgatttcatcggtttcaagagtctgcttgattctattgtgaaggtcattaaccactacgactccctcaagtga

SEQ ID NO: 8350 - RNA, 1854 nt, synthetic construct
  source 1..1854: mol_type = other RNA
atgagtcggctgaagagattaaaaagtgcttcgacaaagcctgagtttgctaaggtcttgggaatagacgccgcctttctcacacgttgtctgtacattaacaaacccgaaaaccagtatcaccagttctctattccgaaaaaatccggcggagagagattaataaacgccccatcagaggaattgaagagccttcagaaaaatttgtccattctcctgctggactgcattgacgagatcaattctgaaaagtaccccgattcacaatggtccaagccaaagctgcgaaaaaacggcgatcctgactacgccgctgaggtcctcaaaattaagatcccaaatgctcaggtgaaacagccatcactttctcacggttttgtgcgggagcgaagtatcctcaccaacgccatgatgcatgtagggaaaaagaacgtgttgaatattgacttggaatccttctttgactcatttaacttcggcagagttcgcggctttttcatcaagaacgctaattttaacctcgacccccatatcgccactgttatcgcgcaaatcgcatgcttcgacaacaagctgcctcaaggcagtccttgtagccctgttatcacgaatctgattagccacacacttgatatccgcctggcatccctggcaaagaagtataattgcacctatacgagatatgcggacgacatcacctttagtactcgcaagtccgagttcccaccccagataatgaggcagaatgagagtggatacgtgcctgggcgcctcctgaagagcgaaataaagagatccggcttcagcattaactctagtaaaactcggatccaatataaaaacagccgtcaggacgtgacaggcctggtggtgaacaaaaaacccaatgtcaaacaggaatactggaggctagctagagcaaagtgcaaccagctcttcaaaaccggtaaattcacaacaattaaggacggaaacgagatcgacgggaatctgaatgaacttgagggtcagttgaatttcatcgaccaggtggatcattataataggatgcgccagaagacgcctttatcaaccgattatacccacactaaggtgggaaaaaataccaaggtaattctctctggacgggaaaagacctttagcaacttcctgtactacaggcttttctgcggaaatgagaaaccaaccattctctgtgaggggaaaacagataacgtgtacctgaagtccgcaatcagcgaactgtctaaggattacccacagctcgcccatagaaagggaaataaatatgaactgcttgttcggtttgttgaatactcaaaacggtctaggtttctgttggaacttttcggcggggccgattacctgaggggctttgtggataactttgagaagaatatgaagctctacgatgccatcactcccaagcatccggttattgtgttcttagacaatgatgaggggccccaacaggtggtcaacttactaaagagcaagaactttcaaaagaagatagagctaatccctagcactctggataaaaaagaagacataaggaagtctgagtttatccacgtcatcaagaacctgtatatcgtcttcactcccctcgctaaggatggcggggagacagatattgagtatttctttgacgataagactcgtttgatgaaacttccgaatggtaaatgtttcaacaccgtaaagaatcgcgattccaaaaacgacctgtcaaaagacgccttcgcaacacacatagtcaaagagaacaagaccaaaattgacttcaatggtctgaaacccctgctagaatcggtggtgaaggtaattaatcactacgattccctgcgatga

SEQ ID NO: 8351 - RNA, 1854 nt, synthetic construct
  source 1..1854: mol_type = other RNA
atgagcaaacttaaaagacttcgctctgcttcaaccaagcctcagctagcacgcgtactggaagtagacgccgcctttttgacccgctgcctgtacatcaacaagactcagaaccaatatcaccagtttagtatcgcgaagaagtcaggtggcactcgtctgatcaatgccccctccaaagaattaaagagcttgcaaaaaaagctctccatacttctactggactgcatcgatgagatcaacgcagagaaatacccacggtcccagttggtgaagccgaagttaaggaaaaatggagatcccgactatgccgctgaagttctgaaaattaagatatctaccgcagaaacaaagcagccttccctggcacatggcttcgttaaggagcgctccatactgacgaatgcgatgatgcacgtggggaagaagaacgtcctcaatatcgatcttaatgactttttcgactgctttaactttggtagagtgcggggattcttcattaagaacgaaaacttcaagctcgaccaacacatagccactgtcattgcccagatcagttgttttgataataaactcccacagggctccccatgttcgcctgtgatcactaatctcatcacccatagcttagacatcaggttggcttcactggctaagaagcacaaatgtacttacaccaggtatgctgatgacattaccttctcaacacgtctgtcagaatttccagcccagattatgtggcatgattctacaacgtatcgggccggtaaagccctaaggaaagaaattagtcgcagcggtttcagcattaacaacagcaaaaccaggatccaatacaaggattcaagacagaatgtgacagggttagtcgtgaacaagaagcccaacatcaagcaggagtattggcgcctggtgcgagcaaagtgcaacaaattgtttaagacgggcaaattcacagtggttgaggacggtgagaaaaaagatggcaacatatccgagctggaaggccagctgaactttatcgatcaggtagatcattacaacaggatgcggcagaagccccctctgtctaccgattacagtcacaatagggtggggagaggcacccgaagcattctgaatggccgagaaaagaccttttccaagtttctgttctttagactcttctacgggaatcaaaagcccacaatcctctgtgagggaaaaaccgataacatttacctgaagtctgcaattagcgagctcagccagtcctatccacaactgagcagctctaagggagatgattatgaactcctcgttcggttcgtcaaatacaccaagcgaactagatttttgctggagcttttcgggggagcggattatctgcgtggcttcattgacaatttcgaaaaaaacacgaaggcctatgctaaaataactcccgaacaccctgtcatcatttttctggataatgacgaggggccgaacaatatcgtcaaactcctgagggacaaagggttccagaaaaagatcaacctggttcctccaacactggacaaatccgagggcatccggaaggccaatttcatacacgtggtggagaacctatacattattttcacaccactcacccctgatggaaaggagacagacattgagtacttctttgatgacaaaactagattgatgaagcatcccaatggaaaatgctttaatactttgcagaagcgggactcgaaagtggacctttctaaagacgccttcagtacacacatcatcaaagagaaaaagaagcagatcgactttaacgggcttagacccctgcttgactctgtcgtgaatgctattgaccattacaatagtgtaaagtga

SEQ ID NO: 8352 - RNA, 1860 nt, synthetic construct
  source 1..1860: mol_type = other RNA
atgtcaaaactcaaccgcttaagaatcgccagttctaagccagattttgctaaagtcttggaagtagactcgtcatttctcactcgcgtcctgtacatcaataagccagaatcacagtatcataagtttacaatagcgaagaagtctggcgggctgagagaaatatcggccccctccatcgaactgaagagtcttcagaagtcactgtctaagctgctgctcgactgcattgatgagattaatgccaaaaagtacccctatagccaattgaacaaacccaagctgagaaagaatggtgaaaacgactacgctgcagaggtcctgaagattaaaatacccacttcctctataaagcagccaagcatttctcacgggtttgtgcgggaccgctccatcattactaacgccatgatgcacctggggaaaaaaaatgtcctcaatatcgatctcgaggatttttttggctctttcaatttcggtcgtgttcggggcttttttataaagaacaagaatttccggctcgatccccacatagcaacaattattgctcagattgcatgttacgataataaactacctcagggatctcctagtagcccagtcatcaccaatttgatcacgcatagcctggacatgaggttggctagtcttgctaaaaagttcaaatgtacctatactcggtacgcggacgatattaccttcagcacccggttaatcgagttcccagctcagatcatgaaacaaaacgaggatggctacatcgctggtaaaattctacgccgcgagatcaaacacgccgggttcagtattaacgagtccaagacccgtattcagtataaaaacagcaggcaggacgtaactgggttaattgtgaacaaaaagcctaacacgaagaaagagtactggagactcgtgcgggctaaatgcaaccatctttttaaaaccggctatttcgtgagtatcgttgatggcaaagagataaaaggaaacattaacgagctagagggacagctcaacttcatcgatcaggtggatcactataaccgaatgaggcagagagcccctcttaatccagagtacgccaggtctagcgtgggaaaacatacacgaaacctcctaactggcagggaaaagacgttccgcaatttcctgttttatcgacttttctgtggcaatgacaagcctacaatcctgtgcgagggaaaaaccgacaatatttacctgaagtccgcaattagtgaactggtgaaggaatatcctcagctggcacgaaaaaaggcctccgagtatgaattgttggtaaggttcgtggaatactcaaaaagaaccagattcctgctggagctgtacggtggaactgactatctgcggaacttcatcgactcatttgaagcgaacatgaaagtttacagcaacatcaaaccgaaaaatcccgtgatcctttttgtggataacgacaaggggacatccaatattaagaacctcctgtcttccaagagctttatcaagaagattaagatcagccccagcagcatcgataagaatgagcaaataaggaagtcccaatttatccatgtagttaagaatctgtacgtggttttcaccccgcttgcctccaatgacgactttaccgacgtcgaatacttttttgacgataaggcacgtttgatgaaacactcaaacggcaagtgcttcaatacagtgaggaatagaaatgacaacaaggatctctctaaggatgccttcgcaacacacatcgtgaaggagaacaaaaagaatattgacttcaccgggttcaaacccttactgaattcgatcgtcgaggtgatcaaccactatgaatccataaagaaagcctga

SEQ ID NO: 8353 - RNA, 1854 nt, synthetic construct
  source 1..1854: mol_type = other RNA
atgtctaagctgcaatcactgaagtccattagttctaagcctgaattagcaaagctgcttggagttgacgcagccttcctaacccggactctgtacattgtacgcccagagaaccagtatcaccagttcactatcgataagaaaagcggaggaaagcgagtgattaacgcgcctagtgaggagctcaagtccttgcagcgaaaactcagcaatctcctcttggattgcattgatgagatcaataagatcaagtatcccacttcacagctggctgctcctaaagtgagggaaaatggggacattgactatacagcaaaggtactgaaaatcaaaatcccaagcagcaagagcaaacaaccctcactgtcccatggctttagtcggaaaaggtctattataaccaatgccatgatgcacattgggaagaaaaatatccttaacattgacatcgagaacttctttgatcgctttaatttcgggcgggtgagaggttacttcattaagaacaatgacttcaagctggatccccatatagctacggtcattgctcaaatcgcatgttacgacaataagttgccccagggttccccctgcagccctgtgattagtaatttgatatgccacagcttggacattaacctgagctcattagccaagaaatacaaatgcacctatacaagatacgccgatgatatcacattttccacccgcaaatctgagtttcccaagaagatcgccgaacagaacgagggctactatacactcgggaacgaattgctatatgaaataaaaaggtccggattctcagtcaacaacggcaaaaccaggatacagtacaagaacagccgccaagacgtaacgggtcttgtggttaacaagaaaccaaacacaaaaaaggagtactggcgtttggcgagagccaagtgtaatgctctttttaaaactggcacgttcaccaccatcgaggatggcgtgtctgtcattggcaatctggatgaactggaaggacagctcaattttatagaccatgtcgatcactacaacaggctgagacagaaggcgccactttcaccagagtattcacttaaaaccattgggaagtccaccaatatcttgctatctgggagagagaaaacattttcgcagttcctgtattatcggctgttttacgggaacgagaagccgacaatcttatgtgagggaaagaccgataatatttacctgaaatccgccattagcgaactcatggcccattacccaagtctggcaatcaagacagacggcaagtacgaactgctcattaggtttgtggagtataccaaacggacccgatttttactggaactcttcggtggcactgactatcttaaggggtttatcgaaaactttcacaaaaacatggccccctataagaacttaaaaccaaagaaccctgtgatcatcttcctagataatgacactggccccagtaacatagtgtctctcctgcagggaaataagttccagaaaatgatcactctgatcccttcccatctggataaaaaagacgacatcagaaagagtgagttcatccatgtcatggataacctttacgttatattcacaccgctcggcaattcgggcgaggaaactgacattgagtacttttttgacgataaaacacgcctcatgaagcactctaacggaaaattcttcaataccgttgagaaacgtgataccaagaatgatctgagcaaggacgctttcgccactcacatcgtcaaggaaaaaaagaaatccatagacttcacgggtctgaaggtgctgctggaccctatcgctaaagtgattgagcactacaagaatatcaagtga

SEQ ID NO: 8354 - RNA, 1854 nt, synthetic construct
  source 1..1854: mol_type = other RNA
atgttaaatctagaacggctgaagcagatatcaaccaagcctgactttgccaagctgctgggtgtggatgccgcatttctcacaaggaccctgtacattgttaaacctgacaaccagtactcacaattcaccatcgacaaaaagagtggaggtaagcgaatcattaacgcccccagcgatgagttaaagtctctgcagaagaaactctcaaatctgctgctggactgcattgatgagattaatgctaagaagtttcccaaatcacagtccattaagccaaaactcaggaaaaatgacgagaatgattacgccgcggaagtcttaaagataaagattcctacttccgaatctaaacaaccatcacttagccatgggttcgtgcgtgaacgtagcattataaccaatgccatgatgcatattggcaagaaaaatgtccttaacatagaccttgagaatttcttcgacagttttaatttcggcagggtgagagggttcttcatcaagaacaacaactttaagttgaacgaccacatcgctaccgtgatcgcccaaattgcatgttacgagaacaagcttcctcaggggagcccttgcagccccgtgatatccaatctcataacccactccctagatatcaagttagccttcctggcacgcaagtataagtgcacatatacacggtacgctgatgatattactttcagcaccagaaaggatgatttcccaaaccagctggcaaggcacgacggaaatacgtatatcctgggaaaaaagctactgagagaaatcaaatcctctggcttcagcgtcaacaataacaagacccggatacagtttaaaaattcccgccaggatgtcacaggcctgattgtaaacaagaagcccaatacaaagaaagagtactggcggctggctcgggccaagtgtaacactttgttcaaaactggaacattcacttcgataaaggataatgtagaggtgaaaggcaacctgaacgaactggaaggccagttgaatttcatcgatcacgttgaccattataacagattgagacaaaaacctcccctggttccagagtacactctcaaaacaatcggcaaatctacaagaatcctcctgtctggccgcgaaaagacattctcccagtttttgtattaccgcctgttttgcggtaacgagaaacctacaattttgtgtgagggaaaaacggacaacatctacctcaaaagtgctatttccgaaatgaagaaggactacccgctcctcgctgatacgaaggacgatcattacgagcttctggtaaggtttgtcgaatataccaagcggacccgatttctcctggagatctttggtggagcggattacctaagggggtttatcgacaattttgagaagaacatgaagacgtatgagaatgtgcgaccaaaaaagccggttattgtgtttctcgacaatgacaccggacccgacaaaatcgtgaatctgcttcagggcaaaggctttcaggacaaaatcacccttatcccctctcacctggataagtcgtgtgatattcgtcgcagcgaattcatccatatcaccaaaaacctctatgtgatcttcaccccacgagggagcgcaggtgaagaaacagacatcgagtatttcttcgatgagaaaactcgcatgatgaaacactcaaatgggaagttctttaacaccattaagaaaagagacactaagagtgacttgagtaaagatgcctttgcgactcacatcattagggagaagaagaagaacatagatttcaaagggttgaaacccctgttagactctatcattaaggtgatcaaccactatgacgacattaaatga

SEQ ID NO: 8355 - RNA, 1848 nt, synthetic construct
  source 1..1848: mol_type = other RNA
atgagtaaactgaaactgctgcgaaaaatcacttccaaacccgaactagccaaattgatgggaatcgccccagtgtttctgaccaaatgtctctacgtcacacggccagagcatcaataccaccagttccagattgacaagaagtcaggcggaaaacgtacaattagcgccccgtccgaagaactaaaatcattgcagaaaaagctgagtcttcttctactggactgcctggacgagatcaactctgaaaagtttccatattcccaggtcccgagtcctaaaaaacggaataatggagacgactactctgccaataaactgaagatcaagattccgtctgcgaaaacaaaacagccatctctttctcatggttttgaaaggaatcggtccataatcacaaatgcaatgatgcatatcgggaaaaagaatatcctgaacattgatcttgccgatttctttgatcagttcaattttggaagagtgagaggcttctttataaagaacaagtacttcaacctcgacacacacatagcaaccgtaatagctcagatcgcatgctacgataataagctgccccaggggagtccttcgagccctgttataaccaatcttattactcactctctggacattcgcctgctatccctggctaagaagtacaagtgcaactatactcgctatgccgatgatctcactttttccaccagactcgacgatttccccgagcaaattatgaaacaagtcgacggcgagtatatcccctcaagtaaactgcttcacgagattacccgttccggttttactattaacaacaagaagacgcgaatccagttcaaatcaagcagacaggatgtcaccggcctggtagttaataagaagcccaatgttaagagcgaatattggcgccaggtgagggctaagtgtaactccctgttcaagacgggtgaattctttagcatcaagaacggcaaaattatcgagggcaatatcaacgagttgcaggggcaacttaactttattgaccaggtggatctgtataatagactcagacaaaagcctcccctgcagcccgaatttgaactgaagaaattggggacctcgaccaaacagatcttatcatctagggagaggacattttctcaattcctcttctaccgcctgttcataggaaacgacaggcctacaattctgtgcgaagggaaaaccgacaacgtatacctcaagagtgccatcaatagcttaaagggagactatcctagccttgccaagatggaggatgggaaatacaacttgctgataaatttcgtggagtacagcaagcgaaccaagtttctgctcgagctcagcggcggggcaagttacctccgggacttcatcctgaactatgagaagaacttcaaaatctacaaggatcattcccctaagtatcccgtgatcatctttttagacaatgattcaggtgcgaatacaattatcaatctcttgcagcagcgggaatggcagcggaagatttcgctgagccccaacacgctcgacaaaaaggacgatatcaggaaaagcaacttcatccatgtcgagtacaatctgtacgttatattgacaccacgcactccaattggcggcgacactgatattgagtatttcttcgatgacaagacaagactactggctcactccaatggaaagtgttttaacactgtgtctaaaaggaaccctaacaccgatttgtccaaagaggcttttgcaactcacattataaaggagaagaagaactcaatcgacttcaccagcatgaaaccattattaaacctcattgtggatgtggtgacggactataatacccgctga

SEQ ID NO: 8356 - RNA, 1011 nt, synthetic construct
  source 1..1011: mol_type = other RNA
atgtcaaggctggataaactgagatccaccagcacgaagtccgggtttgctgacgtgcttggagtatcagctgtgtttctcacacggtgtttgtacatcaacaaaccagaaaatcagtatcatcagttcaccattgataagaagactggtgggaagagagtaattaatagcccgtctaaggacctgaagtctctccagaagtcgcttagtgatctccttctggactgtgtcgacgagataaattctaaaaagttccctaagagccaactggcgagccccaagctgcgcaaaaataaagagcccgactatgcggccgaagtgctgaagttgaaaataccctccgccaattccaaacagccgagcctgtctcacggcttcgtgcgcaaacggagcataatcactaacgcaatgatgcatgttggctcgaagtacgtgcttaacatcgacttgcaggatttcttcgatagtttcaattttggcagggtgcgaggcttctttatcaagaacagaaacttccaactaaaccctgatgtggccaccgtcatcgcccaaattgcatgctatgataataaactcccacagggctcaccatgctccccagttatcacaaatctgatctctcactctttggacattcgactggctagcttagctaaaaagtacaagtgcacatatacccgttacgccgatgacattacgttctcaacacggatgcctacttttcccgtccagataatggcacagcaagacggttgttactaccctagtaaagctctcatcggtgaaattgagagggccgggttttttgtcaacaataagaagacaaggatcctgtatgaggactcccgccaggaggtcaccggactagttgccaacaagaaacccaataccaaaaaagagtactggcggacagtgagagcaaagtgcgacactctgtttaagaccgggaacttcagtactgtgattgatggcaagaaagttgaaggaaacttaaacgaactcgagggatga

SEQ ID NO: 8357 - RNA, 1854 nt, synthetic construct
  source 1..1854: mol_type = other RNA
atgagcaggctggagcacctgaaaagcataaccactcgcccttcgttcgccaaggcactcggcgtcaaccctagttttctcactagatgcctctatataattcgtcccgagaatcagtatcaccagttcgaaatcaagaagaaatcaggggggaaacgtattataaaagcaccttccgtcgacctgaagagcttacaaaagaaactctctgacttactgctggattgcatcgatgagataaatgcctctaagtttccaaaaagtcagttggcttctccaaaaatgaggaacaagaaagatttggactacgcagctaaagtcctcaaaatcaagatacctggagctgagagcaaacagcccagcctgagccacggatttgtgagggacaggtctataattaccaacgctatgatgcacctgggtaagaagaatgttctcaacatcgacctggaaaattttttcgatagcttttccttcggacgagtgtgcgcgtttttcatgacaaacaggaacttcaacctaaacaagaaaattgccaccgtgatcgcccaaatcgcttgttacgaacgaaaactgccacagggttcaccctgttcgcccgttattaccaatctgattacgcattccctggatatccgccttgccgtgattgcgaaaaaatataagtgcacttactctcggtacgcagatgacatcaccttctctacaaataaaagcacctttccctatcagattatgaatcagtatgctgacgcctatatcccaggaaaagagctgatctgggagatcgagcgagccgggtttagcattaatgacaaaaagacccggattcaatataaggattctagacaggacgttacaggcctgatcgtgaataagaagccgaacactaaaaaggaatactggaggaccgcaagagccaagtgcaactcattgtttaaaaaagggaagttcacttccatcaaggacaatgtagaaactgatggcaacattaacgaattggaaggacagctaaacttcatagaccaagtggaccattataatcgtatgcgccagaaggcaccttttatcccagaatacactatcaagaatcatggcaaaaacacaaagctgctgttatctgctcgagaaaagaccttctcccacttcttattctaccggctgttctacggtaatgataagcccacaattctttgtgagggcaagaccgacaacgtatatctcaaatcagccatctcagagcttcaggctaattatccgtccttagccacaattaaagataagaagtacaagctcctcctcaggtttgttgagtacagcaagagaacaagatttttgctggagctgtttggcggcgcagattatcttcggggtttcatagacaacttcgaaaagaacacaaaacaattcgaggctcctaaaccgcaacatcctgtgatcattttccttgataacgacgaaggaccccagcagattgtgaatctactacagagtaagagttttcataacaagatctcccttttcccagatgggctggacccaaagaaggatattcgcaaggccacattcctgcacattacgctgaacctctacgtgatctttactcctttgaatagttccggcaaggagacggatatcgagtacttctttgaccgcaagactagattgatgaagcactcaaacgggaaatgttttaataccgtcagaaaacggaattcccgcacggacctttcaaaggatgcctttgcgacccacattgtgaaagcccagaagaagcggatcaatttcaagaaattcaaaagtctcctggaccccatcaccaaagtcatcgagcattacaagacactgaaatga

SEQ ID NO: 8358 - RNA, 1851 nt, synthetic construct
  source 1..1851: mol_type = other RNA
atgtctcagctgaactatttgcggagaataagcacgaagccgtccttcgccaaggccctgggagtggatcctcggtttctcacacgctgtctttacattatcaagcccgagaatcagtaccaccagtttaccatagagaaaagaagtggagggaagagaattatcaacgcacccggcgacgatctaaagagccttcagaaaaaactctcagatttgctgttagactgcatcgacgaaattaacatcagtaagtaccctagcagtcaactcgctaaacccaaaatgcggaataaaaaggatttggattacgccgccactgttctgaaaattaaaataccgactgccgaaagcaagcagccatccttatctcatgggtttgtacgggaacggtcaattatcacaaatgcgatgatgcacctggggaaaaagaacgtcttgaatatcgatctgaagaatttctttgacagtttcaactttgggagagtccgtggtttcttcattaagaacaacaacttcaagctggatcctcatattgctacaattatcgcccagattgcgtgttatgataataagcttccacagggcagcccatgttcccccgttattactaacctcataacacactcactggacatacgactggcaaagctggccaaaaagtacaaatgcacctactccaggtatgcagacgatattacattctccacgcgtaagtcaaccttccctaaagagatcatgaatgaggacatcgacggctatacccctggaaaaaaactggtaggagagatcgtgcacgccggcttcagcatcaatcataacaaaacacggatccagttcaaagactccagacaggaagtgactggccttatcgttaacaagaaacccaacactaaaaaagagtactggaggactgctcgcgccaagtgcaataacctattcaagaagggaaagttcacctcaatagaggatggcttcgaaatagacggcaacctcgacgagttggaggggcagcttaatttcatcgatcaagtcgaccactataatcgaatgaggcaaaaagcacccctaaccgctgagtatgctattaacaacatcggaaagaataccaagaacctcctctctgcacgcgagtcgacatttagcaggtttctcttttataggctgttctacggcaatgataagcctaccatcttatgtgaggggaaaaccgataatgtgtatttgaagtcagctattagcgaacttctgcccaagtaccccagcttagcaaggatcgaagacaataattacaagctgctggtgcgctttgtggagtactctaaaagaacccgctttctcttggagctttttggtggagtggattatctgaaggactttatcaacaatttcgaaaagaacaccaagtgctatacagcaccagaacctaagcatccagtcatcattttccttgacaacgacgatgctagaatacctaacctgctgaagggtaaatctttcaacaagaaggtgacactgtttcccagtagtctcaattctattgacgacgtcaagaaggccgactttattcacatctttcaaaatctgtacgtggttttcacgccactggggaaatccggcgaggataccgatatagaatacttctttcacaagaaaacgcgtatgatcaaacactccaacggtaaattcttcaatacagtcgataagaggaatccagaagtagacctgtcgaaagacgcgtttgctatgcatatcatcaaagcccagaaaaagtctatcaactttactcgcctaaaaccgctgctcaatcgaattgtgaaggtgactgagcattatgaccagattaagaagtga

SEQ ID NO: 8359 - RNA, 1854 nt, synthetic construct
  source 1..1854: mol_type = other RNA
atgtccaaactcaaatacctcaaatctatctcaacaaagcctagttttgccaaagctctgggagtagaccctaggttccttaccagatgcctgtacataaccagacccgaaaatcagtacatacagtttacaatcgacaaaaagtcaggcggtaaaagaatcatcaatgccccgaaagatgacctcaagtccctgcagaagaaattgtccataatgctgctcgactgtattgacgagataaatattagcaagtacccttcttctcaactggctcagccaaaaatgcgaaataagaatgacctggattacgcagccgaggttctgaagattaaaatccagtccactgaatctaaacaaccaagtctgtcacacggcttcgtcaggaaacgttccattattaccaatgccatgatgcaccttggaaaaaaaagcatcttgaacatagatctggaggattttttcggaagtttcaactttggaaggattcgggggttcttcattaaaaacgagaactttaagctggatccgcatattgctacgattatcgcacaaattgcatgctataacgatcagctgcctcagggcagcccatgttcgccagtgattaccaacctgatcagccattctcttgatatccagctggccgccctcgctaagcgctacaaatgcacctattccagatacgcggacgacatcacatttagtacccgacgctcaactttcccttcggagatcatgaattatgagagtgattcttacgtgccaggacggaagctgataagggagatcaaaagggcgggcttcagcatcaatgagaaaaaaacccgtattcagtacaaggatagcagacaggacgttacgggtctggtggtgaacaagaagcccaacacaaagaaagagtattggcggattgctagagcaaagtgtaatgtcctgtttaaaacaggtaagttttcaagcatctctaacggcatcgaggtagaaggtaatattaacgaacttgcagggcaattaaactttatcgaccaggtcgaccactataatcgcatgcgccagaaagccccatttacaccagagtactcccctcgggtgatcggcaaaaacacgaaggtcattctgtccgggcgggaagttactttcagcagatttcttttctatcgtctattctatggcaacaataagcccacgatcttatgcgaagggaaaacagacaatgtgtacttgaaatccgctatatcagaattaatcgccgattatcccactctcgccaagatagaagacaagaaatacgaactgcaactgcattttgtagaatattctaagcgaactaggttcctcctagaattgttcggaggcgcagactacttgaagggttttatcgataacttcgagaagaataccttgcctttcaaggcccctctaccccagcatcccgtgataatctttctcgataacgacaaggggccagagaagattaagcaactgctccaggggaagaccttcaatgagaagatctcactcttccccaagggccttgatccgaagacagacgtgaggaaagcgaactttattcatgtgatcaagaacttgtacgtggtgttcacccccctaaaaaacacaggcgaagacaccgatattgagtatttttttgacagcaagacccggctcattccccaccagaatgggaagtttttcaataccattgagaatcgcaattccactactgatcttagtaaagaggccttcgctacacacataatcaagagcaagaagaagaacatcaacttcaagggattaaaacctctgctggatcgcatcgttgaagtcatcgagcactataacactattaagtga

SEQ ID NO: 8360 - RNA, 1857 nt, synthetic construct
  source 1..1857: mol_type = other RNA
atgccccggctgacccacctaaaaaccgtgtccagtaaacccgggttcgccagagccctgaatgtcgatcccaggtttcttacccggtgcctgtacgttgtgcgccctgagaaccaataccaccaatttagtatagacaagaagtcagggggccagaggctgatcaatgctccttctgatgacctcaagtctttgcagagtagcctgagcaacctgctgttggattgcatcgacgaaattaataagaacaagtaccctgagtctcaaatcgcgtcacctaaaatgctgagcccgaagaagaaagatcacattgcggaggttttaaagattaaaattcccagctccgaacacaagcagccgtctttatcccatgggttcgtgcgtgaacgctccatcatcacaaacgccatgatgcacctgggaaagaagaatgtgctaaacatagatctcaaggacttcttcgactctttcaactttggccgcgtgagaagctttttcatcaagaacatcaacttccgtcttgatcctagtatcgccacaatgattgctcagatcgcatgttacaaagataccctgccacagggttctccatgttccccagtgatcaccaacttaatcactcatagcctcgacatacgactcgcctctttggcaaaagattacaagtgtacgtacactagatacgccgatgatataacattctccacaaggaagagcgtgtttccccctcagatcatgcgggggaaagtcgatgataatcatggatatatacctggcgaaaagttaactaacgagatcaaaagggctggcttcctgattaaccacaaaaagacacgaatacagtataaggactcgagacaagatgtcacaggtctgatcgtcaatcagaggcccaacactaagaaagagtattggaggacagttcgcgctaaatgcaattttttgttcaaaactggcgagttcacctcgataaaaaatgacatagtggttgccggcaatattaacgaactggaaggacagctgaattttattgaccaagtcgaccattacaatcggattcgccaaaaatctccgctcaagccagagctggcactgaaaaatgtaggatccaataccaaactgcttctgtcaggtagagagaaaacctttagccagttcatcttttatcgcctcttctatggaaatgacaagccaacaattctatgcgaaggcaagactgacaacatctatattaagtcagcgatttccgagttggtcattagttatccaaaactcgctagagtagcaaagaatgagtataagcttctcgtccgatttgtggaatacagcaaacggaccagattcctcctggagctatacggaggggccagctacctgaaagattttattgtgaattaccgtacccagtttaaaaagtacaaagcagccaagccccagcaccctgtgatcatcattatagacaatgacgctgggccaaaggatgcaggcatctttggatatatcagtaatcagaaggaagccaagatctacccccagacccttgaccttaaaaaggacctgcgatcagcaaactttgttcatttgttccataacctgtatatcgtgatgacacccaaagggattaaggattgtgacactgacattgagtacttcttcacggataaagatcggctccgggagcactcaaaaaaatgctttaatacggtagctaagaggaacgctgacaaggacttgtccaagggtgcttttgccactcacattattaaggcccagaaaaagaacatcaacttcaacggcctgaagccacttctcgacaggatcatgatggccattgatcattatgacatcaacaagtga

SEQ ID NO: 8361 - RNA, 1860 nt, synthetic construct
  source 1..1860: mol_type = other RNA
atgttatccaggttgaaaaacctgaagggcgcggccacgaaacctcagcttgcctctatacttaatgtgtccccggtgtttctgacgaaatgtctgtacatcatcaaaccagagaaccaatatcatcagttcgaggtaaataagaagtctggtggaaagcgggtcattactgcccctagcgaggacctgaaggggctgcagtctaagttatcagaattgctcctggactgtatcgacgaaatcaatactctcaagtatccagattcacagctggtgagtcctaagaaaaacatatctaagaagaacgacccatcggctgaggttctaaaagttaagatatcaaacgccgccattaaacagccttacctctcccatgggttcacccggcagaggtctattctgaccaatgccgtcatgcacttgggccagaaatccgtcttgaacatcgacctcgaaaacttcttcgattccttcaacttcggtcgggttcgagggtttttcatcaagaacaaaaacttcgagctaagtccttcaatagcaacagtaattgcccagattgcatgctataaagataccctgccccagggttcaccatgcagccctgtgatcacaaatttaattacccatcacttggacatccgccttgcaagtctggcgaaaagatacaagtgtacgtacactcggtatgctgatgatatcacctttagcacacgcctttctgtgtttcctcccgaaatcatgtgtgacagcctgaatgggttcgcacccgggaagaggctgaaacgggctattaaacatgcagggttttcgattaatgagaggaagacacggatacaatacaaaaattcccgacaggacgtcaccggtctgatcgtcaataagaagcccaacgtgaagagtgaatactggcgaaccgctcgtgccaaatgcaactccctctttaacaccggccactttattaccaacaagaacggaagaagcgtggagggcaacatcaatgaactggaaggccagctcaactttatagatcaagtcgaccactataatcgcatgaggcaaagccccccacttagccctgagtacagtcttaagaactatggaaagcgcacaaacggactactgtccggccgtgagacagtgtttagcaaattcctgttctaccgactattttacgccaatgagaaacccactatcctctgcgagggaaagaccgacaatgtatacctcaaatctgctataaaccagctgcacaatcaatacaagcagcttgtgaacattggggatgagtacaagttgctggtcagatttatcgagtattccaaaagaacaaggtttctcctggaactctatggaggagctgattacctccgtggttttattgatacatatgcggtcaagagtaaaatctacaatgctccaaagccagaaaaccccgtaattatatttatcgacaacgacgacggcccgaagcagattgaaacactgctgcagtctcgcaattttaacaagaagactacactcgttccaaatactttagatccgaagaaagacgtgaggaaggcagagttcattcacgttatcgataatctgtatgtggtgttcaccccccgcggcgatcaggatgaagacactgatatcgagtacttcttcggagatgacgcccggctgagaaaacacaccaatggcatgttcttcaatactgttcagaacagagatcctctgaaggacttatcaaaagaggtgtttgccacgcagatcattaaggcccaaaaaaaacacatcaacttcaatgggcttatccccttgttggacagaatcgtgaatgtgattaatcattatgacagcgtgaagggcctgtga

SEQ ID NO: 8362 - RNA, 1143 nt, synthetic construct
  source 1..1143: mol_type = other RNA
atgtctcgtctgaagtatctcaaggttgctaagacgaagccacagctggcagatgtattgggggtcagccctgtgttcctcactaagtgtctgtacgtggtgaagcctgagaatcagtatcatcagttcgagatagacaaaaagagtggcggtaagcggaaaattacggctcctaaaaccgaattaaagtcccttcagtccaaactatcagaattgttaatggactgcatagacgagattaacaagtccaaattccccaactctcagcaggtgtctccaaaaaagaatatccaacagaagaaggaccccgctgctgaagtgctgaagattaaaatctctaactcagccatcagacagccctccctgtcgcatggatttaccaggcagagatctatcctcaccaatgcggtcatgcaccttggacagaagaacgtactcaatattgacctggagaacttttttgactccttcaacttcggccgcgttcgaggcttctttatcaagaacaagaactttgagctgagtccatcaatcgccactgtcatcgcacagatcgcttgttacaaggatacccttccgcaaggaagtccctgctcccctgttattactaatctgattacccaccacctggacattaggttagcaagcctggccaaccggtataaatgcacctacaccaggtatgcagatgatatcacattctccacgagactcagcatcttccccccagagattatgcgggatacattgaacgggtttgccccaggcaaacgactgaaaagggccatcaaacacgccggcttcagcattaacgagcgcaaaactcggatacaatataaaaacagcaggcaggatgtgaccggtctgatagtgaataaaactctaggggtcaagagtgaatactggcgaactgccagagcgaagtgtaatagcttgtttaatacagggtcgtttacaacagaacgcaagggggagctcgtcgaaggatctataaatgagctggaaggacagctgaacttcatcgatcagattgaccactacaatcgtatccgccaaaaagccccgcttcaacctgagtactcaatcaagaaggtgggcaaagagacacgccggctccatagcggtagagaaaaaaatttttga

SEQ ID NO: 8363 - RNA, 1890 nt, synthetic construct
  source 1..1890: mol_type = other RNA
atgtccaagcttaactacctcaggtcaatttcgagcaaaccagagtttgccaaggcactgaatatttctcctaaattcctgactcacactctgtatgtggtcagaccggaaaaccagtaccacacattcaacatagataagaaatcagggggtcaacgtaccatcaacgcccccagcgacgaattgaaatctctgcaggccgcattatccaatctgctgttagattgtgtcggagaaataaacgctagcaaatatccaaaaagccagctagcgagtcccaaactcaaaaacaacaagatcgatagcgattattcggcagaggtactgaagattaagattagcaatagtgccatcaggcagccaagcctgagccatggctttactaaggacaggtcaatcattaccaatgcgatgatgcacatagggaagaagaacatcctgaatatcgatctggagaactttttcgactgttttaattttggcagagtccgtggtttctttcttaagaacaagaacttccagttcaaccccgagattgcaaccgttatcgctcagattgcgtgctatgagaataagttgccgcaaggaagtccctgttccccaattatcactaatttaatcgctcactcacttgacattcagctggcctctctggctcggaagtacaaatgtacctataccaggtacgcagatgatattacctttagtaccaatttgagcaccttccccacagagatcatggcagaggaaaagggcatttatacaagtggcaagaagttaaagaacgagatagagcgggccggtttctccattaatgacaagaaaacacgcatccaatacaaaaattctcgccaagacgtcactggactggtggtgaataagaaacctaacgtcaaaaacgagtattggcgcacagtgcgggctaaatgcaactccctcttcaagacaggcaggtttatgacgaccaaaaacggcgtggaagtcgaagggaatatcaacgaacttgagggccagctgaatttcatcgaccagatcgatcattacaatcggatgagacagaaacccccccttgtttcagagtacgctataaagaagatcggaatcaacgaccacagtacgaaggaactccttactggacgagagaaaactttctctcagttcctgtactacaagagcttttatggaaacgataaacccacaatcctttgcgaagggaaaactgacaatatttacctaaagtctgctatttcagagctcgccattaattatcctaatctggcctccttcacctccgaaatatctaaaaaagggataccgtacaagaaatacaacctcctggtgaatttctttgagtactctaggagaacacggttcttcttagaactctttgggggagtaggagatctgaagaagatcatcctgaactttgagaagtcccagcgaaagtatcagtgctccaaccctaaaaaccctgtgattattctgttggacaatgacactggtcccaaagacatcgtggccctcctgcaaagaaagcctctggtgaataagatcaccctagtaccacaagggctggaccctaagaccgatgtgcgcaaggctcagtttattcatgtcacaagaaacttgtacgttatattcacgccactcgatcctagcggcaatgccaccgatatcgaatatttttttgacgacaagacgcgcctcatgaagtactcaggcaagtgctttaatactgtgaaaaaccgaaacggcacaacagatttgtccaaagacaacttcgccacccatattgtgaaagcacagaaaaaaggtgtggatttcaatgggctaaagccactcttggacagtatcgtttctgttataaaacactatgacaccatcaagtga

SEQ ID NO: 8364 - RNA, 1866 nt, synthetic construct
  source 1..1866: mol_type = other RNA
atgacaaagattgagctgctaaggaaggcaacgcataagcgggagctggcagcacttttaggatgtacaaccagcgctctaacctatgtactgtatatacttaaggtcgacacacagtacaagcagttcgagatcgacaaacgtaatggcgggaaaagaataatcacagcgcccactgacaggttaaaaagattgcaagcctccctttccaacctgcttctggattgcatcgacgacatcaaccgaattaagtatcccaatagccaggttaattcgccgaaacttatcaacaaaaagttcaaagacgcctcggctgacattcttaaggtgaaaattagcaacgctaagactaagcagcctagtctctcacatggatttgtgcgcgaaaggtccatcatcacgaatgccatgatgcatctcgacaagaagaatgttctgaatatcgatctgcacaacttcttcgattcctttaattttggcagggtgaggggtttcttcatttccaacgagaacttcaaattagacccaaatatcgctaccgtgattgcgcagatcgcctgttacgataacaagctaccacagggctctccctgctccccagtgatcagcaacctgatcacccatagcctcgacatccgcttagcctcactcgctaagaaaaattcatgtacctattctcgctacgctgatgacattaccttctctactaggaaatcagtctttcctaccaaaattatgagacaggaggacggcgagtacattccatctaaaaaactgcgcaatgagataaagaagtctggtttcacgattaacaacaagaagactagaatccagtacaaggattctagacaggacgtaactggcctcattgtcaataagaaacctaacgtgaaaaaggagtactggagaacagtgaaaagccagtgccactcactgttccaaaccggagcctttactaaaaaagtaggcgatgacatcgtcgagggaaatatcaacgagttagaagggcagctaaacttcattgaccaagttgatttgtacaataggcttcgacagaaaaaacccttgaatcctgtatacaaacacgcaactcacgggtataatacctccatcctcctcagtggtcgggaacggacattttcacgttttctctacttcaccttgttttacggcaacaccaagcccactatcctctgcgagggcaagacggataatgtttatctgaagtccgccattaacaaactggcagcaacataccctgctctggctcaggccaagacccccaacaaggaatatgagttgctgatcagatttctggaatatagcaaacggactcggttcctcctggaattgtacggacgcacaagctacctcaactatttcatcgggaagttcgacaagaactttaagttctacaaagctccaacacctcagcatccggtgataataattctggataacgacagtgggtttgtgggcaaaaaggattctgggattgccgggaaactgaagaagatcgatagtgcaaccgcctatccgacaacactgaagaaggatgactttcgcaacgcagacttcatacacgtgattcacaatctctacatagtcctgaccccccttggaacagccaaggaaaccgctatcgaggatctgtttgatgatgagacgcgtcaggtgaaggtcagtggaaagagtttcaatcacaaagatgaccgggataatgccaaagaatatggtaaagaagtgtttgcccaaaaagtcattaaggcccataagtcctctattaactttgatggcttgaagccactgctggaccgagtggttcaagcgatcgaacactatgacactataagcgcggccaaatga

SEQ ID NO: 8365 - RNA, 1845 nt, synthetic construct
  source 1..1845: mol_type = other RNA
atgaccaaacttgaggccttgaagaaaataacaaccaagaaagagctggctgcactgctgggtgtgaagacatccttccttacgtacaccttatatttcatcaaaccgcacactcagtatacccagttcaagattcctaaaaagaatggcggcgaacgtatcataagctctcctaatgggaagcttaaaaccctgcagaagaaactgtccattttattcctcgatagcatagacgaaatcaacaaggcgaaattccccgaagctgaagccttcaagaacatcaacgacaagataatgtactccccaattctgaaagtcaagataggatctgcaaagatcaagcagcagccctctctctcccatggatttgtgagaaatcgcagcatcattactaatgccatgatgcatctggggcagaagaatgtactgaatatcgatctcagcaacttttttgactcctttaatttcggtagggtgagaggcttttttatcaagaacgaccactttaagctggatccagcgattgccaccgtgatagctcagattgcctgttacgataacaagttgccccagggatcaccgtgctcccccgttataacaaacttgatcacccacagtctggatattagactagcctctctggccaagaaaaattcgtgtacgtacagccgttatgctgacgatatcacatttagcacacggaagaaatctttcccatccaatatcatgagcgaactgtcaggcgaattcaccccctcaaaaaagctaagttttgagattaaacgggccggcttcagcatcaataacgttaaaactcgcatccagtacaaggactctcgccaggatgtgacagggttgattgtgaacaaaaagcccaataccaaaaaggaatattggcgaacagttcggtcgcagtgtaataaactcttcaagtctggcaaatttaccaagactgtcaacgacaaagtggaggatggtaatattaacgagctggaggggcagcttaatttcatcgaccaagtcgatagttataaccgactaaggcaggcggttccgattaaccataattacgcaacctcaaagcacggacacaacactagtaagctcctgtccggaagggagcggactttcagtcggtttctttactacaggctattttatggcaacgataagccaactattatatgcgaagggaagactgataatgtgtatctcaagtcagccattaatcgcctcatgacaggttatcccacgttggcaaataaaaccctcaattcaaagtccaacaaaactgagtataagctcctgattaagatcctgaaatacacaaaacgcaccagatttcttttgcagctttacgggggcacgtcttatttgaactactttatctccaagttcgataagcagtacgagtattacgacgctcctaaaccacagcaccctgttattatactgctggataacgactcaggatttgattgcatcgagaaggagctgaaaaaggtgcaacccgctattatcctgcctccacctttaaaaaagcatgacttcaggaacgccgacttcatccatgtgttccacaacttatacatcgtgctcacccctatgaacaaccaacctaaaacaatgatcgaggatctcttcgacgtagcaactcgacaaatccaggtcgacaataaaacctttaacccagagaaagactttgacaagacaaaagaatacagcaagcaaatctttgctcaaaaagtggtcagtactcagaagagcaccatcaatttcgatggcttcaaacccttcctggacaggattgtcagagtaattgaacactatgacacaattaagtga

SEQ ID NO: 8366 - RNA, 1866 nt, synthetic construct
  source 1..1866: mol_type = other RNA
atgaacaagttgaaatccttgcaaaaagttagcacaaaaagcgaacttgcctctcttctgggggtgaaagccagcttcctcacacacaccctctacgtggtcaagcccagttctcagtatacgaacttcaagatccccaaaaagtccgggggcgagcgctcgataaatgctcctactaaaaagctgaagacattacagtcttgtctgagtaaactcctgctagactgcatcgacgagatcaataccatcaagtatccagacctcgcctcttacgaagtgacgcggaacaaaatcctgaaggtaaaaattcctaactcaaagatcaagcaaccaagcctggcgcatggatttgtgcggaatagaagcattataaccaatgccatgatgcacgtaaaccagaaaaatatcctgaatatcgacctgaacaatttcttcgacagctttaacttcgggagagtccgtgctttctttatcaagaacaagaacttcaagctgcccgagaacattgcaacaacaattgcacaaattgcctgcaacaataacacacttccacagggatccccttgtagtcccgttattagtaatctcatcacgcattccctcgacataaaacttgcctatctagcccacgagtattcctgcaggtactcgaggtacgctgatgatatcacattttcaactcgcaaaaaagctttcccgaccaaaatcatgtcctacgaaaacaactgttatgtggccggcaaaaagctgcagggagctatcaaacaagccggattttcaatcaatgacaagaagactaggattcagtataaggatagccgacaggacgtgacaggcctgatcgttaataagaagcccaatgtgaaaaacgagtattggcggagagtgagagcacagtgccactctttatttaccactggtcagtttaccaaggaattaaaaggggagatcgtggcggggaacataaatgaactcgagggacagctgaactttatagatcaggtggatcactataaccgcgtcaggcagtccccaccactggatcccaagtaccacctgaagcgagatgagctgttgaaaactaatcaggctaaggaacgccaatatctgtttacaggccgtgagcgaacgttttcacgctttctgtactacaggagtttttacgctaataacaaaccgaccattctgtgtgagggtaagaccgacaatatttacctcaagtccgccattagtgagagggtgaagcggcatccaacccttgcgtcacagaaaaagggcgctgtaccctacgagttgctgatcaatttcttcaattattcccctcggactagatttttgctggaactggcaggcggaactgactacctcaaagacttcgtaattaacttcaataagcacttcaacagctttaaggcaccaaaacctaagcatccggttattattgtgcttgacaacgataagggtcctaatggcttgcttcactatctgagcaacgtcaagggcgcatctataatccccaacaccttgaagcttaaaacagattatcgtaaggccgaatacattcatgtgttccacaacctctatgtcgtcctcacccctttatcaaacaagggcaagtcacaaaagatagaagatcagtacaccgatatagaaagcttattcaagaaagccgacctactgcgcacttaccagaaaaagtgctttaatatcgcttccaaacggaatgaagatattgacctctctaaaaatgccttcgcaaatcagattgtgaaagggcaaaagaaacaggttaacttttctggtttcaacaaactactgaacagaatcgaggaggtcatcaagcattacgacaatatgatcttctga

SEQ ID NO: 8367 - RNA, 1728 nt, synthetic construct
  source 1..1728: mol_type = other RNA
atgcccaaaaagaatggtggtaaacgggagattaatgctcccattgaaaagctcaagagtcttcagagctcgttgtccaatctgttgcttgattgtatcgatgagatcaataaagtcaagttcccaagatccgaagtgaataagaatcgtgataaatcctcgaaagccaacaatcatgaaatcttgaagatcaaggtcccgaatgccgacatcaaacaacagtccctctcacatgggtttgtgagaaacaggtctatcatcactaacgccatgatgcatctaggccagaagaatgtactgaatattgatctcaaagacttctttgacagctttaactttggccgtgtccgcgggtttttcatcaagaacaagaactttaagctggacagccacatcgccacggtgatagcacaaattgcctgctacgacaataagctgccccagggaggcccttgcagtccagtgattacaaacctgataacgcacgcccttgacattcgcctagctgcgctggcagagaagtattcatgtatttatacgaggtatgcggacgatttgaccttttccactagggaaaaggtgtttcccgaaaaaatcgccagactcgataatgggaagtatgccgcgggtaaaaaattaaagagtgagatatctcgcagcggattcagcataaacgataaaaagaccagggtgcagttcaaggactcacggcaggacgtgaccgggttagtagttaaccggaaaccaaatgtgaaaaaggaatactggaggactgccaaaagtcagtgccactctctgttccggacaggatcatttaccaaaatcgtttccgatgtcgtggtcgagggaaacatcaatgagttggaaggtcagttaaactttatcgaccaggtggactcttacaatcggctaagacagaaggctcctctgaactacgtctaccagttcgcaaaacacgggcacaacaccttaccgctcctgagcgaccgggagcgaactttcagccgatttttgtactatcgacttttctacggaaacgcaaagcctacaattttgtgtgagggcaaaactgacaacgtgtaccttaagaccgccataaagaggctggtttcagcttacccaaagctcgctaagactcgcgtgaattctgagacaaagaaaccatcctacgacctcctcgtgcgcttcctggaatattctaaacgcactagattcctgctgcaactttttggcggcacatcctacctgagctacttcattagcaagttcgaagcccaatatgctttctacaaagcaccaaaaccccagcaccctgtccttattgtactggataatgattctggcttctacaaggagatcgaaaataagctgaaaaaaatcgagacaccgaccgtgtatcctgttagcctgaaaaaacatgattttcgaaaggcggatttcattcacgtcatgcataacctgtatattgtgctaacccccctcagtgctaccggcaaagatacaatgatcgaggatctgtttgatgacaccgcaagaggagttgtcgtgtcaggaaagacattcaaccctaaggacggcagagacaacgccaaggaatatgggaaggaggttttcgcaaagaaagtaatacaagaccagaggaacaagatcaactttgatgggctgaagcccctcctggaccgtatggtgaaagctatcgagcactatgattccattaagaacagttga

SEQ ID NO: 8368 - RNA, 963 nt, synthetic construct
  source 1..963: mol_type = other RNA
atgaacaagctcaacaagttaaaggcggtgactacgaagcaggagctcgcagaattgctgggagtgaaggctagctttttaacttacgtgctatatatcctgcgaccagagaaccagtatgtgcagttcagtatccccaagaaaaatggagggaagaggaaaatcaacgcccctatagagaaactgaagtccctgcagagctctctttcaaatttgcttttcgactgtgtcgatgagattaacaaggttaagtttcccttctcagagataaacaaagaccgggatcggaattcaaaaaccaacaactacgagatccttaaagtcaaagtccctaatgccgatgtaaagcagcagagcctctctcacggcttcgtgcgaaacaggagtatcattactaatgctatgatgcatctgggtcagaaaaacgtcctcaatatcgacctcaaggacttttttgggtcctttaatttcggtcgcgtgagaggattcttcattaagaacaagaacttcaagctggactcgcacatagccacggtaatagcccagatcgcatgctatgataataagctacctcagggcggcccatgctcacccgtgatcaccaacctgattacacacagcttggatattaggcttgcagcgttggcagaacgctactcctgtatctatacaagatacgctgacgacctgaccttctccaccagagaaaagttcttcccagaaaagatcgcccgtctggacaatggaaaatacgtagccgggaaaaaactgaaatctgaaatttcccggagtgggtttagcattaatgataagaagacccgcgttcaatttaaggattctagacaagacgttacaggcctggttgtgaatcgcaaaccgaatgtgaaaaaagagtactggaggacagctaaatctcaatgccatagcctctttcggactggcagttttaccaaggtcgtgtga

SEQ ID NO: 8369 - RNA, 1851 nt, synthetic construct
  source 1..1851: mol_type = other RNA
atgaaaaaaatcgaggctttgcaagccgtgcggacaaagcccgaactggctagacttttaggtgtcaaggccagcatgctgacttacgtgctgtacgtgctgaggcccgaaaaccagtacagctccttcactatcccaaaaaagtctgggggcacgcggacgataaacgcaccacacgacagactgcgacttattcagcgagcacttagcgacctgctccaggattgcattgaagatataaacgactccaaacctaagagcgctgtgaaaggcaaattcatcgcagccaaaaaggacgacaacccagactacagacgccataaatttttcgaagacgtatttacccctactctgtcccatggctttgtaagaaaaaggtccatcattacaaacgcgatgatgcatattgaccggaagaatgtgttgaatatcgacctgaaggactttttcgatagttttaatttcgggcgggtgagaggtttcttcattgctaataatcatttcgggttgagccctgagattgctaccgtaatcgcacagatagcctgctacaatcacaaacttccacaaggcagcccttgctcacctgtgataaccaacctgataggccatatccttgatatcaaactcgctctgctcgcacgagagcacagttgtacctatacaaggtatgcagatgacatcacctttagtactcgtagtaagcactttcccgatgctttgatgagagagtataagggtatctacgtcccaggcctggagctagagaatcgcatccgccaagcgggcttccgcgtcaattctaagaagaccagaatccaataccaggattcaaggcagatcgtcaccgggctagttgtcaatgagaaaccgaacatccgctctgagtactggaggactgccaagagtcagtgtcacctgctgtttaaaacaggcgccttcacagaaggagataaggagaagtctctccctggaaacattgagcagcttgaggggcgcctcaactttattgaccagctggatttttacaaccggttacgccagaaaccgcccctgaactcagaatacgttctagaaaagcatggcgtggatactcggaagttgttaggcggacgggaaaggaccttcgggcgttttctatattacagatcgttttacgcttcatcctctccaaccattttatgcgaggggaagaccgacaatatctatgtgaaggccgctattaaccgccttgccgccgattatccctccctcgcccgagtcaaagcctccgagtccgaatataagctgctggttagcattttcaagtatacaccccgaactaggtttttgctgggactctacggaggggccagctaccttaaggaatttatcacacgtttcgaggaagcctattcttactacaaggcgccagacccagagaatccggtcatcatcattatggacaatgacgggggctttgacggagtagatagcctgttaaagggtaagaaactccacgctactcccttccctaaaggtgccggaaaactggaatatagaggcgcggacttcatccacgtgaccaaaaacctgtatattgtgctgacccctatgtcctcatctggcggatccagtgagatagaagacctcttcacgcctagcacgaggagtgagccctttgatggaaagcacctgtgtctcgagaaagatatagatagggcaacacagtatgggaaggatacattcgcaaataaggttattctccccaagaagaactcaattgatttctctggtttcaaagtgctgttggaccgggttgtgatgtgtatcgagcactataagtcagcaaaactcgccttgtcgaaatga

SEQ ID NO: 8370 - RNA, 1848 nt, synthetic construct
  source 1..1848: mol_type = other RNA
atgaaaaagattgatgcactgagaacagttactacaaaacctgagttggcgagactgctgggaatcaaagcgtccatgctgacatacgtgctttacgtgttgaggccagaaacacagtactccatttttgagattcccaagaaatctgggggtacccggaccatcagcgctccacatgacaaactgaaatccatacaacgcgccttggcggatctgctccaggactgcattgaggacataaatgactctaaacctaagtccgccgtgaaaagcaagttcatcaactccaaaaagaatgacaatccagactatcggaaatccaagtttttcgaagatgtcttcacccctactatcagccatggctttgtgcgtaaacgttccataattaccaatgcaatgatgcacctcaaccgaaagaacgttcttaacatcgatttaaaggactttttcgactcctttaactttggaagagtgagggggtttttcatcgccaatgaccacttcggattggacgagcatattgccacagtaattgctcagatcgcttgctacgagcacaagctcccccaggggagtccctgtagcccagtgatcaccaatctcatcgggcacattctggacatcaaactcgcattgctcgcacgggaatatcgatgcacctacacgcgatacgcagatgatataacattttctacaaggtcgaaggagtttcctgttgaactgacccgggaatacaagggaacctacatcatcggttcggtactggaaaaccggatcagacaggctgggtttcggatcaatccacgaaagactaggatacagtataaagacagcaggcagactgtgacgggtctggtcgtcaatgagaagcctaacgtgagaagcgagtactggcggactgtcaaatcacaatgtcacatgctctttaagtctggcgccttcactgaagatgggcccgaggaaccggtacccgggaacattgatcagctggagggacgactgaactttatagaccagctggatttctataaccggctaaggcaaaagcccccgctcacccctgattacatgctggaaaagcatggggtcaatacccacaaactgctaagtggacgcgagcgcacattctcacgcttcttatattatagggctttctacgggaatgctagaccgactatattatgtgagggtaaaaccgacaatatttacgtgaaggccgctatcagcagacttgcggccgactacccccgccttgccaagattaaaactgctacaagcgactataagcttctggtcagtatctttaagtataccagccgcacccggtttctgatgggcttatatggcggcgcagcctatctgactgattttgttgctaggttcgagaacacgcaccgcttctacaaagccccccgccctactaaccctgttattattatcatggacaatgacggcggcttcgatggagtagagggtatcttcaaaggcaagaagtctaatgccacaccagtgcctaaaggcaccggccgtacagaatatagaggcgcagatttcattcatgtcgttgagaacttgtacgtggtccttacaccactcggaccatccggttcaaaatctgaaatcgaggatctattcacgtcaagtacgagagaggagttggtggacaagaaaaccctgtgccttgataaggaaatcgataggtcttctcaatacggcaaggataccttcgccaacaaggtgattctccccaagaaggccagcatcgacttcagtggatttaagatactgctggaccgtattgtgctctgtatggaacactatgagagttcagtgcttgcatcaacttga

SEQ ID NO: 8371 - RNA, 1440 nt, synthetic construct
  source 1..1440: mol_type = other RNA
atgatgcatctgaatcgtaaaaatgtcctcaatgttgaccttaagaatttcttcgactccttcaactttggtagagtacgcggcttctttataacaaacaaccattttcggctggcccccgagatagctactgttattgcccagatcgcctgctacgataataagttaccacaaggatcaccagcctccccggtgataacgaacttaattacccatattctagacatcagactcagcatcctcgctcgggagcaatcatgcacatacacccggtatgcggacgatatcacattttctaccagggagaaggtcttccccgagcagatcatgaaggaaattggtgacacctattcccccggacacctactgagcggtgagattaggcgcgccggcttcagtctcaatgctcaaaagactcggatccagtacaaagattctcgccaggaggttaccggactggtggtgaataagaaacctaacgtgaagaaagagtattggagaacggtcaagagccaatgtcacctgcttttcaaaattggcaacttcgtggaaattataaacgatgaaccgcagcccggaaacatcaaccagctggaaggccggctgaattttatcgaccaggtagactactataatcgtaagagacagaaacctcatctgaaccctgagtatgctctgtctaagcatgggaccaacacccacgaactcctgagcgggagagaaaggaccttttctcgttttctgtactaccgaagtttctatggaaacgacaagcctgcaatcatctgcgaagggaaaacagacaacatctacttgaagagtgcaattaataggctagctccagtgtaccctaggctggccactgcaaaatcaactacttcagactacaccctgcttgtggacattttcaattatagcgcgagaacgcgatttctgttagagttgtatggggggaccagttacttgaaggattttatagtgcgctttgagaaacactattcgttctataaagctccacgaccacagaatcccgtcatcatcatacttgacaatgataagggtttcgatgaaattgacaaattgctcaagtccgagaaaagcaaatccaccgcctacccagagatagcaggacagaacaagtacaggggcgctgactttattcacgtaattcacaacctctacgttgtcctgacacctcttgccgcaactggcggccagactgccgtggaagatctctttccccaggtcacacgcgatgaaattgtggatggcaaaagtttctcaacagacaaggagatcgatcgcactacacaatacgggaaggacgttttcgcaaataaagtgatcgcggccaagaagggcagcatcgatttttctgggttctccgtgttgctgaaccggatcgtctcttgtatcgagcactatgattccattaagtga

SEQ ID NO: 8372 - RNA, 1842 nt, synthetic construct
  source 1..1842: mol_type = other RNA
atgaggaaaatcgacgccttgaaggcggtcagaactaaacctgaattggcctccctgctgggagtgaaggcctctaccctaacttatgtcctgtatgtactaaagacaagcacccagtataagtcttttactatccctaagaagacggggggcactaggaccattcatgcaccccatgatagattaaaagccatccagtcatccctgagtgaccttctacaggactgtattgaggaaattaattcggctaaaccaaagaaagcagctaaaaccaaattcgtcaataccaccaaagacaagaaccctgactacaagaagacaaagtttctggaggatactttcacgccgaccctatcacacggctttgttaggaaacggagcataataaccaacgccatgatgcatctgaaccggaaaaacgtgctcaatgtagatcttaagaatttcttcgactccttcaactttggaagagtgagaggctttttcattactaacaaccattttcgcctctgtgaagagacagccactgtcatagcccaaatcgcatgctatgagaacaagctcccgcagggatctccctgttctcctgtgatcacaaacctgatcactcacatcttagacatccggctcgcagccctcgcacgcgataatgcctgtacctatacccgttatgcggacgacattaccttcagcacacgcgagaagatcttccccgagggaattatgcgggagaatgacggagaatactctacgggtcacctgctgaatggtgagattaagcgagctgggttttccttgaatatccagaagacacggattcagtacagcgattcccgtcaggatgtcaccggccttatcgtgaataaaaagccaaacgtgaagtccgaatattggcgaaccgttaagagtcaatgccacctgctgttcaagtcagggagtttcatcgagatcattgatggcgaaccaaaaagggggaacatcaaccaacttgaaggcaggctgaatttcattgatcaggttgattactacaaccgactgcgccaaaagccaccattaaatcctgaatacgagccctccaaacacggtcacaatactagggagttactgtctggacgtgaaaggacgtttagccgcttcctttattacaggtcattctacggcaacgagaaggctacaatcatctgcgaaggaaagacagacaacatttacctgaagagtgcgatcaaccgcctcgcagcagcctacccaagacttgcaaaagcaaaaagcgcaagttccgcttaccagttgctcatcagtctgtttaattacagcgctcggaccagatttctgttggagctgtatgggggagccccttttctgaaagagtttatctccaacttcgaagagaattatgagctgtacaaggcccccgcgccaagcaatcccgtcataatcgttttcgataatgacgccggtttcgatattgtggattctctcttgcggggcaagaaaatacaagctgtggcctttcccgcttcgtcaggtagaaatgaatatcgaggcgcagacttcatccacgtgacaaagaatctgtacattgtactcacacccctcacagctgctgggacgcagaccgacattgagtctctgtttaccaaagtgactcgggatgaaatctttgaggggaagacatttagcagcgctaaggatttcgatagagctcttcatttcgggaaagacactttcgccaacaaaataatagccgccaaaaaaggcagtatagacttctcaggctttaacatcctcttgaaccgcattgtgcagtgcattaaccactacgactccattaagcagccttga

SEQ ID NO: 8373 - RNA, 1839 nt, synthetic construct
  source 1..1839: mol_type = other RNA
atgaagaacattgatgccctgagagcagcacgcacgaagcctgagctcgcccttctgctgggtgtgaaagccagtttcctgacgtacgtgctatacgttttaaagccagacaccctgtacagatctttcaccctgaagaagaaatccggcggtacccgtaccattcacgctccttatgaatccctaaaatccatccagagcagcctgagcaacctactccaggattgtattgaggagataaataaggccaaacccgccaaagccatcaagaccaagttcatcattaccaaaaaggacaagaatagcgatcacaaaaaaaaaaagcggcctgaccacacatttactccaactctctctcacggctttgtcaggaaaagatctatcatcactaacgccatgatgcatctgaatcggaagaacgtgcttaacgtggatctgaaggattttttcgacagtttcaactttggcagggtccgaggcttttttatcaccaaccggaacttccaactgcaccccgacatcgccaccgttattgcgcagatcgcctgttataacaacacccttccgcagggatcgccctgctcaccagtaattactaatctgatcactcacatccttgacattaaattggccgctctcgctagaacatacagttgcacttactcccggtatgtagatgacatcaccttctcaacccgaaaaaagatatttcccgaacagatcatgaaagacttagaggggtcttatacagcaggatatctgttaaatggagaaatacagagggctggctttaatctcaacccgaagaaaactaggataagaaaccaggatagccgacaggaagtaaccggcctagtcgtcaacaagaagccgaatgtaaattccaaatactggagaacagtgaaaagccagtgtcatcttctgttcaagtcggggacgtttgtcgacataatcgacgacaaacccgccccaggaaatatcaatcagctggagggcaggttgaacttcatagaccaagtggactactacaaccggttgcgcgataaagcacccctcaaccctgagtacatgcctcacaagccttcaaataatacacgcaggcttctgtcaggtagagagctgacattcagcaggtttctgtattttcgctccttctacgctaatgaaaaggtgacaattatatgcgaagggaagactgacaatatttatcttaaggccgcgattaagaaactcagccctgcttacccgaaattggcaaagcctaaatctgccacaagtgcataccaactgctcgtctctatctttaactatagtgctcgtacccggtttctgatggaactctatggcgggaccccatacctgaaggattttatcgctgagttcaaagagaatcacaagttctacaaagcacccaagccagctaatccagtgatcattattctggacaacgataagggattcaatatcgtggagtccctcctgaggggagataaggtccaggccacaccatatcctcgaacacccggtcagtttgagttccggggggctaacttcatccatgtgacggaaaacttgtatcttgtgctcactcccttggcgccaccccctgatcgccaaactgcaattgaggacttgtttacccaggacacacgtgacgagcaggtggacggcaaaatactcagcttagaaaaggaattcgataaggccacgcattacgggaaagatgcgtttgcaaataaagtggttctggttaagaagtcatccattgatttctcagggttcaatgttatcttaaaccgcattatgcaatgcattgagcattatgattctatcaagtga

SEQ ID NO: 8374 - RNA, 1836 nt, synthetic construct
  source 1..1836: mol_type = other RNA
atgaaaaagatcgacgccctccgggctgttaggacaaaacctgagctggctttacttctgggaattaaagcctcttcactgacctaccttctatacgttttaaaacctagtacccagtactcgagcttcgagatccccaaaaaatcaggcggcactagaacgattcactctcctagtgagcgcttgaaatctctgcaaagtagtctcagcatcctactgcaggattgcattgaagagattaataaggacaagcctgctagggccaacaagaccaagtttatcaccactaagaaggataaggccagcgactcaaagaagtctaagtttatagagtacgccttcatgtcaaccctggcgcacgggttcgtgcggaaaagaagtattatcacaaacgccatgatgcatctgaataggaagaacgtgttgaacgttgatataaaggacttctttgactcattcaactttggccgagtgagaggatttttcatcacgaataatcacttccgtttagatcccaacatcgcaactgtgattgcccagatagcctgctatgacaataagttgccacaggggtcgccatgctcccccgtgatcacaaatctgatcacccatatcctggatatccggttggccgcacttgcccaggcaaattcctgtacatatagccggtatgccgacgacattactttctctacacgtgagaaattattccccacacagctcatgtctgaggagggtggcacctacattgcaggcaacgaattaaagcgtgaaatacagcgcgcaggattcgagctgaacgcgaagaagaccagaatacaatatcaatccagcagacaggatgtcacagggctggttgtgaataaaaaacctaacgtcaagtccgaatattggcgcaccgtgaagtctcagtgtcacctgctgttcaagtccgggaagtttactgcgaaaaagggtgatgagattctggagggtaatatactggagctcgaaggacgcctgaactttatcgatcaggtcgacttttacaatcggcttaggcagaagccacacctgaatccagaatacgctcttagcaaacatggactcaatacccgccaactcctgagcggacgggaaagaacttttagcagattcctgtactaccgatcattttacgccaacgacaaacccactattttgtgtgaagggaaaaccgacaacatttacatgaagtctgctataagtagcctggctactgattatccaaaattggcgaggcccaaatccgccactagcccgtaccagttgctcatcagcctcttcaaatataatgagaggacaagattccttcttcagctctatggaggcacctcctatttgaaggattttatcgaaacattcgctatgcactacaaattttacaaagccccaaagcctaacaacccggtaattatcatccttgacaacgacggagggtttgactccatcaacgctctgctgaatggcgataagactagggcaacctgctaccctaataccccaggcaagaacgagtaccgagatgcagaatttattcacgtgctggagaacctctatattgtcctgacaccccggggtgtgcccgacaaacatacggcaattgaagaactattcacacaaaaagtgcgcgacgaggtggtttccggcaagaccttcaaccacacgaataaaattgatatcacgaaggagtatggcaaggaaatttttgctaaaaaggtaatcctcgctaagaaagggtccgtagatttcagtggttttagggtcctactcaatcgagtggtccagtgtatcgagcattatgactcaatcaagtga

SEQ ID NO: 8375 - RNA, 1830 nt, synthetic construct
  source 1..1830: mol_type = other RNA
atgaaaaagatcgatgccctgcgagccgtgcgaactaagccccagctcgcgcttttactgggagtcaaagcatctgcccttacctacctgttatatgtcctgaagcctgccacacagtattccagcttcgatataccaaagaagagcggcggagtccgaaccatcaatgcccccagcgagcggcttaagctggtccagtcgtccctgagcgaattgctgcaggactgtatagaggaaatcaacaaagcgaaacctccacgggcacctaaagggagattcgccaagaccgagaaggaggctggagggaagcgctcaaaacatgtcgaatacgtgtttacttctaccctttcccatggctttgtgagaaaacgttcaattatcacaaacgctttgctgcacctcaacaagaagaatgttctcaacgttgatataaaggacttcttcgactctttcaatttcggtagagtgcgcgggttcttcatctccaacaacaactttaaactggaccccgggattgctaaagtgatcgcccagatcgcatgctacgacaataagctccctcaaggttcaccgtgcagtcccgtgatcacaaacctgattacacatggccttgatataaggctcgccgctcttgcgaagaagagtagctgtacctattccaggtacgcagacgatatcactttcagcaccagagaacggctctttccaagtaacatcgtgaaggagattgcaggtatttactcatatggggacgacctcaaggctgaatttggaagggcagatttcaaactcaatgagaagaagacaaggattcaatatcacgatagccgccaggacgtgactggacttgtggtcaacaaaaaacccaacgtcaaatctgagtactggaggctggttaaatcccagtgccacttacttttcaaatcaggaagattcctggtgaaagaggatggcaaggttaaggatggcaatgttctggagttagaaggcaggctgaatttcatagaccaggtcgattactataatcggttgcgtcagaagaaacctctgaatccagagtacgccctggaaaatcataaattgaacacacgcaaactgctctctggccgggaaagaacgtttagtcgttttctctattaccggtatttttatgccaacgagaagccattggtgctgtgtgagggcaagacagataatctgtacctaaaatccgctgttaaccggctggtagccgcttatcccagactagccaaggctaagaccgtgaatgcaccttaccacctactcatctccttctttaaatattcagaacgcaccaggtttttgttgcaactgtacggtggcgccagttacctcaaagatttcatcgagagttacgagaagaattattccttttacaaggcacccaagcctagcaacccggtgattttggtatttgacaatgacacggggttcaacagcgtagaggcccttctgaaaggctcgaaaatgaaggaagtcgtggcccacccagttgggtccaagaagtcttcgtttcgaaattctgagttcattcacgtgttttacaatctatacgttgtgctgacgccgttaggcgcggctaaaagcactgccatcgaagacctgtttactaggagtaccctggatgaggtagtctcagggaaaaagttcaacccaaccaaagaaattgacgtggacaaggaatatggaaaggaggtgtttgctaagaaagtggtgctcgcaaagaaaggatctatcgactttagcggtttctgccccctgctggatcgcattgtcaaggtattggaacattatgagtctactaagtga

SEQ ID NO: 8376 - RNA, 1830 nt, synthetic construct
  source 1..1830: mol_type = other RNA
atgagaaaagtcgacgcactacgcgcagtcaggacaaaaccagaattggccttgctccttggcgttaaagctagcgcattgacctacctgctctacgtgctcaaaccctcgacgcagtatacaagcttcaatattgccaaaaagagtggggggatcaggaaaattaattcaccctccgaacgcctgaaagctgtgcaatcctcactctccactcttctccaggactgcattgatgagatcaataaagccaaacctccccgggctccaaaaggtatgtttgccaagactgaccggctatctgatggcaagcgggccaaaagagtggagtacgtgtatacttccacactgtctcacggcttcgtgagaaagcgctccataattacaaacgcccttatgcatttgaacaaaaattcagtgctcaacatagacatcaaggacttctttgagagctttaatttcggaagagtgcgtgggttctttatcaagaacaacaacttccgactgaggcctgatgtcgctactgtgattgcccagatcgcctgttacgacaataagctgcctcaagggtccccgtgttccccagtgatcaccaacctgatcacacattcgctcgatattcgcctcgctgccctggcacgcaaaaactcctgcacgtattcaagatacgcagacgatatcactttcagtacccgggagaaagtgttcccgtcaaacctggtaaggtgggacagtgaagggtatgtttacggagatgacttggagtctgagtttgctagagccgggctcaaactcaacaaaaagaagacgaggattcaatataaggactctcgccaggacgttacaggcttagtcgtgaatcgcaagcccaatgtgaagtgcgagtattggcggactgtgaaaagtcagtgtcatctgctgtttcgtacggggaagtttgccatcaaggatggtgacgagatcaaagatggaagcatcttcgaactagaaggtcgactgaacttcatcgatcaggtggattattacaaccgactgcgccagaaaataccactgaaccccgaatatgctctggcgaaccacaagttaaatacacggggtttacttagtggccgtgaacgaaccttctctaggtttctctattacagagccttttatggaaacgacaagccaacaatactgtgtgaaggcaagaccgacaatgtatacatcagaagtgcgattaatcggctggctgcagagtaccccaagctggctagagccaaaaccagcaccaagccgtacgagttgctggtaagcttgttcaagtacaatgagaggactaggttcctactgcagctttatggtggctccagctacttaaaggattttatagaaacctacgagaagcactacgatttctatatggcccctaaacctgcgaatcccgttatcgtgattctggataacgatactggcttcaactctatcgaggttctgcttaagtctaagatgacaaatgcagctgtctatcccaccggcttgggcgtggcgggatataggaacagcgactttatccatgtcctccacaacctgtaccttgtcctcaccccactgggaacagccaagtcaactgcaattgaggacttatttacccggtccaccctgaaggagattgtcagcgggaagacctttaatcctagcaataaaatggatccagccaaggaatacggcaaagaaatcttcgcaaagaaagtggtacttgctaagaagggaaatatcgactttgtcggattccggcctattctggatcgactggttcagtgcattgaccactacgagagcataaagggttga

SEQ ID NO: 8377 - RNA, 1830 nt, synthetic construct
  source 1..1830: mol_type = other RNA
atgaggaagatcgacgccctacgcgccgttaggacgaaacccgaactggcgcttttgctcggtgtgaaggcatccgccctgacttacctattatatgtgctgaagcccagtacgcagtatagttctttcgaaattcccaaaaagacgggcgggaccagaactatccatagcccttcggaacgcctgaaggtggtccaatccagtctttccatgctgctgcaagactgcatcgaggatatcaataaagctaaacccccgagagctccaaaggggaaatttgccaagaccgaaaaattacccgcaatcaaacgcacaaaactggtggactacgtcttcacatccacactcagccacggtttcgtgcgtaaaagatccataataaccaatgctctgatgcacctcaacaagaagaaagtgttgaacgtggacattaagaacttcttcgacagctttaatttcggccgcgtcaggggtttcttcatcaagaataacaactttcggctggatccaaatatcgctaccgtaatcgctcagattgcctgttacgataacaagctccctcagggctcaccttgttctcctgtcattaccaatctgattactcacggactggacataaagctggcagcgctggccaagaaaaacagctgtacatactctcgttacgccgatgacattacctttagtactcgtgagaaggtgtttccattaaatgtcatgaaggaggaagccgagggctacgtttgcggggacggattaaaaagcgagattggaagggccggctttacattgaacaacaagaaaacaaggatccagtacaaagattctcgacaggacgtgaccggtttggtggttaataaaaagccaaatgtgaagtgcgagtactggcgaacggtaaaatcacagtgccacttgctgtttaagagcggggggtttgtgaccaaaaatggggatgaaatagaggaaggcaatattttcgagctggagggcaggcttaacttcatcgaccaagtagactattataacagattgcggcaaaaggctcctctaaaccctgagtatgatttggccaagcatggccttaacacccgaaatgtcctctcaggcagagaacgcaccttctccagatttctctattaccggtccttttacggaaatgacaaaccaactattctgtgtgaaggcaagactgataatatttacatcaagtccgcaataagtcgactggcggctgtctatcctcggctcgctaaggtcaaagcactcaccagcgcatatcagctgctcgtatcactctttaactatacagagcggacacggttcctgcttcagttgtatggcgggacttcatatctgaaagacttcatcgagacttacgaacagcattataatttctacaaggcacccaaaccgattaaccccgttattatcatcctggataatgacaccggatttaactcaatcgagacactgctgaaatctaacaaaaagaatcaggctgtcgtttacccgattggagtgcgcggagcgggttgcaggaatgccgatttcatccacgttgtgcacaacctgtatatcgttctcacaccactgggcaaggagaagtcgaccgccattgaagatctcttcactaggcccacacttgacgaaatcgtgtctggaaaaaaattcaacccaagtaacaagatggatattaccaaggagtacgggaaagagatctttgccaagaaaatagtgcttgtgaagaagggaagcatagatttttctgggtttagagtccttctatcccggattgtacagtgtatcgagcattacgacagcgtgaagtga

SEQ ID NO: 8378 - RNA, 1824 nt, synthetic construct
  source 1..1824: mol_type = other RNA
atgagaaagatcgacgccttgagagccgttcggacaaaacccgagttggcactcttgttaggcataaaggctagcgcactcacgtaccttctgtatgtcctgaagccatccacacagtatgccaggtttgagattcctaagaagtctggggggacacgaactatctttgctccgtctgagagattaaaagcagtgcagagtagtctgtcaatcctgctgcaggattgcatagaagagattaataaagccaaacctccccgagctcccaagggaaggtttgcgaagaacgaaggtaaaacccgcggccgccgagccaaacgcgtagattatgtcttcacctcaactctgagccatgggttcgtccggaagaggtccataatcactaacgctctaatgcatctgggcaagaagaacgtgctgaacatcgatatcaacaacttcttcgacagtttcaacttcgggagagtgcggggattcttcattaccaataacaattttcggctggatcctaacgttgccacggtgctcgcccaaatagcttgttacgacaataagctcccgcaaggctccccatgcagtccagtgatcactaatctgattgcacatagcctagatatcaggcttgccgctctggctaaaaaaaattcctgtacatactcccggtacgccgacgatattaccttctcaactcgaaaaaacgtgttccctatcgcgatcgctaaagacgtgtcaggctcatacgaatgtgggctggatattgagagagagattatccgtgctggctttaaactcaacgccaagaagaccagggtccaatataaggacagtaggcaggacgtcaccgggctggtagtcaatgagaaaccaaatgtgaagtctgagtattggcgcaccgtgaagtctcagtgccactccttattcaggacaggcgaattcgtgatcaataatggagcagtatctagacgaggaaccctgtttgagttggaaggtcgtctgaactttatcgaccaggtcgattactacaatagattacggcagaagttgcccctgaaccgcgagtacgctttggccgaccataaactgaacacccgcgagcttctatctggtcgtgagagaacattttcccggtttctgtactatcggcacttttacgccaacgacaagcctgttatcatttgtgaaggccagacagacaatatatacattcggtcagctattcattcgctcgccgccgcctatcctaggcttgcgaatgtcaagacgcccgtggcaccatacaaactactcattagccttttcggctacagcgagaggactaagtttttgctccagctgtacgggggagccaattacctgaaaagcttcatcgagcaatatgaacgccactacggattttatcaggcacctaagcccaagaaccccgtcataattatgtttgataacgattcagggttcggaaccacggaaaatttcctgaagggtaagtccagcgctgtggtgtatcccgtagcaagcagaggtgcgggctatcgtcacgccgaattcattcacgtgattcacaatctgtatatcgttctcacaccactcggaggcgcaaaatctactgccatcgaagaccttttcttaaagtccacactcgatgagaaagtgagcggcaagaaattcaacccagacaaaaacattgacactgcaaccgaatatggaaaagaggtgtttgcgaaaaaggttattcttgccaagaaagggtctatcgactttagtggtttttcgacaatcctgaatcgcaccgttcagtgcatagaacactacgatagcatcaagtga

SEQ ID NO: 8379 - RNA, 1827 nt, synthetic construct
  source 1..1827: mol_type = other RNA
atgcgaaaaattgacgctctccgggcagtgcggacaaaacctgaactcgctctcctattgggcatcaaggcctctgcactcacttatcttctatataagctgaagccttctacccaataccataccttcgagatccctaaaaaatctggcggtactcgcacgatccactcacccagtgaaagactgaaagcccttcagagcagtctttcaaacctgctccaggactgcatcgaggatatcaacaaagaaaagcccgccaggacgccgaaaggaagatttgccaagctgtacaagaacctgcaaggtaagcgtggcaaacacatcaattatgtctatatttccaccctcagtcatggatttgtccgggaccgcagcattatcactaatgcactaatgcacttcaggaagaagaacgtgctgaacattgacataaaagactttttcgacagctttaacttcgggcgggtaaggggcttcttcatctcgaacaagaattttcgattgaatgacgagattgctacagtgatcgcgcagattgcttgctacgataacaagctgcctcaagggagtccctgctctcctgtcatcaccaatctgattgcacacagcctggacgtgagactggccgcactcgccaagaagtattcatgtacatatagcagatacgcggatgatctgaccattagcacaagagaaaagctgtttcccccaaatatcatgaaagaagacgctggggtctatacctgcggccgggatctggtatcggagataagcagagcgggcttctccttgaaccacaagaaaacgaggatccagtacaaggatcaccgacaagatgtgaccggcctggtcgtgaataagaaaccaaacgtgaagtgtgaatactggcgcaccgtgaggtcacagtgccatctgctcttccgtacagggaaattccttactaaggtgggggacgaggtgagagatgggtccatttttgagctggaaggccgcttaaatttcatcgaccaggtagattactacaaccgcctgcgccagaaaccagccttgaatcccgagtatgccctgagtaagcatggtgttaatactagggagctcttgtccggaagagaaaccacattttcccggtttctttactaccggcatttttatgctaacgaaaagcccgtgattctttgtgagggcaagacggacaacgtgtatattaaatctgcgataaacgtgctggcggctgcttacccacgtttagccaaagccaaaacagccaactccccctacgagttattggtcagcatgtttaattacacagaacgcacccgatttttactccagctttacgggggcgcctcatacttgaaggatttcatcgaaactttcaagaagcactatggattctataaagccccaaaaccatcaaatccggtgattatcttgcttgataatgataccggcttcgacagtatctgctccctactcaagggcaaatctttcggagcagaagcctacccccctggactcgccatgaatgactgtagggacgccgagtttatacacgttggactgaacctgtacgttgttttaactccacgggtcgcagctaaacattctgctatcgaggacatgttcacaaaggcaactctgggagaggttgtgggagggaaaaccttcaatcctagcaataagatggatagctccaaggagtatgggaaagagatctttgctaagaaagtagttctggcaaaaaagggttctataaacttttccggtttcaacgtcattctgaagaggattgtgcagtgtatagagcactatgataagataaagtga

SEQ ID NO: 8380 - RNA, 1212 nt, synthetic construct
  source 1..1212: mol_type = other RNA
atgagaaaaatcgatgctctccgcgccgttaggactaagcctgagctggccagactcctgggcgtgagggcatcagagttgacgtacgtgctgtacgtactgaagcccccaacacagtatatctccttcaagattcctaaaaagtctggtggggatcggaccattcacagtccaagcgatcggctcaaggccattcagtcttccctctcagatctgctcctggattgcatagacgacataaacaagtcaaaacctggaaaaccccatttagatcgttttgtcaaagggaaaaaggagaagctgcttgatagcaagaagaaaaagccccttgagtatatctttagtcccacattgtctcacggattcgtgagaaataggtcaatcatcactaatgccatgatgcatcttcacaagaaaaacgtcctgaacgtggacttacaaaacttcttcgacagcttcaactttggtcgtgtgagggggttctttatttctaacaggcacttccagctggacgccaatgttgctaccgtaatcgctcagatagcgtgctatgacaataagctcccacagggtagtccgagcagtcctgtgatcaccaatcttatcacccactcattggacatttctcttgccaagctagcgtttgaacatagttgtacttactcgcgatatgctgatgacataacattttccacgcgagaaaagattttcccccctcagatcatgtccgaggagtcgggctcctacactgcaggcagccaactgacgcatgaaatcactaaagccgggttttctctgaatagcaagaagaatcgcattcagtataacagcagtaggcaggacgtgacaggactggtggtgaacaaaaaacccaatgtcaagtgcgaatactggcgcactgtccgcagccaatgtcatttactatttaagagcggctcctttgtcaccaaaatcaatgatgaagaggttgttggcaacatcaacaaactggaaggccgcctcaacttcatagaccaggtggactattacaaccggctgcgacaaaaaccagctttgaatccagaatacaccctgtcaaagcacgcaattaatacaagagagcttctgtccggacgggaaacaaccttctctagatttctatactaccgggccttctatgcaaacgagaaaccgaccattttgtgcgaggggtgtctgctctacacatcctga

SEQ ID NO: 8381 - RNA, 1845 nt, synthetic construct
  source 1..1845: mol_type = other RNA
atgaaaaaacttgatgcactacgcgccgcaaagacaaagcccgaactcgcgcaccttttgggagtaaaaccttcttcacttacattcttactctacaaactcaaacccagcacccagtacagttctttcgacatcccaaagaaaaacggcggctcccgtactattcatgcaccctcaaaaaagttaaagaagctgcagagttctctgtccaactacctgcaggactgtatcgatgagatcaattctgctaaaccagccttttccaacaagaagaagtttatcaagatcgacaaagatagggtattggacggcaagacgaagaattttaccgagtacaagtttatttccacgctgtctcacggcttcgtgagggagcgtagcatcataacaaacgctctgatgcacctcaacaagcgcaacgtgctaaacattgacctgaaagacttcttcgagtcttttaactttggcagagtgcgcggcttttttatctctaacaggaacttctgtcttgatcccgatattgccaccgttatcgcacagatcgcttgctatgacaacaaacttccccaaggctctccatgctcacctgtgatcactaatctgattagtcacatcctcgatatacagctggccgctcttgccaaggctaattcctgtgtctattctagatatgccgatgatatcactttcagcactcgtgaacgcgtgtttcctagtgacatcatgagcatagaggccggtgaatatatagtggggcggaagctcaggggaattataaagcgcgcgggttttagcctgaatgagaagaaaacacggattcaatacaaagactccagacaggatgtaaccggtctggtggtcaataagaagccaaatgttaaaagcgaatactggcggaccgttaaatcccagtgtcattccctgttcaagaatgggacctttacagtgaaaaagggatgtgatatagtggaaggaagcattagcgaactcgaaggtcggctgaacttcatcgaccaaattgatttgtacaatcgaaggagacagcaacctaagattaatcccgagatagctctatgcgagcccgggattaataccaggatcttgctcaacgggcgagaaaagacattctccagattcttatactactgttacttctacgctaacaaaaagcccatgataatttgcgaaggcaaaaccgataatatttatatcaagctggccatgtcaaaattggccactgactatccattactagccaagccaaagtcgagcaactcggcctacgagccacttgtcagtctgttcaagtatagtaagagaactaggtttctcttgcagctgtatggcgggacctcctacttgaaaaacttcatcgaaacctacaaaaagaactttgctttctacaaagcacctaagccctgcttccctattataattatcctggacaatgatgcgggattcaaagacattaattcctggctggacaaatcaaagtatgtgacaccgtacaacatcaacattaaggcctctgagaacaacaaatttcggtatgcagaatttatccacgttgtggagaatctgtatatcgtcctgacacctcgcgagaaccctgataagaacagcgctattgaggacctgtttaatccggagatcctgaaggaggaagtctcaggaaaaacgttcaatccgagtaatagcaaaatcgacatcactaaggagtatgggaaggagatcttcgcaaaaaaagtgattttcgccaagcgaaattcgattgactttagccggttcaaagtcctgctcgatagaatcgttaagtgcctcgaacattatgactcaaataaatga

SEQ ID NO: 8382 - RNA, 1503 nt, synthetic construct
  source 1..1503: mol_type = other RNA
atgagaaaaatcgatgcactccagaaggtcaagacgaagccggagctggctgagctgctcggcattaaggctagttccctgacatacctgctgtacgttcttaagcccagtacccagtactcctatttcgaaatcccaaagaagaatggcggccggagaaccatccatgctccgtccaagaggctgaaaaagctccagagcagcctatctaagttccttcaagactgtatagaggaaatcaacaatgagcgccccgcctcaactcacaagtctcggtttgtgaagatcaacaaagatcgcgtgcttgatgggaagaagaccaagtttatcgaacacaaatttacatctaccctgtcccacggatttgtccgggatagatctattataaccaatgccatgatgcatttgaacaagaaaaacgtcttgaatgtcgatatcgacaacttcttcgatcgattcaatttcggaagggtccggggattttttatcaagaatcgacatttcagcctcgatcccaacatcgccactgttatcgcacagattgcttgttttgataacaaattgcctcagggctctccttgttcacccgtgataaccaatctcatcacacacattctggacattaagttagccgcccttgcaaacgataatagctgcgtttatacaagatacgcggacgatatcacttttagcacacgcgagagagtgtttccaaaagagattatgcgcttagaggacggggtgtacacaccttccgaaaagtttgaacgcgtgattaagaaagcgggattcaaactcaacgagaaaaaaacgaggatccagtataaagactcgagacaagacgttactgggctggtggtaaataagaagcctagcgtaaagtccgagtactggcgtaccgtgaaatcacaatgccattcactctttaaaagtggacactttactgtgaagaaacacgacgaaattattgaggggtctatttctgaactggagggtcggctgaacttcattgatcagattgacctgtacaatcgtctccgtcagaaaccatgcataccccccgaaatcagcatccagcagcatggtattaacactagggagctgctaagtgggagggaaaaaaccttctcccgctttctgtattatcggtatttctacgcccatgacaagcctatgatactgtgcgaaggcaaaaccgacaacatctacatcaaactggccatgaacaaattggctgtagactatcctaagttggcaaagccaaaaaccgccacaagtgcttatgagccactggtgtcgttgttcaagtataataagaggacacgattccttcttcagctgtatggtggcactaattacctcaaagaattcataaccacctacaaaaaacactacttcttcatcaagcaccagagcttagtgatccaactgctactgtcatggataactaccaaggactccacgcttttaacaccatgtctcaaagagattaagagcatgtga

SEQ ID NO: 8383 - RNA, 1761 nt, synthetic construct
  source 1..1761: mol_type = other RNA
atgcgtaaagttgacgctctgagagccgtgaggacgaaaagtgaactggcccttttactgggattcaagcccgctgccttcacatatttgctctataagctgaagccgtcaactcagtatcagtccttcacaatccccaaaaaaagcgggggtactaggaccatatacgccccaagtgaacgcctgaaggcacttcagaccagtctgagcctgctcctccaggattgtagcgaggagatagagaaggcctgggtcggcggctccgattctaaaagcaccctgtctcacgggtttgtgcgtaagcgttctattatcacaaacgccatgatgcatctccacaagaagaatattctgaacgtggacttgaaagactttttcgactcttttaacttcggtagggtcagggggttctttattaccaaccgggagttctgcctcaatccagacatcgcaaccgccattgctcaaattgcctgtcacgataataagctaccccaaggctccccatgttcaccagtgatcaccaatcttatcacaaacatcctggatattcggttggccgcacttgcgcgctcgcattcctgcacctatagtaggtacgcagacgacttgacttttagtacacgcgaaaaagtcttcccttcgcagatcatgaaggaggatgttggatcttacactcccgggaagaagttaaagtccgagattaagagagctgggtttgaactgaaccataaaaagacccggattcaatatatggacagtagacaggacgtgacaggcctcatcgtaaataaaaagcctaacacacggtacgagtactggcgaacagttagaagtcaatgtcactctctgttcaagagcgggagcttcactaagaaagtggatgggaaatttatagaaggcaacatcttcgaactccagggacagctgaactttatcgaccagatagactactttaatcgattgagacagcatcctccgctcaaccctgagtatgccctctccaaccacttgatcaatacccgcaagctcttaactggtcgggaggtggtcttttcccggttcctgtattaccgccacttctacggcaatgaaacggcgacgatactttgcgagggcaaaaccgataacgtttatctgaagtcagctttgaataagctagcgctgaaatatccgcgattagcaattcccaaatctgcagcaaatccatacaagctcctagtgtcatttatgaactacacagagagaacaaggttcttactgcagctttacggcggtacctcctacctgcacgtgtttctaaacagctttgaagagcactacaagttctataacgccccaaaacctaagaatcccgtggtagtcgtgctcgacaatgattcaggcttcaattccattgatggtctgttgaaaggcaaactctcaggaacgccctatcctgacactctgtctaagtctgagtttcgaaaagctgacttcatccatgtaaccaagaatctgtacgtagttctgaatccacttggacctaagggggagttttcagccatcgaaagcctgttctcccctgctactcgcaatattaaaatcagcggaaaaagcttcaaccccgagaacaacatggataaaaacactgagtttggaaaggaaatctttgcgagcaaagtcgtcgtggctaataaggatacaatcgatttctccggattcgacgtgctgcttagcaggataaccatgtgcctggaacattacgatctgattagatga

SEQ ID NO: 8384 - RNA, 1767 nt, synthetic construct
  source 1..1767: mol_type = other RNA
atgcgtaagataaatgcacttagggctgctaaaaccaaacctgaactagcgttgttgctcggagtgaaggccactgccctgacctacgtgttatacgtcttgaagcctgatacacaatattccactttcaccattccaaaaaagtctggggggctgcgaaccatctgttcaccttctgataggctcaaaactatccagtccgctctcagcgaactcctgcaggattgccttgatgagctgactgctgttaaagttaaggagaaccacgattacaaatcaaatctgagtcatggctttctgcgaaataaaagcatcatcacaaacgccattgtacacaccggccagcgcaacgtgctgaatttggacctgaaagacttttttgacaagttcaacttcggtagagtgcgcggattcttcatatccaacaaggacttccaactaaatgaacatattgccactgttattgctcagatagcctgctatgacaacagactcccccaggggagcccatgttcgcctgtgataacaaatctgattacccacatccttgacatcaaactcgcagccctggccgagtcttattcatgtatctatagtcggtacgcagacgacatcacctttagcacaagggaacgactgttcccccccaagttaatgaaagaaattgccggagagtatatccccggtaaaaagctgcggtccgagataagaagggctggctttgagattaacgccccaaaaacaagaattcaatttcaggatagcagacaagatgtgacggggctggtggtgaacaagaagcctaatgtcaaatctgagtactggaggaccgtcaagagtcagtgccatagtctgttcaggacaggaagttttaaaaagaaggtagacggtactttcgctgatgggaatatctatgaactcgagggccagctgaactttatcgatcaggttgattactctaacagactgcgccaaaagccgcccttggacactgagtacgaacagcgcaaatccaacattaaaactagggagttactgtctgggcgtgaaaccacctttagccggttcttatactacaaatttttctacgccaacgaaaagcctacgattatctgcgaagggaaaaccgataatatttaccttaagtccgcgatcagctctttggctgcaaactacccaaagttagcgacaccaaaatcggcaaataatccctatgagctgctcgtgaagttcttcaactataacaaccgcacgagatttctactccagcttcatggcggtaccaactacctacacactttcattaacgattttgagagccactacgacttttataaggcccctcggccaaagcagcccattataataatccttgacaatgactcaggcttcaatggaatcgatggcttgctgaagggcaaagcaagcgccaagcggtatccggtcgcgaaaggaaagaagaaggactttcgcaacgcaaatttcattcacgtcgcccataatctctacatcgtgctgacgccgcccactgctacaggtggacacaccgcaatcgagtccctctttaccgcagccacactgaatgaaaaagtccagaagaagaccttcaatccagagtcaaagattaatactaccacagagtatggcaaggagatcttcgctaaaaaagtaatcctggccaacaagaagacaattaacttctccggctttgacgtgatccttaagcgggttatccagtgtatgaagcactatgaaacagccaaatga

SEQ ID NO: 8385 - RNA, 1770 nt, synthetic construct
  source 1..1770: mol_type = other RNA
atgaaaaagatctccgcattaagactggccaagacgaagcctgatctggccctgctcatggggattgacgcatctttcctcacaaatatactttatcgccttaagccaacaactcagtataccagcttcacaattccaaaaaagagtggcggcgttaggactatttacgcccccagcgatgagctgaagtccattcaatctgcactttctaatctgttgcaggactgtatacaagaaattaacacttccaaagggcctaagttcaaatcaactctaagccatgggttcgttagagacaggagtattctgaccaatgctatcatgcacctgaataaacgcaacgtactaaatatcgacctgaaggatttctttgaccagttcaacttcggcagagtgcgtggctatttcatcagcaacaagatcttccaactagatcccgctgttgccactgtgatcgcccaaattgcctgctacgacaacaagctcccccaagggagcccctgtagcccagtgataactaatctgatcacacactccctggatatccggctcgcctcacttgcgcgcgataattcctgcacctacactagatatgctgacgacatcaccatttctaccagaaaaaaggattttccctccaacctaacatcggatcgagccagtggatacgtgattggctctaggttagccgctgaaattaaacgagcgggattctcagtgaactccaccaagactcggatccagtacgaggatagtcggcaggacgtgacaggactcattgtgaataagaaactcggaactaaatctgagtactggcgcactgtcaaaagccagtgccacgcgttgtttcagacaggcaaattcttggagaactcctcaaatcctccccaggcaggctcgatattcgtgctcgaaggcaaattatctttcattgaccaggtggacttcttcaacagaaaaaggagtaagcctctgctcaatcctgaatacgagcttagtaaacatgggagcaaaaccaggaagctgctgaatggcagggagcggactttttcacgctttctcttctataaacacttctatggaaacaccaagcccacgatagtttgtgagggaaaaacagacaatgtatatctgaaggcagcaatcaataagcgggccgccgcttttccttcattggcgaaagcaaaatcaggcaacgccccatacgagctgctggtacactttatcaactacacaaaccgcacacgttttttactggagctgtacggtggcacaccctacctcaaggaatttatgctcgactacgatgaacagtttaagttttataaggcccccatgccaacccatccagtgataattatcctggacaatgacgatgggtttggaaaaatcgagggagtattgaagggtaataagtactccccgacggtctttcctgtcacccttccggtgaccgactttcgaaacgcagagttcatccacgtggtccataacctgtatatcgtcctgaccccattgaagggcaaaggtaacaagagcagtatcgaagacctgtttacaaaaaagacccgggctaccaagttaggtgggaaggtctttaacaaacagaataagaccgattccgatacggagtatggtaaggaatatttcgctagcaaagtcgttgctcctaacaagcataagatcaacttttctgggttcaatccgctgttgggacgtatagatcagtgcattcagcacttcgctaccgtgaagcttgtgaaaccatga

SEQ ID NO: 8386 - RNA, 1779 nt, synthetic construct
  source 1..1779: mol_type = other RNA
atgaagaagatcagtgcactacgtctggcaaagaccaaaccagatttagctctgctcatgggcatagatgcgagctttctgaccaacatactctataggctaaagcctactacacagtacacttcctttaccatccccaagaaatcctcgggcgtgcgcacaatctatgccccatccgatgagttgaaatccatccagtccgctctcagcacgctcctccaggactgcatacaagagataaataccagcaaaggcccaaaattcaagtcaacactgtttcacgggtttgtcagggataggtctatcctgaccaacgcaattatgcatctgaaccagcgtaacgtgctgaacatagacctgaaagactttttcgaccaatttaactttggtcgtgtgcggggttatttcatttccaacaagatctttcagcttgaccctgccattgctactgttatcgcccaaatagcttgttatgacaataaactgcctcaaggatcaccctgctctcccgtcatcacgaacttaattacccattcgctggacatccgactggcctctttggccagagacaactcttgcacatacaccagatacgcagacgacattacaatctcaacacggaagaagaccttcccaaacaatcttatgagtggacagacatccggatacattataggcagccggctggccgaagaaattaaaagggctggtttcagcgtaaattcagcgaagacacgaattcagtataaggactctagacaggatgtaactggcttggtggtgaacaaaaagccaggcactaaaagcgagtattggcgcaccgtcaaaagtcagtgtcatgcccttttccagacagggaagttcttagagaacagcagcaacccgccacaggccggtaatatttttgttcttgaaggcaaactgtctttcatcgatcagatcgatttctttaaccggaagcgcaataaggctctcttaaatcctgagtacgagctctccaagcacggaagtaaaacacgaaagctgctcaatgggagagaaaggacgttctccaagttcctgttctacaaacacttctatggcaatacgaagcccacaatattgtgcgagggaaagaccgacaatgtgtacctgaaagcggcaattaataaccgcgccactgcttttccaagcctggcaaaagctaagagtggcaatgccccatatgaactgctagtgaacttcatcaattacaccaatcggactcggtttctgctcgaattatacgggggaaccccgtatcttaaggaatttatcctcgattacgatgaacacttcaagttttacaaggcgcccatgccaacacaccctgtcatcattatcctagataatgacgatgggtttggtaaaattgaaggggccctgaaggggaagcgctacaaccccacgatcttccccattactctgcctcccacagacttcagaaacgccgagtttatccacatcgtgcataacctgtacattgttttgacccctcttaaggggaaagacactaaatcttctatcgaggatctgttcactaaaaagttgagagcaactaagctcggaggtaaggtattcaacaaagagaataaaaccgattcagacaccgagtatggaaaggagtattttgcttcaaaagtggtcacccctaataagcacaaaattaacttcagtggctttaatcctctccttggcaggattaatcagtgtatccaacatttcgccaccttgaaacccgttaagcccgtgaagccgtga

SEQ ID NO: 8387 - RNA, 1773 nt, synthetic construct
  source 1..1773: mol_type = other RNA
atgaagatgatttctgctttaagagtcgccaagacaaagccggatctggcactcctcatgggcattgacgcaagtttcttaacgaatatattgtaccggttgaaaccagccactcagtacacttcctttactattccgaagaaaagcgggggggtccgaaccatctacgcccctagcgatgaactcaagtctatccaacgtgccctgagtaatttgctccagaactgtatgcaggaaatcaacacttccaaaggaacgaagttcaaccccacactgagccacggcttcgtgaggaatcgctcaatccttaccaacgcaattatgcacctaaacaaaaagaacgttcttaacatcgatctcaacaacttttttgaccagttcaacttcggtagagtgcggggttacttcatttccaacaagaattttcagctggacccagcagtagccacagtgatcgcccagatcgcatgttatgataataagctcccacaaggatctccttgcagcccagtcataaccaatctgataacacacagcctggacatacggctggcttccctggctaaggataattcctgtacttacacccgatatgctgatgacattaccattagcacccgaagagaagcttttccaaataatcttacttcagacggagcttctggctacatcatagagtcacgcctcgcggctgaaattaaaagagcagggttttccattaaccctgcaaaaacgaggattcagtataaagactcaaggcaggacgtgaccggcctagtagtaaacaaaaagcctgccactaagtccgaatactggaggaccgtccggtcacaatgccatgccctgtttcagacaggcaagttccttgaaaacaatagcaatccgccccagaccggaaacatcttcgtgctggagggaaagcttaacttcattgatcaaatcgacctgtttaaccggaagcgtagcaagcccttgctgaaccccgagtatgaaccctccaaaaataagtcaaagacacgcaagcttctgaacgggcgcgagcgcactttcagtaggttcttgttctacaagtatttctatggaaacaccaaaccaacaataatctgcgaagggaagacggataatgtctacttaaaggccgcgattaataagagagcttccgcatttcccagtctagccaagccaaaatctgggaatgatccttacgagctgctggtgaggttcatcaattatacatcgcgaacaagatttctgctcgaactttatggaggtacaccatacctcaaagagttcattctagattatgacgagtacttcaatttctaccgggcccctgttcctactcaccctgttatcataattctcgataatgatgacgggtttggtaaaatcgagggcgccttgaaaggcaagcggtacaatccaactatcttcccctctacactgccggcgaatgactttagaaatgccgagttcatctatatcgcgcataatctgtatatcgtgctcaccccccgtaaaggcaagaccgagaaaagctcgattgaggagctgtttcccataaaaattagggccaccaaactgggcggtaaagtttttaacaaacagaacaagaccgactctgaaacagagtatggaaaggaatactttgctagtaaagtggtgactcccaacaaggacaaaatcaactttagtggcttcaatcctttgctggagcgcatcaacaagtgcatccagcattttaccaccgtgaaactggtgaagcctttatga

SEQ ID NO: 8388 - RNA, 1824 nt, synthetic construct
  source 1..1824: mol_type = other RNA
atgcggaagtccgcacgcaaaccaccgcattttccggcatggcagcagcgcgttctcaagaaaattgatgacctgagggctgctagaaccaagccggacttggccttgctgctcaagattgattcctctcacctgacaaatgtgctctataggctgcgtccagaaacccagtacaaatccttcaccatccggaaaaaatctggaggggatcggactattcacgcgccatcagacgagcttaaaagcatacagaaagcccttagcactctgctgcaggactgcgctcaggaaatagaaaaaagcaacggccctaaatttaagtctaccttagctcatggtttcgtgcgagatcgtagcattctgactaattccgtgatgcatctcaatcgcaagaatgtcctcaatatcgatttgaaagacttttttgacggtttcaactttggccgcgtgcgcggcttcttcatagctaataggaacttccaactgcaccctgaggttgccacggtaatcgcccagattgcttgctacgataataaattgccccaaggatctccctgttcccctgtaatcacaaatctcatcactcacgcgctggacatccggctggcgagcttagcaaaggacaacagttgcatttatactcgttatgccgatgacatcacaatttctagtcgcgagaaggagttcccccttaccattatggcagagggcgccagctcatatacgcccggaaagcggttgcagcttgagatcaaaagagcaggattcgaaataaatcatcccaagaccaggatccagtataaagatagtcgacaggatgtgacgggcctgatagtgaacaggaagcccggtgtgaagtccgagtattggcgcaccgtgcggtcgcaatgtcactcactctttaataccggggcttttaaggaagatgtatccggcacgcccaccgaaggaaacatctttgttctagagggaaagctgaatttcattgaccagatagacttcttcaatagaaaacggaacaaacctattctcaaccccaattatgagccttcaaaccacggcagtaacacacgaaagctactgagcggccgagaaaggaccctttcgagattcctatactacaagtacttctatggtaatgcaaagccaacagtcgtttgcgaagggcaaacagacaatatttaccttaaagccgccattaacagattagccgtcggctatcccaaattggttcggcctaaaactgtggccgctccatacgaacttttagtccagttcatcaactacaccgggagaactaagttcctgctggagctggccggcggcacagattacctgaaaaagtttgtagctgaattcggttcatacttcaagagctataaggcacccgtgcctacccgacctgtgattctcattctggataacgacgatggctttaacgccatcgagggaatcctgaaagggaacaagtacaaacctacaatctttccatctgggttagccgcgaatgacttcaggaaggctgagtttatccatgtggtccacaacctctacatcgtcctgacaccactggccaagagcggaacaaagacaagtatcgaagatctcttcccacagtccgtgagggacacgaaattgggagagaaaactttcaacaaggagaacaagatcgacataatgaaggaatacgggaaggaattttttgccactaaagtcgtgactccaaagagaaacgagatcgacttttctgggtttaatatcattctgaagagactggagcaatgtattgagcactttgcaaccatgaccctaaccaagtcatga

SEQ ID NO: 8389 - RNA, 1764 nt, synthetic construct
  source 1..1764: mol_type = other RNA
atgatttccgctctgagggatgccaagaccaagccacagcttgccctccttctgggaatcgacgcgagcttcctgactaacgtcctatacagactgaaaccgtcttcgcaatacaagtcattcacaatccctaaaaagtctgggggggtacgaactatctatgccccatcagaagagttgaaaagcttgcaacgtgcactgtccagcctgttacaggactgccagcaggaaatctacaagagcaagggcccgaaatttaaaagcaccctgtcccatggatttgtgagagaaagatctatcatgaccaacgccgtcatgcacctaaacaagaaaagtgtcctgaacatcgatcttaaggattttttcgatcagttcaacttcggaagagtgaggggattttttattagcaacaccaactttcagctggatcccgctgtagccacagtgattgcgcaaatcgcctgttatgacaataaactgccccagggaagtccatgttctcccgttatatcaaacctgataacccactcactcgatataagattagcatccctggccaaggacaacagctgcacatacactcgctatgctgatgatattactatcagcacccgagagaaggactttcccgtgaacctgatgtccgaggaggccggcgaatacagccctggcaaaaagttggagagtgagattcgccgtgctggtttcgaaatcaaccataagaaaacccggattcagtacaaagactccaggcaagacgtgaccggcctgattgtcaataaacggccaggtgtcaagtgcgaatattggcgaacagtgcgatcccagtgccacgctctctttaacaccggcgaattcatcgaaaatgagtcatctaactccgagaagggcaatgtcttcgtactggaaggccggttaaattttatcgatcagatcgactacttcaatcgcaagcggtctaagcctatcctgaatcctgagtatcaactcagtgatcatggttccaaaactcgcaggctcctttcagggcgcgagcggactttctcaaggttcttgtattacaagatgttctacgggaacgctaaaccaaccatcctttgtgagggtaaaacggataatgtgtacttgaaggctgcgctcaatcggctggctgcaggatttccaaaactggttaaacctaaaaatggtaaggatccttatgaacttcttgtccagttctttaactataccgagaggacgcgctttctactcgagctcagcggcggaacaccctacctgagagaattcattgcgtcgtttgatgagcactttaattactttaaggcccctgttcccactagaccagtgattatggttttcgataatgacgacgggttcaaggtgatagagtccgtcttaaaaggcaagaaagtaaagcccgtggtgtaccccaatacattggcagcaagtgacttccggaattctgatttcatccacgttatccataatctgtatatagtcctcactcctagagcagcagccaacggcgacacagccatagaagacctattcccccagacggtgagggacgtgaaactgggggggaaggggttcacgaaaaagaacaatattgacaaggatacagagtatggaaaagagttttttgcctctaaggttgtggtgccaaataggaacaacattgactttagtggcttcgacattttcttgaagcgtattatgcagtgtatcgaacactttgacacagtgaagctcaccaagccgtga

SEQ ID NO: 8390 - RNA, 1713 nt, synthetic construct
  source 1..1713: mol_type = other RNA
atgggcgttaatgcaagtcatctgaccaacgtcctctatagaatgaaacctgagaatttgtacaagagctttacaatcgcaaaaaaaagcgggggagttaggacaattcatgccccagtggatgagcttaagtctattcaaactgccctctccatactactacaagactgtgtccaggaaatcaataagtctaagggggataagttcacatccaccctgtcacacggcttcgtacgtgagaggtcgatacttacaaacgctgtcatgcacctatcccagaagaatgtcctcaacattgatttgaaggacttcttcgagtcattcaactttggaagagtgcgcggcttcttcatcgcgaataaaaactttcagctggacccagctgtggccactgtaattgctcagattgcgtgctatgacaacaagctgccccagggaagtccatgttcacccgttataaccaatcttatcacccacagcctggacatccgattagcaagcctggccaaagagaactcttgcacatactccaggtatgcagacgatattaccataagtacccggaagaaggagtttccctctaacctgatgactgacggtcagcaaggctacagccctggaaagcgcctgcaatcggagatcaaaagagctggcttcgagattaatcgatccaaaacacgtatccaatataaagactcaaggcaggacgtaaccggtctgattgtcaatactaagctggccgtgaagaaggaatactggcggactgtgcgctcccagtgtcattcattgtttcagacaggcgcatttaaggaaaacgcctctgggacccccgaggaggggaatatttttgcgttggaaggtcggctgaactttatcgatcagatcgacctctttaaccgcaagcgcaataaaactgcccctgccctggatcatgatagcagccagaagaagtacaacacaaggagattgttgtccaatagagaacggaccttctccaggttcctctactataaactgttctacgggaacgccaagccgacgatagtgtgcgagggaaaaaccgacaatatctacctgaaatctgctatcggaagattagctggcgcttatcctaacttggccaagccgaaaagtgggaacgatccatatgaactcctcgtccggttcgttaagtacaccgagcgaacaaggttccttctagagttaagcggtggcacgccatatctgaaagaatttatccttggctttgacgaacacttcaaatactataaagcgcccgcacccaagcagccagtgattcttgtgttcgataatgatgatggatttgggaaaattgagggggtgctgaaaggtaaaaaatatagccccaccatcttccctacaactctcccgactgatgcctttcgcaaggctgaattcatccacgtcgcccacaatctctacatcgtgctcactccattaaaagaaaaaggggagcatacgagtattgaagacctgtttcctcaggctgtgcgggacattaagctgggcggcaaaaagtttaacaaggagaacgagatcgatattgatatcgaatacggaaaggagtactttgccaagaaggttgtgcttcccaataagaatgacatcgacttctctggctttaacatcatactgaccagaatggtgcagtgcatagaacacttcgcaacactgaccctgacgaagccttga

SEQ ID NO: 8391 - RNA, 1770 nt, synthetic construct
  source 1..1770: mol_type = other RNA
atgctgaaaattgatgccctcagacaaatcaaaaccaaaccagaactggccctgctgttaggcatcaacgcatctcaccttacaaatgtcctctacataaagcgcctggagactcagtactcttcattcacaattccaaagaagtccggcggagtgagaactatatacgccccatcagacgaactaaagagcatacaagctgcactaagtcatctccttcaggactgtatccaagagattcgaaattccaaaggtgaagtgtccaagagtacattgtctcacgggttcgtgcggggccgctccattatcacgaacgctgtcatgcaccttcgccagaaaaacgttctcaacttggacctcaaggatttctttgaaggtttcaattttggacgggtaaggggctttttcattgcgaacaaagactttcagcttgaccccgtaatcgcgaccgtgatcgcccagatagcttgttttaacaataaattaccccagggatcaccctgcagtcccgtgattaccaacctgattacccattcactggacatccgacttgcatcactcgccaagaagaattcttgtcgatatagccggtatgccgatgaccttactatttctaccagaaaaaaggatttcccgtctaatctcatggccgagggcgtctctggctatagccctggcaaaaaactccaggctgagataaagcgagcagggttcgaaatcaacagctctaagaccaggatccagtataaggatagccgccaggacgttacagggttagtagtgaataagaaaccagccataaagagtgagtattggcgcaccgttaggagccagtgccatgccttgtttcagacaggggcgttcatcgaatccactagcggaacgcctgaggatggtaatattttcgttctggagggcaggttgaatttcatcgaccagatcgatctctttaacaggaaacggaaccgtttcgacttcgtgtcagaatgggattcctcccagaaaaaaatcaatacccggagattgctgagcgggcgtgaacgtaccttcagcagatttctatattacaagctgttctacggtaatagtaagcctacggtggtctgcgaaggaaaaactgataacgtctacctgagatgtgccatggcccaaagggctaacgggtttccagaactctttaagtcaaaagcaggtgatgaacctagcgagctgctggtgcagtttgtgaagtacactgaacggactagatttctgctggagctggcaggcggcacatcctacctcaaggagttcattctgaatttcgacgagcatttcaagtattacaaggcaccagcgcccacgcaccctgtcatcatagtgctggacaatgatgatggatttggaaagattgagggggtgttgaactccaaaaaattcaaggccgttagttttcccgctacactggagggcggaagcttccgccaagccgagtttatccacgtggtacacaatctttatatcgtgttaacacctctacaaggtaagggggagcacacctcgattgaggacctgttcccccaggccgtgagggacattaagctgggagagaaaaagttttccaagaaaaacgagatcgacgcagctacccagtacggcaaggaattctttgcttctaaagttatcactccgaacaagaatacaattgattttagcgggtttgatatcattctgtcgcggatggtcaactgcatcaaacatttcgctagtgtcgacttggctaagtcctga

SEQ ID NO: 8392 - RNA, 1761 nt, synthetic construct
  source 1..1761: mol_type = other RNA
atgtctaagctggaggcgttgcgtaaaatcaaaactaagcatgaactggcaaccctgctaggaatcaagacttccgtgctgacgtacaccttgtatgtgttgaaaccagacacacagtactccagttttacactgaaaaaacgatctgggggtgaaaggacaatcttcgcaccatcagaacggctcaagtccatccagtccaccctttctgagctgctgcaggattgcagggacgagattaacaacaagaagcaggacgatggtaaattcaattccaccttatcccacggctttgttcgccggcattccatcattactaactcaatgatgcacctgaaccagaaaaacgtgcttaatatcgacctcgaaaattttttcgactgcttcaatttcggacgagtgcgtggctttttcatcgccaataacaatttcaagctcgatcctcatatagctaccgtcatcgcccaaattgcctgccacaacaacaaactaccacaaggctcaccatgcagtcccacaattagcaacctcattactcattctcttgacattcaacttgccaatctggcaagaacatattcgtgtaggtatacaaggtatgccgatgacatcaccattagtacacgcgagaacttatttccgaggaaaataatgagacacgaggacggtaagtttattgccggaaagcggctaaggcgcgagataaaaagagctggctttaccattaacgagaagaaaacacgaatacaatacagagattcaagacaggatgttacaggcctggtcgtgaataagaagcctaacattaagtccgaatattggagaacggtcaagtcccagtgtcacgctttgtttagtacggggagcttcaaagataaggaaaatggggagttcattgacggcaacgagaaaatcctggagggccggctcaatttcattgatcagattgaccggttcaaccgactgcgccagaagacacccctgaatcccgattacgccttagctaagtatggatacgacacctctaagcagctctctggtagggagagaacattcagccgttttctctactacaggttcttttatggcaacaaattccccactattctgtgtgaagggaagaccgataacgtttatcttaaatgtgccatccatatgctgaccagtggatatcctcaattagctaaggaaaagaccgaaactgagccttacaagctgcttttgaccttcctcaagtacactaagcgcacccggtttctgttgcagctgcacggaggcacaagctacctgagcttctttataaacagcttcgacaagcattacaacttctataaagcacccaagccaaacaatcccgctatcatcatagcagacaatgactcggggttttcatcaatcgagtctaagctgcgcaaaatcgacagcgccaaaggatatcatgggaagaaagcagggaaaaattacagacaggccgagttcatccacgtagtccacaacctctacatcgtgctcacccctaccacgaagacgaataaggagactgctatcgaagatttgtttgatagtagcactcgcaagattcaggtaagcggcaaatcttttaatccgtcaaacgacatgaacaacgatactgagtacggtaaggaagtgtttgccaaaaaagtcatacaggctcagaaaggaagcatcaatttcaatgggtttaagcctcttctgaatcggattgtggcggcaatgaatcactacgatgcgatcaaatga

SEQ ID NO: 8393 - RNA, 1764 nt, synthetic construct
  source 1..1764: mol_type = other RNA
atgtctaaactcgaagcacttaacaaaagtacctctaaacctcagctggctgcattgttaggggtcaaggctcagttcctcactcacgtcctgtatcggttaaagccagccactcagtacacaaattttacaatacccaagaagtcgggtggcacccgaaccatctttgctccctcagaaaagcttaagagccttcagtctagtttgagcactcttctgctggactgcattgatgagattaacgaggcaaacaccgtgaagtatacatataaacacgcactgtcccacgggttcgtcagagaatgcagtattatgaccaacgctgtgatgcacttgaaccagaaaaatgtgctgaatatcgacctcaaggacttcttcgattcctttaacttcggaagagtgagagggttcttcatcaagaataaccactttaagctggacccacacatcgccacggttatcgcccaaatcgcgtgctacgataataagttaccccagggctcaccttgttccccagtgatcacaaacctcataactcatcctctggacattaaattggctagtctcgcgcgaaagcattcatgtatctattcacgctacgcagacgacatgaccttcagcacaaggaaggcagtatttccttctcaaattatgcgccaggagcatggtaagttcataaccggcaaaaagctgaaaaatgagattaaacgggctggattttttatcaatgacaaaaagacccggattcagtataaagattctcgacaggatgtcaccggcctaatagttaatgtgaagccgaacgtgaagaaggagtactggcgtacagttaagtcccaatgtaacaggctcttccacactggcgcatttattaaaaagacagctgccggagacatagatgggaatattaatgaactagagggccagctgaacttcatcgatcaagtagataggttcaaccgcagtagaaagaaacctccactgaaccatacctacaaactcgataatcacggtattaataagacacctctgctgtctggcagagaaaagacattctccaagtttctctattaccggctgttttacgggaacaccaagcctacgatcctctgtgagggaaagacggataacatttatctgaaaagcgccatcagtatcttagtaaagaagtatccaaacctagcctcaactaagactaataaagcggcctacgaattacttattcgccttgtgaaatacagcaaacgcacgcgtttcctgctcgggctgtatggcggtgcttcgtacttgtcctactttacctctaagtttgacaaacagtacgtcttgtacaatgaggctcccaaaccacagcatcccgtgatcataatcctcgacaacgattccgggagcacaagcgtcaaaaagcagttcgagaagattaacagcgccacagcatatcccgctactctgcccaagaaagattacaaaaacgcggacttcatccatgtgacccacaatctatatatcgtgttgaccccactgactactaaaggaaatgacaccgacatagaatactttttcgatgatcccacaaggctgaagcagcataacgacaaatgctttaatactgccgacaaacgggatgacaaggccgatctgagcaaagaggcctttgccaagaacattatcaaggcccaaaagggctcaatcaatttcgatggatttaaaccgctgcttgacaggattgtggccgttattacgcactatgactccatcaaatga

SEQ ID NO: 8394 - RNA, 1764 nt, synthetic construct
  source 1..1764: mol_type = other RNA
atgtcaaagcttgaagccctcaagcaaatcacaactaagccacgactagcggcgttacttggagtaaaggtgcagacactgacacacgtgctatacattttgaagccctccactcagtataccggcttcaccattcctaagaaaaatggcggtactcgctccattttaagcccttcagataaacttaagtctctacagtcctcactctctaacctgttgctggattgcatcgatgagataaacgagactaagcataagaagaattaccgttacaaacatgctcttagccatggctttgttagagagtgttccattatgaccaatgctcttatgcacctcaacaagaagaacgtgcttaacattgatctcaaagacttctttgacagcttcaattttggacgcgtacgcgggttcttcatcaagaacaatcacttcaagttggacccccacatcgccaccgtgatcgcacagatcgcctgctacgagaataaactgccccaaggtagtccatgctccccagttatcacaaacttgataacgcattctttagatatcaggctggcatccctcgcaaagaaatactcctgcacatattccaggtatgccgacgacatgacatttagtacccgagagagcgtgtttccccggcaaattatggggcaggaagagggacagttcattatcggcaaggaactaaagagcgaaattgaaagagccggattttcgatccatgacaaaaaaactaggatacagtacaaggatagtcggcaggacgtaaccggcctgattgtcaataagaagccaaacgtgaaaaaggagtattggagaacagtgaaaagccagtgtcatctgctctttcagaccggtgctttcataaaaaagaccgtcaatggagacgtggagggcaacattaacgaactgaacgggcagctgaatttcatcgatcaggtggatcgctttaacagaagcagggagaagccacctctcaatccaatttaccagttgcaaaatcacgggcagaataccacgtctctccttagtggaagggagaagacattctcccaattcctgttctatcgtttattctacgcaaatatcaagcccactatactgtgcgaagggaaaaccgacaacatttatctgaagagcgtcatctcaatactggcagagcattatccaaaactggctaaccctaagactaaaaagaacccttatgaactgctgattcagttcgtggagtactcaaaacggagtagatttttgctccagctctatggcggcgcatcctatcttaactactttgtgagtcagtttgacaaacactaccggcactacaaggcccctacaccccaacagcctgtgatcattgtcctggataacgattcaggtagctcatctatcgtgaccaaactgaaagctctggactcggttaaagcctatcccgccacggtcaaaaaggaggactgtgctaaagcagatttcatccacgtcgttcataatttgtacatcgttctgactccgctgaatgctaagaatgaaccgacagacatagaatctctctttgacgacagtatccggctgaagcagcacgacgggaagtgttttaacactcgagataaacgcgacgagaaagtcgatctgtctaaagatgccttcgcgaaccacattattaacgcccaaaagaatacgctcaattttgacaccttgaaacccctgctggatagggtagtggccgctatctctcactacgatagcatcaaatga

SEQ ID NO: 8395 - RNA, 1755 nt, synthetic construct
  source 1..1755: mol_type = other RNA
atgaataaattggagcggctcaagaaaatcacaaccaagccagccctggctaatttactggaagtgaacccgagtttcctgactcacgttctgtacatccttaaacccaacacccagtataccacgttcaccattccaaagaaatcagggggcatccggaccatcaaagccccctcagtaaaactgaagagcctgcagtcaaacttaagcaagctcctgctggactgcattgatgaaattaacaagagtaagtccctggaagagaaaaattacaagcagacactcagccacggcttcgttaggaaacgctctatcatgactaacgctttgatgcatctgaaccagaagaatgtcttgaatattgacctgaaggacttctttgactctttcaactttggccgagtgcgcgggttctttattaagaaccacaactttcagttggaccctgcaatagccactgtgatagctcagatcgcctgcgatgataataaactccctcagggttccccctgtagcccggttattacaaatcttatcactcattcgttggacataaaacttgcgtctttggcccggaaacatagctgcatctacagtagatatgccgatgacatgacttttagcactcgcaagtctgtattcccacaacagataatttgtcaggagggagatcatttcgtgacaggtaagaatatgaactccgagattgtcagggccgggttcagcatcaacgagaataaaacccgcattcagtataaggatagtcgtcaagatgtcaccggcctgattgtaaataagaaaccgaatgtcaagaaggaatattggcgaaccgtgaaatctcagtgccactctctgttccgaactggcacctttacgaaaaaaacagcagcaggtgtggtcgccggcaacataaaggagctggaggggcagcttaattttatcgaccaagtcgacagattcaatcgccctagacagaaagctcccctgaatccaatttaccaatacaaaaactacgggaatgataagactcccctgctctccggacgggagaagacattcagcaagtttctctactaccgtctcttctatggaaacacgaagccaactatcctgtgtgaaggcaagacagacaacacatatcttaagagcgcaatctccattctcgcagggtcatatccaatcctggcttcagcgaaaacgagaggcagcgcatatgagctcctgatcaggacagttaaatactctaaacgtacccggtttctccttggactatatggtggagccccctacttgtgttccttcataaaggctttcgagaaacattacaagttccacaaggcgtcgaaacctaaatgtcctgtggtgattgtgctggataacgattccggctttaagaactttcccaagatcttaaagggaattaagagtgccacccctcatcccacaacattagagtccgatgactacaggaacgcagaattcatacacgtgattcataacctgtatatcgtgctaactcctctgagatctaagggggaagaaaccgatatcgagtacctgtttgacgatgctacgcggctaaagcaacactcaggcaagtgctttaacatcgtggataaaaggaatgacgaaaccgacctttccaaggacgcttttgccaaacacataatcaaagcccagaaggctagtatcaactttgacggattaagaccactactcgacaggattacctcagccatcaatcactataattga

SEQ ID NO: 8396 - RNA, 1806 nt, synthetic construct
  source 1..1806: mol_type = other RNA
atgaaaaatctgagagccttgaaagatatcaggacaaagcccgagctcgctaagctgcttgacgtcacaccacagaatttgacgtatacactatacaagatcgggcggaaaaacctttacatctcatttgacatcccgaaaaggaacggaggtatcaggactatatacgctccagtctgcaatcttaagctgatacagtcaagattgagcaatctactgcaggactgcatcgatgaaattaacaacaagccaaataagtcctccaagctggcccatgggtttgtgcgtaagggctctatcattactaacgctaatgtgcacaagaaccagaaatatgtgcttaacattgacctgtctaacttctttgattcatttaacttcggtcgcgtgcgggggtttttcattaagaatcgaaacttcgaactggatcctcacattgccaccgtgctggcaaatatcgcctgcttcaacaataagttgccccaaggaagtccctgtagtcctgtcattaccaatctgattactcactccctggatataagacttgcctccttagctaaaaaaaactcttgtagctactctcgctatgctgacgatattaccattagcacacgcaaagcggtctttcctaaccagattatggaacagcacgaaaatggtaaatatctcgctggaaaaaagctgactcatgaaattacgagggccggctttagcattaacgaaaagaagacacgaatccaacaccaatacagcaagcaggacgtgaccggactgacagttaacaaaaagctgaacgtgaagaagatctattggcgtactgtccggtcacagtgttaccagctcttttgtaccggtactttttacaaaaccacttataaaggccgcgaacagggcaatatcaatgagttagagggccagctgaacttcattgaccaggtggatcatttcaaccggatccgaaagacctataataagaatctccataacagccatcatagaaagattggcaactcgcgggaacgcctcttcggcagattcctattctttaggagcttttatgggaattcccagcccaccatcctctgtgaagggaagactgatataatctacctcaagtcagccataaaaatcctcgctacagacttcccgaacttagcaagaaataatccaaaaaaaggcggctacaagctcctaatccggttcatcaagaatagtaacaggacgaatttctttatggacctgccaaaagatggggggtacggatgcctggtaaccttcatgaagaaattcaacgagaactctctgggttacaaagccccttccccccaacaccctgtgataattgttgtagacaacgacaagggatttgataattttacgactgcgattaaccaaacaaagaaggagtactcccgcaagaataaaagtaccatcaatcccagcaacccaaccgaggagaaggattaccgtaaaaagggattcatccacgttatccgaaatctgtatgttgtccttacacctttaagagacggcgagtctgcctctgacattgaggccctgtttgatgaggacacaaggttgaaaaaacacgagggcagatgcttcaatacagtactgaacaggaatgacaaggatgatttgagtaagaacgcattcgccacccatataataaagaaacagaagacctccatcaacttctcgaattttaaatgcctccttaatcggatttcaggggcaatcgaccactatgcagagaacggaagcgtggcaaaaagtgtgaaaaccgactatatcttggttctgtga

SEQ ID NO: 8397 - RNA, 1776 nt, synthetic construct
  source 1..1776: mol_type = other RNA
atgtcaaaactaaccaccctgaaatctatcacgacaaagaaggagctggcagacctgctggagataaaacgctccaacctgacctatacgctgtacgttctaaaaccgtcaacccagtatttccagtttcagatacccaaaaagaacggcggattccggaccatcgatgctcccgctaagcggctgaaagatatacagtcaaaactgagcgacctgttcctcgactgcattgacgaaatcaataaaggtaaggagaaaaatcagcataacgagaaacacggcatacacacctatcccatgttatcccacgggttctctaggaagaagtcaatcatcacaaatgccctgatgcacatcaacaacaagaacgtcctaaatctggatcttgacgacttctttgattcatttaactttggacgtgtgagaggcttcttcattaagaacagaaattttgagctccatcccgacatcgctacagttatcgcgcaaattgcatgctataataacaaacttccacaagggtccccctgctccccggtgataactaatctcattacacacagcctggacatcaaacttgccagtcttgcccggaaatattcctgtacatatagccgttacgccgatgatattactttttctacacgcgaagaagtgtttcctcggcagctgatggctgaagagaagggcaagtacactcccgggaaacgacttaggagagagattgagtcgtctggtttcacaatcaatagtaagaaaaccaggatccagtacaaggatagtcgtcaggacgttacaggattgattgtcaataagaagccaaacatcaaaaaggaatactggcggacagctaagagccaatgtcacagccttttccgcactggaacgttctacaagctcacggaccagggcatggccataggcaacattaacgagctcgagggccagctgaactttatcgatcaggtcgacttttttaatcggctgcgccaaaagccaccactaaatcctctgtacaagttagagaatcaccgaaaaaatacctctaatctgttaaccggtcgagaaaagacctttagtaggttccttttttaccgctacttctatggtaacaataagcctacaatcttgtgtgagggcaagaccgataatgtatatttgaagtccgccatcaacgtgctgcaagaccattaccctaggctcgccaaaagcaaatccaaacacggagaatacaaacctatcgtgcatttcttcaactactctaagcgcactagattcctgttagaaatcttcggcggggcagattatttgaaagggtttgtcgaaaactaccagaagaactatagcttttacaaggcgcccaagccaaagaacccggtgattttgctcctcgacaatgatagtgggagcaatggaattatcaacctgataaaaggactgaggactaccaccattcatccatccactaccaagaaaaatgatatcaagaacgccgactttattcatatcatgcacaatctctacctgattctcactcccttgaacggcagcagtgacacggcaattgaggatctctttgacgccactaccaagtcgattaaagtggggggaaagtctttcaaccctggtaagcctgacacttcaaaggagtatggcaaagagattttcgctaatagagtggtaaaggaaaagaagaatagcatcaactttgatgggttcaaaccattgttaaacagaatctccgcagtcatagaacattattctaaacacacatga

SEQ ID NO: 8398 - RNA, 1800 nt, synthetic construct
  source 1..1800: mol_type = other RNA
atgtctatcctaatcaatctgcagaatgcaaagacaaagaaagacctggcagccatcctggatatcaatacgtcaaccctcaccaatgccctctacaggaaaaaagtctctagtctgtacacagagtttaagatacccaagaaaaaggggggcgaaaggataatctacgcgccccagcgagagttgaagatcatccaaaagaaactgtctcttattttgcaggactgtctcgaagaaataacctccaacgatgaaaagatctccaacctcagtcatggatttatgagggagaagagcatttatactaatgcgacccatcacaagaacaagaaaaatgtcctgaacatagaccttaaggacttcttcgattgtttcaattttggcagggtcagaggattcttcattaagaacaagaacttcgaactgcaccaggacattgccaccgtaattgctcagattgcctgttataacaacagcctcccacagggctccccatgctctccgattatctcaaacttaatcactcattcactggacattaaattgtcacaattagcctcccgctatagctgcttctacactcgctatgctgacgatattactttcagtactcgggagtgcatctttccaacccccttagcccggattgagaacaatgaatatgtgatcgggaaaaagctaagacaagaaattactcggtccggctttgagataaatacaataaaaacccggatccagtacttgtcttcgagacaggacgtgacaggattgatcgtcaacaagaaggttaacgtgaaaaaggaatactggaagtccgtgcgggctaaatgcgacttcctgtttaagaacggatattactacgtgctagacgacactggaaaggagataaaaggctcactcagccagctctatggccagctgaatttcattgaccaaattgactacctgaacaagctgaaaaagccaattgagataaatccgctttacatactggcgaaacacggtaacaataaaacccctttgttcagttctcgcgaacgagtgtttagccactttctcttctataaaagcttctacggaaatgagaacacgaccgttatctgcgaagggaagaccgatattatctacatccgctgtgctatcaaatcactttacaaatcttacccatctctggttgataaggatgggatcatcaaattcgatttcttcaagtatacccgaagaactaggtatcttctgtccttgcatggtggtaccacctatatcgccgactttattaagaattaccgtcagtactacagcctgtataaatcggctaaacccacaaagcccgtgatcataatcctggataatgataaaggccttggggatatcatcggaggcctgcaaaaggagagaaaacctcgtctggtaacagcagacggggaaacgactcttaatggcatcaactccctcaagaagagcctgtacgtgcatgtgtgttttaatctctatctgctgattgtccctcacctgaaccagaaggagacgagcattgaaagtttatttgacaagagtgtcctcgatacaaaactaaacgggaagtccttcaccacagagaacgagtttagtcacgagaaattctatggcaaacacgtttttgctacagccgtgattgagaataacaagcacaaagtggactttagcggttttaaccagatctttaaggcaattgagaaaatccaggatgattataaggatgtacagaagaatacagcaaagccccctattaaaggttccacaattaatgccactccttga

SEQ ID NO: 8399 - RNA, 1248 nt, synthetic construct
  source 1..1248: mol_type = other RNA
atggcggagatcctggacattaacacaagcaccctgaccaatgcgttgtaccggaaaaaggtgtcctctctgtacagcgaatttaagatcccaaagaaaaaaggaggagaacgcactatttttgccccgcagagagagcttaagatcatccagaagaaactcagcctgattctgcaggactgtcttgaggaaatgaccagtgaggacgagcggacccctaatctaagtcatgggtttatgcgagaaaaatctatatacacgaacgcttcctgccacaagaacaagaagaatgtgctgaacattgacctgaaagactttttcgattcgttcaattttggtcgggtcaggggtttcttcatcaagaacaagaagttcgaattacatcccgacattgcaacagtgattgctcagatagcctgttataataactcccttccccagggaagtccctgctcccctataatctccaacttgattacccactcattggatatccgattatctcaattggctagcaggcactcttgcttttacacccgctacgcagacgatatcacattctctaccagggagtatatctttcctacctcactggcaagaattgaaaatgacgattacgtcattggcaaaaaactgagacaggaaatcaggcgcagtgggttcgagatcaatagcatcaaaactaggatacagtaccatacatctagacaagatgtcactggtctaattgtgaacaagaaagtgaacgtgagaaaggagtattggaaggacgttagagctaaatgcgagtctctcttccgtacaggcacttactatatactggatgacaacgaaaaagccaagcccggaacgctgtcccagctctatggccaactcaactttatcgatcagattgattactcgaacaaaattcgcaagccaataaaaacaaacccgctgtacgttctggccaaacacggatcaaataaggcacctctattttccagccgggagaagaccttcagccggttcctcttctataaaaatttctatggcaacgagaagactactatcatctgtgagggcaagacagatatcatttacctcaggtgtgccatcaaatcactccataatcttcacccatcactggtagacaaggatgggctcgccaattttgagttctttaagtatacgcgccgaactaagtatctgctgagtttgaatggcgggaccccatacctgtccgactttagccgtgaacttttatga

SEQ ID NO: 8400 - RNA, 1833 nt, synthetic construct
  source 1..1833: mol_type = other RNA
atgctggcagacaaacttgacagcttgaagaacatcaaaaccaagagggagcttgctattctgctgggggtcaaacctagctttctaacacataccttatacattcgaaagcctgaaaattgctattcagagtttgagattcccaaaaagaaggggggctaccgtaagatcaaggccccaaaccctcagctgaaatcgctccaatctaagctgtccgttctgctcctggactgcatggatattatcaagagtatcaatttccccaacgtgattagccacaaacggttgagtgtgtcccgcaatcatctcaagatcaaagtaccaggaagcccacgcaaggaatcaactttatcccatggctttgagagaaaccgtagtatactgacaaatgcggtgatgcataccaatcagaagaacatccttaacatagatctgaaggactatttcgattcctttaatttcgggagagttaggggctttttcataaaaaacaggaacttccaactgcacagcgatatcgctaccgtgattgcccagatcgcctgttttgaggataagcttccgcagggctctccatgttcccctgttatcaccaatctaattacacactctttagacattcgactagcatccctgtctaagaagcactcatgtacttacacacggtacgcagacgatatctctatttcaactcggaagaaaacatttcctgcaaagattgccaaagaggttaacggtgaatatgtcctcgggaagaagcttcgtcaagagataaagcgcagcggcttcaaaatcaataatacgaaaactcgcatccagtataaggactctaggcaagacgtcacaggtcttgtggtgaacaacaagcccaatgtgaaaaaggagtattggagaactgtgcgctcccagtgccatagcctgtttcacaccggggaattcacccagagaaattcagacggagagctggaagaaggcaacatcaatcggcttgaaggcaaactgaatttcattgaccaggtcgatagatacaaccgaatgaggcagaaagagaagatcaatcacttgtacgccctcagcaactacggacacaaaatgagtccttattggtccggcagagagaaaacattcagtaggtttatcttctatcggctcttctattctaacgtgaaaccgactatcctgtgcgaaggtaaaacagataatgtatacctgaaggcagctataaatgaactcgttaaagactatcccaagctggcctctcccccgacgaaggatgaacggtataatttactggtccgattcgtggaacatacgaagcggaccaaattcttgttggagctctcaggaggcagctcgtacatcagcttttttatcggtaattacaagtcccgctatggattttataaagcgccaaaagacaacgctcccgtcatcctcgtgctcgacaacgacagtgggttcgactgtatagagaagaagatcaacaaaatcgattccgtccagatttaccctactaccctgaagaaagacaaattaagggaggccgagttcatacacattacggaaaacttgtacattgtactgacaccaatcagtgccaccgctaaaaaaactgatatggagtccctctttgatgataagaccaggctgattaaatacgacaataagtgcttcaacaccatagacaagagagacgaggataaggacctctcaaaagatagctttagccggcacgtgatcaaaaaccagaagacctctattaatttcgatggataccgccccctattggatagactgaacaaggtgattgaacattacgacaagctgaagtga

SEQ ID NO: 8401 - RNA, 1767 nt, synthetic construct
  source 1..1767: mol_type = other RNA
atggatactatcacgaaactgaagaattgccgctcaaaaattgatctggctctccttttaaactgtaaaccgagccacttgacatacttactatataagcagtccccctctcaaaaatacacccagttctctgtcaacaaaaaaaacggcggtatcaggaatatatctgctcctattagccagctgaaggagctccaaagcaatttgtcgcatctgctgctcgactgtattgacgatattaacgccacaaagagtatgaagtctaccctaagccatgggtttgtgcgcgaaaaaagtatcattaccaacgctgaaatgcataagaacaccaagaatgtgctgaatatcgacctagaaaattttttcgcaagcttcaacttcgggcgtgttcggggcttttttatatcgaataacaacttcctgctgaataaggacatcgccactgttatcgctcaaattgcgtgtcacaataatgagcttccgcagggctcaccctgcagtcctgtcatcacaaacctcattacccattctcttgatattagattggcaaacctcgcaaaaaagtatagctgcacctatagccgatacgctgacgacatcacctttagtacacgaaagacacaattccctaaagagattatgtgcgagcgcgaaaacgtatttaccccatcaagaaggttaaatggtgagattatccgtgcaggattcaaaattaatcctaagaagactcggatccagtataaggactcaagacaagacgtgaccggcctgatcgtcaataaaaagatcggcgtgaagaaagaatatcggcagataacgaagtccatgtgtaatagtctttttcactccggaggttttacaaagcttgtggatggaaaacacgagaaggggtccattgaagagctcgagggacgactcaacttcattgactccatagacctgtacaatcggctgacctttccagagaagcttagcatacactacccccatgtaaagcacgggattaaaactaaaaaactgctgacgggccgcgagagaactctatccaagtttctgttctataagaacttcttcgccaatgagaaaccaaagatcttgtgtgaaggcaaaactgataacatctatctgatggccgcgctgaataatttgtcaagtaactaccccagcttagcatcccctgccacagccacaaagctctttgagcccttggtttctttcctcaactatagcaaaaggactaagtttctgctcgagctcgccggcggtacgtcatacctggtgggcttcatactggattatcacaaatactactccttttacaaggccgagaagtctaataacccggtgattatcatacttgataacgatgatggcctgggtgaagttatcaaggctatcgccaaaatcaagacctgcgtggtggaggcaccagtcatagctgggcagaatatcaacgaccaggtcaaatcctctaggttcgttcatgtgtgccacaatctttacctcgtaatcacacccctggatcaggggaaagacacaatgatcgagaacttattcgaaccacagctgtgggcgaccccaattaaggggcggaccttcgatcctactgaaaaaaaaaagcccactgacaactactatggaaagaacattttcgccacagaagtggtgaaccccaagaaaggacagatcaactttgacggattcaagccactgtttgacagaatggtcgaggtcttggaacactacaaggtgaataggcagccttga

SEQ ID NO: 8402 - RNA, 1749 nt, synthetic construct
  source 1..1749: mol_type = other RNA
atgaactctataacccagttgaagaactgcaatacgcgtgtggacctcgctcttcttctgaaagtgaagcctgccgttctgacttttacgttatataagaaaggcccacagaataactataccagttttaacatcccgaaaaagaatggcggggttagaaccattaacgccccaattggtaagctgaaaactctgcagacaaacctgagcaaactcctactggattgtatcgacgacatcaataaagagcgcgggtttaactcagggctggcacacggctttgttcgtgaacggtcaattataacaaatgcgatcatgcacaagaatagcaagaacgtactgaatatcgatcttgataatttcttcggttccttcaacttcggccgcgtgaggggttttttccagaagaacaggaactttcttctcaacgatgaggtggctacaacaatcgcacagatcgcatgttgtaacaatgaactgcctcaaggaagcccctgctctcccgtgattaccaacctgatcacgcactcattggacattcaactgttgaagctcgcgaataagtactcctgcacttactctcgatatgccgacgatattaccttttccactcgaaaatccaagttccctcccgaaatcatggtggagaacaacggcgtgtataacccaagtaaacgcctgaagcatgaaatcaaacgggctgatttcaaaattaacgacaagaagactaggatccagtacagagattctcggcaggacgtcaccggtttgattgtcaacaagaagattggagtgaaaaaggaatacagacgcacaactaagagcatgtgtaatagtttgttccatacaggctcctacaccaagatagtcaatgacaaacacgtagctggaacaatcaatgaactggaggggagactcaatttcatagacagtatcgacctgtacaaccggattaactatcctgagaaacttagtatccattacacccatcggaattatggatataagacgagagcgctgctgactggcagggaaaagacctttagcaaattcctattctacaagtggtttttcgctccatcaaaacccacaatcctgtgcgagggaaagaccgacaatatttaccttaagagcgctattttccaactagccgcacattatccaaaattggtgaaagctacaccatttgagcacctggtaaattatttctcatacaacaagcgttccaggtttctcctggagctctctggagggacatcttacctagccggcttcatctcctcctattccgatcactacagcttatactcggccccaaaatctggccagcccatcataattatcttagacaatgacagcggattaaatgatattatctctgccctcgccaagatcgacacctgcactgtctacccgatcgataaagccacgggcaatataaaagaagatataaagaccgctgactttatacacgtggtccacaatctttacatagtgctcacacctctcaacgggaaaaatgacagtatgattgaaaacctcttcaatcccgcactgtggagcacccctattcagggaaggacttttgatcccaccgagaagagaacccccaagaactcattttatgggaagaacactttcgccactgaggttattaaacgccaaaaagccaccatcgatttctcggggtttcaccctttgtttgagcgaatgacactggcaatcacacattatgagggtattcggtga

SEQ ID NO: 8403 - RNA, 1767 nt, synthetic construct
  source 1..1767: mol_type = other RNA
atgaatagcattgagaagctcaaaaagtgttcatccaggaatgatctctccattctacttgatgtaaaaccgagtatcttgtcttacgtcttgtttgtggaatcagacgcgagtaagtatcaggaatttacgatctcaaagaagaccggtggagaaagactgatcaaagctcccaacgaccggcttaaagagatccagaaatcattgtccgacttgctgcttggctgcattgacgacataaacaaagagaagaatatctccaacaccttgagtcacggcttcgttaaggaaaaatcgatcataactaacgccgaaatgcacaagaaatccaagaacatccttaacatagatttgggcaatttctttgactcctttaattttggacgcgtcaggggcttcttcatcaagaacaacaactttctcctggatccaaacgtcgctaccgcagtggcccagatcgcatgccataataatagtctgcctcaagggagtccttgctcccctgtgattaccaatctgatcacccactctctggacatctcgctggcgaagctggccaaaaaaaattcctgtcggtatacaagatacgccgacgatatcaccttctccacgagaaaaaatagcttcccagttgaaataatggcagagctggatggggtctataaagccagcaagcgcttagacaaagaaatttctcgcgccgggttcgtgattaacgagaagaagaccaggatccaatacaaagattctcgccaggatgtaacaggtctagtggtaaacgagaaagtgggcatcaaaaaagagtaccgaagaactgttaaggcgatgtgcaactccttatttcacaccggctcttatacaaggctgatcaatgatgagcatgtggagggatcgatcctggaactggaaggaagactcaatttcatagactcagtggatcggcataatcgagtgcactatcccgagaaactctctacccattaccaacaccgtcaccatggtattcggagccgggaagtttggtcaagtcgcgagaagactctgtctaagtttctgttttacaagtggttctacgccaactcaaagactactattctgtgtgagggcaaaacagataatgtctacctgagcagcgccatttataaactgaagggaaagtatccaagcctgatcgacgctaaggccaagagcggggagccaaaatctctcgtgaagttcatggactactcccggcgtaccaagtttattctcgagctggcaggaggaacatcatatctagccaacttcattgacgcttacaaggaacgatacgagttttacaaaagtgagaagcccgaatatcccgtgctgattatactcgataatgacgatgggcttaatgacaacggtggcatcatcgcaaaattacagaagattagcactatgagcatgcaccccacaccacctaagaagggcaacatgaagtctaagattaaaaacagcgagtttatccacgtcatgcataatctttacgtagttatcacccctctcaattctggcaacgacactatgatagagaatttattcgagcagaagctgtggtccacaccactcaacaagcgtactttcgaccccacagagaaaaaggaaccgaaaagcagttattatgggaagaacgattttgctacaagggtcgtgaagaagaaacaggacagcataaacttcaatgggttcattcctcttttggatagaatgcagagggctattgaacattacaaaacggtgtga

SEQ ID NO: 8404 - RNA, 1758 nt, synthetic construct
  source 1..1758: mol_type = other RNA
atggatgccatcgacaaattacagtcatgcaagacaaggcgggatttagcgatcctgttgaattataacccttctcactttacacacctgttgtatcactcaatcccggaacaacgctataagtccttcctcatcccaaaaaaaaacggcggggagcgctccatttcggctccaaatgaaaagcttaaacaactgcagcggaacctgagcaacctgctccttgaatgtatagacaacatcaataagcggaacggcgtgaataactcactgtcccatggctttgttagagagcgttctatcataaccaacgcggagatgcataagaataagaagaacgtgctgaacatcgatctcgagaatttcttcgggagctttaatttcggtcgagtctccggatttttcatcaagaataactccttcctcctagaagaggtcatcgcaaccacaattgcccagatttgctgctttaataacgagctgcctcagggatccccttgtagtcccgttattaccaatttgattactcacagcctagacattcgactcgctagccttgccaaaaaatattcttgcacctacacaagatacgttgatgatataaccttttctacacggaaatccaccttccctatccaaattatgaatttcgagtatggagaataccttccctcacagaggctgctccatgagatcacccgctcgggcttcaatatcaacaatagtaagaccaggatccagtttaaagatagccgacaggatgtcactgggctgattgtaaacaaaaaggtcggtgtcaagagggagtacaggcagttgacaaaggctatgtgtaataagcttttcaataccggtagatttactaaagagatcgatggacaggaaattgaaggatccctgctggaattagaaggccagctgaactttatcgacagcattgattattacaaccgggtaaattacccccagaatctctctatccactacacgcacagaaattttggattccggactaaattattgctcaatgggagagagaaaatactcagtaaattcctgttctacaagaacttctactcatctgataaaccaacaatcctttgcgaagggaaaactgacaatgtgtatctgctctccgctctgcacgccctcagcagtagttttaaaaagttagccactccccccacaaagacgactgacttcaagacagagattaaattcctgaactacacgaaacgcacaaagtttctcttggagctagctggcgggaccagctaccttgcaatgttcatagccaactaccacagtaactacattcaatataaggcccctaagccaaaacatccagtcattatcatcctggacaatgacgagggcctaaaagacattattaacgagctggagaagatcaaaacttgtaccttttcaccacccaagaccaaggggagcaccacacgcgatgcagtaaagacgtctacttttgtgcatgtggtgcataacctgtatctggtgattacgccgctgtctgacggtaacgacaccatgatagaaaacttcttcgagaaagagctgtgggaaaccgtggttaatggacgtaagtttgaccctactgagaaaaaagaaccgaagaatatcttctatggcaagaatatcttcgcaaatgacgtggtgaagttgaaccgtaagaagattaactttgaaggctttaggccccttttttatagactggagaaggtgataagcaactacaacaagatatga

SEQ ID NO: 8405 - RNA, 1755 nt, synthetic construct
  source 1..1755: mol_type = other RNA
atgaacgcgatcacccagttaaagaactgccattctcgcatcgatctggccatactgttgaaatgcaaaccatccttcctttcttacgtgctttataaaaaggcagcctcgagcaagtatcacgagttcgaaattgacaagaagaacggcggcaagaggaagatctgtgcccccgccgacgacctgaagagcatccagcgtaacctctcagatcttctgttagattgtatcgatgacatcaacaaggataagaattactacaacacgctgagtcacggattttcaagggagaagtccatcattagcaatgctgaaatgcatagaggccagaaaaatgtgttaaatatcgacctcgacaacttctttggttcctttaattttggacgagtgaggggattcttcatcaaaaaccgaaatttcgagctgaatgaagaggtcgctactaccatcgcgcagattgcttgttatgagaaccagctgcctcaaggctccccatgcagtcccgtcataacaaacctgatagctcatccactcgacattagattggccaagctggcaaagcagcatagttgcatctatacacggtatgccgacgatattacctttagcaccaggctgaaagacttccccgcaaagctgatggcccaaccaacaccgaacgagtatgtggtgggatctaaactcaacagggagatccaaagagctggttttaacataaaccacgataagaccaggatccagtacaaggactctagacaagatgtcactggcctggttgtaaataaaaagatcggcgttaagagagagtatcgccagctgacaaaggccatgtgtaatagtcttttccatacaggctcatataccaagctcgttggggacaaccacattgacggtagcctggatgagttggaagggagactgaactttatagactacgtggacctgcacaatcggttgcagtatccggaaaagctgtccattcactaccctcatcgcaactacggaagcaaaacccgggccttgctgacaagccgagagacaacacttagtcggtttctattctacaaatactttgtagggaacgaaaaagcgactgtcctgtgcgaaggtaaaaccgataatatctaccttaaggccgctctccgccagttagcggcacattatcctactctccagaacgaatccaatcacgagtgttaccttgatttcctgaactattctaaacggacgaagtttctcctcgagctatttgggggcaccgcttatctggctggcttcattacgtcatacaatgatctgtactcctactacaaggggccgaaagcaaataatcctgtaattatcgtgctcgataatgacgacgggtttgacgcaatcgcatctgccttgaataaaaccaaatcgtgcactattaaccccacccccactcacacgaccgggcataacttcaattccactgagtacaagaatagcaatttcattcacgtctgtcacaacctatacgtggttctgacccctctgaacaatggtagtgacactatgattgaagacctttttgatcgctctttatggcagacatccatctccggccgtactttcgatcccacagggaaactaaaaccctctagctcatactatggaaaaaacattttcgccacagaagtggtcgctccacgtcaatcaagcataaatttcgatggctttaagccattgctcgatcggctcaccgacgtggtgggaaattatgccccttga

SEQ ID NO: 8406 - RNA, 1758 nt, synthetic construct
  source 1..1758: mol_type = other RNA
atgaacaagatcctccagttaaaaaactgccgcaccaggattgaccttgccatcttattgaaatgtaagccctctttcctgacctttctgctctataagacaaaacaggaggatcactatgaggagtttgagattcctaagaaaacgggcggaatcagaaagatctgctcccctaaaggtgacctcaaactgctccagaaacgcctctcactcctcctgttggactgcattgatgacattaacagcaagaacaagataaagaacaccctttcccacggtttcgagagagaaaaaagcatcatcacaaatgccgaaatgcatagagggaaaaagaacgtgctgaatatagacctgaacaatttcttcgacgagtttaattttggtcgtgttcgcgggtttttcatttccaacaaagatttccaactgacacctgaggtcgcaacgaccatcgcacaaatcgcctgttacaagaataaattgccccagggaggcccagccagtcctgtaattacgaatcttattacccacatactcgacgtaattctttctcgactcgcaaaaaagaatagttgcatctataccaggtatgccgatgatatcacattctctacccggaaaaagctattcccctcgggcatcatggaggaaactgatgctaacatttatatcccctctaaatcactgaaccacgagattaagcgggctgggttctcaataaactcaaaaaagaccaggattcagtataaagatagcaggcaggacgttacaggattgacggtgaataaaaaagtgggcgtcaaacgcgaatacaggcagttaaccaagagcatgtgtaattctctttttcatactggagagtacactaagaaggtgaataacgaggatgtggctgggaccttgaaggaattggagggtcgcattaactttatcgatagcattgacttctacaatagaaaaaagcatccgaaaaagctcagtattcattaccaacaaaagaaccatggcctgaataccagactgttgctgtccgggcgagagaaactcctgtccaagtttctgttctacaagaacttcattgggaacgataaagtcactatactttgcgaaggcaagactgataacatttacattaagtcggcgctaaagaccctggtcaataattatccaaagctggccgaaaaaaaggccgaagagccatataagtcctacttaaacatcctgaactatagcaaacgtaccaaatttttcctggaactggcaggaggaacaccttacctgaattttttcatcaagaactacgagaagcactacaacttttataagagtgtgcctgctgaaaagccagtgatcataatactggacaatgatgacggcttcaaactcatcattaatacaatcaaggagatcaagaaccatacttgtctgccatacccgaaccgacggcagacaccaatcgaatacctgaagaacgctgacttgatacacgttacacacaacctatacatcatacttacacccctgagcaatgggaatgacactatgattgagaatcttttccccccagatctgtggaatcaggacatccagggacggaccttcgaccctacagaaaagctaaaacccgaggaaaactattacggcaaaaagacttttgccactgaggtgatcgcgcccaaccgggatcacattaattttgacggctttagaccgttatttgacaggctgactaatgtcatcgaacactatgagaagatctga

SEQ ID NO: 8407 - RNA, 1764 nt, synthetic construct
  source 1..1764: mol_type = other RNA
atgaattctatagaatccttgaaaagctgtgtgactcgaaaagatcttgcacggctgctgtcttgtgcccctagtcacctcacgtatgtcctgtataagttgcccgcggctactaagtacaagcagttccctgtgtccaaaaagagcggcggcgttaggcaaataaacgcacccacgaccgacttgaagaaaatacaacgctgcttggccaatctgctccaggactgtattgagaacattagcgaagaacatgagtacgacaacaaggccgctcatggattcgtgcgcaagcggtctattatatctaatgccgagatgcacaagagacaaaaaaatgtggcgaacctcgatcttgagagcttcttcgacagctttaactttggtagggtgcgtggtttttttatcaagaaccggcattttgcactgtccgaagaagttgccaccactatcgctcagattgcctgccacaatggcgtgcttccacaggggagtccatgctccccagtgattaccaatctcattgctcattctctagatattagactgataaacctagccagaaaacactcatgcgtctatacaaggtacgcggacgatctcacattttcgacaagaaaagcaactttcccacctcagatccttagggaggaggatgggaaaataatccctagtaagacactccggaatgaaattaaacgggccgggttcagtatcaaccataagaagactaggatacagtataaggactctcgtcaggatgtcacgggtctggtggtgaataagaaagtaaacgttagttcagactacagcagattgacaaaggctatgtgccactccctatatacaaaaggtttctacaccaaagaagagaatggaaagctggtacagggcaccatcaaggaactgaatggacgtctgctgttcatcgactcagtcgataaatacaaccggatcaattaccctgacaaattatctgtgcactacaaccacaaaacccacggatatcgcacacgagtccttcataacggacgagagaaaaccttctccaaatttctgttctacaagcacttttttgctaatacaaaggtgtgtgtgctttgtgaaggaaagaccgacaacatctatttgaaatgcgcactcgattcaattggagcccaatttcccaagctgtacacaccggcagggaacggcaaggatgccatcacacacatcgagctcttcaaatattccaagagaactaggttcttaatggagctgtatggcggcagcagttatctcgggggttttatccagtcatacaaagaacggttaaagtcctacaagaaattgccactgactcgccccgttattattcttctcgataatgacgaggggctgtctaaacatatccgaaccgagatgaagagcgcccacgccactatctacattaatggcaagatcgtgactaacttcgataagaatattaagaaggctgactttgtccacattaccgacaatctgtatgccatcttaaccccactgaaagctgatggctcggatagcatgattgaggacttttttgagcctgcagttctgaacagacaggtaaatgggaggacattcgacccgaaggaagagaaaaagccccccgaaaagttctacaacaagaatacctttgcgacccaggtagtcgaagctgacaaaaaaaacatcaacttcaatggcttcaactccatcttcgagcgcatctcactggcaatcaaccattttgagagccgcacgtga

SEQ ID NO: 8408 - RNA, 1854 nt, synthetic construct
  source 1..1854: mol_type = other RNA
atggtcatggatgatgaacactccaaactgctgaaacttgcccgttataatcgccttttctcctgtgacagtcgaagtgaactggcaagcctgttgcacgtctccccagtgttccttaccaacatcttgtacattcaaaaaccagagaatctgtatcggagcttcaatattcccaagaaaagtggagggatccggcaaatagaggcgcctgcagaaagcttaaaggaaattcaaagtaagctcgccaatctgctcttggactgcattgatgcattaaacaccattaagggaaatgacagtaatttgacaggctcattcaataatactctgtctcacgggtttagccgtaagaaaagcataatcactaatgctgagcgccatcgcaacaggaagatcatactcaatacagatatagaggactttttcggcagttttaacttcggaagggttcgggggttctttctcaagaatcggaacttttcactctccgagaacatcgctacaaccatcgcacagatcgcctgttataacaacgctttaccacagggctctccttgctcccccgtgatttctaatctgatctgccatagcatggatgtgaggctagctaagctggccaagagacattccttgtactatacgagatacgcggacgacctgacattctctactaacaagcgcactcttccttcagaaattgccattgagaatggttcgcgctatgaaattggttctgttttccagagggagattcacagatcaggattttccataaatcacaacaagacacgcgtaaactttaaagattcacgacaggtgatcaccggtctgacggtaaacaagaaaatcaacacacatcggaactattggcgcttggagagatccaaatgccactacctgtttatgaccggcgacatcccggacgatgggagcagcaccgatctagcttctaagatcaataggctgcatgggcggctcaatttcattgacaccatggacagacacaaccgggttaacctctcaaagatcgagcagcaccttatcagccataaatcgattaatggcatcctgaaagaggacattgaagagatcttgttgggaaaagagaacggaaagaattcgcgaactaagaagaagttaaactcccgggaggaaacctttagcaagttcctgttttacaagaacttctacaacaaccagaaaccccttattattctggagggtaaaacagacaacatatatatagggtgtgcactggaaaggctattctcacattacaaagacctcatcaagtacgatattaaggagaagaagtacgagaagaatatcaagctgtacgagcacactaaaagggctagatatctactggatatccacgccggcgccgaccatctgtttgagtttgtgagacagtatgataagcgatactcttattacaaggccccgattgacaatcaccctgtgattttactccttgacaacgatacagggccaaaggcgatcatcaacttccttaaaaataccctgctcaaaaggtcaggcatagatcccaagaacgaagatttcgtccatatctgtcacaacctctatctcgtgctgactccactgaataagggaagagacacgtccatggaagatttttttgataaaagtgtgctgggcactacaataaagggtaaaaccttcgatccttccaatgaaaaatccaccggcactacgtacggcaaacacgtgttctctaccgaagtcgtcaaaaaaaacaaaaacaccatcagtttcgccagctttcgtcccatcctggaccgagttacagctgtgattaatgactacgcctctaagaaatctagcagctga

SEQ ID NO: 8409 - RNA, 1848 nt, synthetic construct
  source 1..1848: mol_type = other RNA
atggacgaaaagaaggcccggtcacggaagttggacagatattttaggctgtcaaattgcaccaccagatccgagcttgctagcctcctcaatatcagttctgtgtttctgacaaacgtgatctacattcagaaacccgacaacctctaccgctcgtttaatatcccaaaaaaatctggagggcatcgagtaatctttgcccccgccccgcagctgaaggaaatacaaagtagtctggcccaccttctgttggactgtattgatgccatcaatatcaaaaagggcgaaaatctaaagttgggtaagcctttcatttccaccctgtctcatgggttcagtagaaaaaagtccatcattacgaacgcagagaaacaccgtaatcgccgagtgattcttaacacagatatcgaagacttcttcgggagctttaatttcggtcgggtccgcggcttcttcctgaaaaacaggaattttcaactgttccccgatatcgcaaccactattgcacagattgcttgctacaacaacgctctccctcagggctccccttctagtcccgtgatcagcaaccttatctgtcacaccatggacattcggctcgccaaattggcatctaagcacagcctgtattatacacgatacgccgacgatttaaccttttcaacgaacaaaaaggagatccccgtcgaaatagcaatcaataaaggagggcaatatgaagtgggcatagcgctgaaaaaggagatacatagatccggtctgtctatcaaccacggaaaaactagggttaattttaaggacagcagacaggacgtgaccggccttaccgtgaacaagaaaatcaatacgaaccgacattattggcgtttagaacgctcaaggtgtcattacttattcatgacaggggatataccagatgatggaggttcctacgacctcgagagtaagatttcccgcctgcacggcagactgaactttatcgacactatagatagacacaaccgggttaatctggccaaaattgagcagcatattattagcaacaagtccataaatgggatcctcaaggaagacattgaggaagttcttttaggcaaggacaacaacaagaaaactaagcgcaataagaagctgaactcaagggagatcaatttctctaggtttctgttctaccggaacttctataacaacagtaagccacttataatctgtgaaggtaagaccgacaacatctatattagctgcgctctagagtccctgagcccatcctatccaggattgatcgagcacgataaaaaagagaagaagtacaagaagctcatcaagctgtacgagcacactaaacgtgctagatatttactcgacattcacggcggcgcagaccatcttctggatttcatacggcagtacgaaaagaggttttcctactacaaagctcctatttcgaactctccggtcattctactgctcgataatgacacaggcccaaaggccattatccagtatctaaagaatacattgctcaaaggaacaggaatcgaccccaagaatgaggagtttattcacatttgcaaaaacctgtatctcgttctgacccccttgtctaataaaaaggatactagcatggaagacttcttcgagaacaccgtactgaagacaaaagtgaatgggaaaagcttcaacccttcaaatgatgccgctaccgatactacatacgggaagcatatattttctactgaggtcgtgaagaaacataaaaatagcatcagcttcgatatgtttcgccctatctttgataggatcgtggcggtcattgaacactacgagtcgatcaaaaattcactgtga

SEQ ID NO: 8410 - RNA, 1767 nt, synthetic construct
  source 1..1767: mol_type = other RNA
atgtcgcggttggcattgttaaaacaggctactaccaagagaatgctcgctaaggttctcgatgtaaacccttctttcctgactaagaccctgtacctgaccagcgatgagctcaaatataagtctttcgaaatcccgaaaaggaatggcgatccacggaccatttatgccccaaacaaagaactgaaagacctgcagtccaggctgagcgtcctcctacttgattgcattgacgaaattaacaaggagagaaagatcactcccaaactttcacacggctttgtccgtaaccgttctattataactaacgccaagaaccatatccacaaaaaaaacgtgttgaatatcgacctcaatgatttttttgggtccttcaatttcgggagagtaagaggtttcttcatcaaaaaccagcattttgaacttcatgagcacatcgctacagtgatagcccagatcgcgtgttacaaaaatttcctccctcaaggttctccctgctctcccgtgattacaaatcttatcatgcattccgtggatatccggctggccaaactcgcaaagaagaacagctgcacatatacgcggtatgcagacgatattactttctctaccagagaaaatgtgtttcccaaggatattgcgatagctgacaagaataaagtgcacctgggaaggcgactgtcaaaggagattactgacaacggcttcacgatcaatgagaaaaagacccgcgtccaactgatggactcacgacaggatgtaacaggactcgttgtgaacaagaaggtgaacattaagagcgattattggaggattaccagggcaatgtgtcactcattatttcaaaccggaagttacattaagtgtgagcagaacggccaagccgtggcaggtacactgtatgagctagacggccgactcaattttatcgactacatcgacaagtacaataatgttaaggagaagggaccaatcgataacaggttcagtctgcgcaaccatggactcaactacagggagaagctgaatgttcgggagaaaacattttcccgattcctattctataagtacttctttgggcataacaaaccaactgttttatgcgaggggaaaaccgacaacatttatataaaagccgcgatcctgcgccttagtgagaaattcgagttactgtcaaatgccaaaactgacgagaaggaatacgagctgctggtgaacttcctagagtacaacaaacgcacaagatacttgttggacctttacggcggcgcttcctacctgaagcggtttgttgagcggtatagatctgattattcatactatcgtgctccagccgccacacagccggtgatcattgtggcagataatgacagcgggtcgacagaattaatcagctacctggtcaatcacaagcccctgtatcctgaattgaagaaggataaggctgagtccaataaaatcataaaggaatccagtttcgtccacgtcgagaagaatctgtacattgtatttacccctctgatcgacggaagggacagcttcatggagaatctttttctgccagagacgttgaacatagaagtggatggcagaaagtttagccctcagcaggaagctgacactaagaacagctacggtaaaaataccttcgccacaaaggtggtcagtgccaagaaacactccattcccttttccgggtttgaacctctcctcacccgcatggaagaagccataatccactatcgcacgaaaatcgaaaaaaaatga

SEQ ID NO: 8411 - RNA, 1746 nt, synthetic construct
  source 1..1746: mol_type = other RNA
atgacagagctagaacgcttacggaaagccaccactaaagttgatctggccaagatattgaacctaaatgcgccatttctcacacgcacactctacataaacaagatcgaaaaccagtatacgcaatttcagatccctaagcggtccggaggtcatagaaccattaatgccccaacatcagagctaaaggatatccagtcccgactaagcaaattgctcctcaactgtattgatgagattaatgccagtaagaacgttgagcccagattgagccacggatttaccagaaaaaggtcaatcatcacaaatgcagagaagcacgtccaccagaaaaacgtgctgaacattgatctcagcaatttctttgacagcttcaacttcggaagggtccgggggttcttcatcaagaacaacaacttccttctgcacaaagacatcgccacggtgatcgctaagatagcttgcctgaacgatggactcccgcagggatctccatgctctccggtcatcacaaacctgatctcccacagcctggatatccaattggcatctctggccaagaaaaatagctgcacctattcccgctacgcagatgacattaccttcagtacacggaatcgggagttcaaacccgagctggtcaaagttgatggcgtggacatcttcatcggctctaagcttcttcgcgaggtggagagggccggttttaagataaatgaaactaagacgcgagtgcagtttaaggactcaaggcaagatgtgactggactcgttgtgaacaagaaagtgtctatcaagtccgaatactggcgaactacccgtgcgatgtgtcaccagctgtttattagtggcagctacacaatcaagacctcaacggggacacgcgaggggactattaatgaattgcaggggagactcaactttatagactcaattgaccgctataatcatatgaggccaaaaggcccccccgataaattacacatccctatacaggacaggaagaattacagagaaaaactgaatgtacgtgaaaaggtgtttagcaaattcctctattacagaaacttccacgctaatgagaagcctaccattttgtgtgaaggcaaaactgataacatataccttaaagccgcaattcatagtcttagtaaacaatacgggctcttagccaagtccaaaacgaagactaccccatttgaactcctgatcaagtttttcaactattctaaacggaccagatacctgctggatttacatggaggcggctcctatctgaaggattttgtacagcattatcaggagaatctgaaatactatcagaagaccataccaaaaaaccccgtcattctgctgctcgacaatgactcaggccctaaagagctgattgacctgctggtgcatagtaaaaagttccccgattttcccaatggtaaagacgacattaagaatggggaattcgttcatatcacaagcaacctgtaccttattttaactcctctgaaaggcaacaaggacacaatgatcgagaatttctttgacaagaagaccctttcaatcaaagtcgacggaaggagcttcgattattcgaaggaagctgactctaccactaagtacggtaaaaataccttcgctactaaggtagtgctggagaacaagtcgtccatttcttttaagggcttcaagcctatcttgtcccgaatcgagaaggtgattaagcactataaagcattgtccggtgggtga

SEQ ID NO: 8412 - RNA, 1758 nt, synthetic construct
  source 1..1758: mol_type = other RNA
atgacgaaactcgaacggatacgcttagcaaaggataagaaagactttgcaaaattgctcaaagtgagcacggtgttccttactaatactttgtatcttactcccatagaagatcaatatgaggaattccagatccctaagcggagcggcggatttcgaaccatccacgccccaaccgccgagctgaaggatcttcaaagcagactctctaatttgctgttggattgtatcgacgatatcaacaaagagaaggagattatttccacactaagccacgggtttgtgcgtaaaaggtccattattacaaatgccaggttgcacgtgagacagaaaaacgtcttaaatattgacctcgaagacttctttggatcttttaactttggccgggttagaggcttcttcctgaagaacaacaacttcaaactggataagaacatcgcgaccataattgccaaaatcgcgtgcctcaatgataccctacctcaggggagcccttgttctccagtgatcaccaatctgatcacccacccgcttgatattagattggcccaactggctaaaaagtcctccagcgtttacacacgttacgccgacgacataacattttcaactagggaacgcaacttctctgagaagatagtatccattgaaaacaagaaggttactctctcaaaaaaactgaaagaggagatccgccggtcaggcttcaatattaaccacaagaagaccaggctgcagttcgctgactcacggcaggacgtaaccgggctcattgtcaacaagaagatcaacatcaaaagggagtattggcgtgagactcgcgctatgtgccatagcttatttaagaccggcgagtttaccatcaacgaaaatggaaatcttaggaagggtaccattgatgagctgtacggtaagctaaacttcattgacagcatagacagatacaaccactacaattgcaaagaatctctggaccataggtattccctgaaggacagggggatcgatactcatcgggagaagctgaatggtcgcgaatctacattcagtgatttcctctattacaagaacttcatcgccaacaacaaaccaacgctgctgtttgagggcaagaccgacaacatttacatcaagtacgctcttaaaagcaaatcgaacactagtaacgagctgaaaccgacgaagaatgataatgaccagctagaactcccagtttccctgtttgattacaccaaacgcacaagatatcttctcgacctgtacggcggcggaaactatctgaaattttttagtcagcggtataagaagtccttgaagtactacaatgtgaaaactccacagaatcctgtgattttggtgctggataatgacaatggtcccaacgggctgatcggatggctctcatcacagaagattattttccctaagatcgaagaggataataagaacaacagcatacgaaatagtgactttatccatatcgtcagtaacctgtatctgatcctgacaccccgagacaatgggaatgatagtatgatggagaacctgttcgacgacaaagcactcagttataaaatcgatgggagagagttcgaaccctccaatgaatatgattcgacaacaaaatacggcaagaatacattctctctcaaggtcgtgaaagacaaacataaggagatcaattttgacggattcatccccttacttctgcgaatagcaaaggtgattaagtaccacaaaaagtttgtcaactcttga

SEQ ID NO: 8413 - RNA, 1761 nt, synthetic construct
  source 1..1761: mol_type = other RNA
atggttcatcgacggaactacctgcttttgaaacaggccaaaaccaagcctgagctggctagcctgctggatgttagtgctgcatttctgaccagaacactttataggcctggggagctatcacatgtaaacagtcactaccaccaatttgacataacaaagaaatccgggggcgtaagaaagatcagcgccccatctgatgaactgaaagaacttcaacgccgcctgagtgatctgctgctcgattgtaaggaggtgatccatttcgacaataaggtggaatgcacgctgagccatggctttgagagggagaaatcaattattaccaatgctcgcatacatcggggcaagaaaaatgtcctgaatttagatctcgccgacttcttcgggagcttcaactttggacgggtgcgtgggtacttcatttccaacaaagactttaagcttgatccgcacattgctactacgttagcacaaatagcctgctataaaaactccctcccgcagggttctccttgttcacccgtgattgccaatttaatcaccaactcactggacatcaaacttgcaaagttggccaaaaggaacggatgtagctacactcgttacgcagatgatattacgtttagtaccagaaaggagatctttcccaaggacattctaaaaaacgtggagaataccatcctgggttctaagctgctcggcgaaatccgccggagtggattttccgtgaacccaactaaaacacgcttgcagtttaaagactcccgacaggaagttaccgggctggtcgttaataaaaaagtgtctgtgaagagcgagtattggagacttacacgcgcgatggctcactcactctttaagacgggcaagtttcaaatcattgaacaggatggatcgtacagaaatggtcacctttccgagctagagggacggctcaccttcatcgattccgtggacttctacaacaacttggagaagaagaaaaaaccagaacccaagtatgaacccaaggtgcacactggcataaataagttccgtggcagattgaattctagggagaagatctacggcatgtttctgcagtacaagaattttttcgccaatgagtatccgacaattcttacagaggggaaaacagacaatgtctatctaaaaagcgccctctcgcagctgcaggccctgtatccaaacttggtgaatagcaagagcgctaccaccgaatactcacccaagctgaaatttcctgatctgaaccgaaagactatgtatttactggacattggggatggagcaactccatttgtcaggttcgtgcagcggtatgttgacgacctcaagaacttcgaagataagaaagccaaaaaccctgtcatcctaatactcgataacgacagtggtcctaaagacttactgaatcacttggtaaagtctgtaaagtcttgccccaatgatattctgatgctcaagtctagcggtttcatccacttgttccataatctctacctcatcctgacaccccttaacagtgggggcaaggactccgcaatggaagatttgttcgacagcactacactcgctactgtcattgatggaaaaaccttctccccagaaaaaaacatcgacattaccaagcagtatggcaagcacatcttctccacaaaggtggtgaggtcaaacaaagcgaagataaacttcgacaaatttaagtacctgttcgacgagatcgagaaggtcaaactccatttcctgaccctgtga

SEQ ID NO: 8414 - RNA, 1689 nt, synthetic construct
  source 1..1689: mol_type = other RNA
atgatacatcgccggaattacctgctactaaagcagacaaaaacaaaacctgagctcgcggagattttaggcgtttctgccgcctttctgacccgcactctctataaacccggggtgcagtcccacgtgaattcacactaccatcaatttgatgtggccaaaaaaagtgggggcgtgcggacaattagcgcgccatcagatgagctcaaagatcttcagaggaagcttagtgacctgctccttgattgcaagagcgtgatacatctggacaacaaggtagaatgcagtttgagtcatggctttgaacgagaaagatccatcatcacaaatgctcgcatacacagaggtaagaaaaatgttttgaacctggacctggcagatttcttcggctctttcaatttcggacgtgtcagggggtactttataagcaatagggactttaagctcgacccacacattgctacggtcatagcacagatagcctgttacgaaaaccgcctccctcagggaagcccatgtagtcctgtgatcgcgaatttgattacaaacagtctggacattaagctgtcaaagctggccaaaaggaatggctgctcttatacccggtacgccgacgacatcaccttttcaacaagaaaaaagatcttccccaccgctatcctgaaagacgcagagaacgtcattctgggatctaaactgttaggtgaaatacggagagccggcttttcagtgaatcccaaaaagactaggttacagttcaaggatagcagacaagaagcgaccggcctggtcattaacaaaaaggtatccgtgaaatccgaatactggagactaacccgggcaatggcaaactcgctcttcaaaacgggaaagtttttaattgccgagcaagatggttcttatcgagaagggaagttatccgagctggagggacgattgacttttattgactccattgacttctacaacaacatcgaggaaaagaaaaagcccgagcctaaaagcgagcccaaaattcacaacggtatcaacaaatttcggggtaagctgaatagcagagagaaggtatatgccgagttcttgcagtataagcatttcttcgctaatgagtaccctaccatcttgaccgaggggaaaactgataagagcgattattctccgaaacttaaattccctgacctgaaccgcaagaccatgtatttccttgatatcggagacggcgcaacaccctttgtgaggtttgttcagcgttatgctgatgatctgaagcgcttcgagaataaaaaagccaaaaatccagtgatcctcgtccttgacaatgatacgggaccaaaggatctgctgaagcatttggtcaacaaggtcaagtcatgtccaaatgacatgggcactctaaagtcctcgggctttatccacctcttccacaacctctaccttatcctgactccgctgaacgctgggggaaaagatagcgccatggaagatctgttcgacgctgcaacaatcgggactgtgatcgacggcaaaaccttctctaccgctgatcacatcgacatttccaagcattacgggaaacacattttttccactaaggttgttaggtctaacaaggccaagatcaacttcgacaagtttaagtacatctttgacgaaattgagaaggtgaagctgcactataagaagctctga

SEQ ID NO: 8415 - RNA, 1761 nt, synthetic construct
  source 1..1761: mol_type = other RNA
atgatccaccgcaggaactaccttttactccgcaaagctaaaaccaagccagagctggcttctattttgggcgtctctgctgcctttctgactcggaccctgtatcgctcaggcgtgaaatcacatgtgaactctcattaccaccagtttgacatcgccaagaaatccgggggcgtacgcaccatatccgcacccagcgacgaactcaaagacttgcagaggaaactctccgacctgctgctggattgtaaggaagttatctacctggataaaaaagtcgaatgcttgctgtctcatgggttcgagcgcgagaggagtattataaccaatgcccgaatacacagaggtaaaagaaacgtactgaatcttgacctcgctgactttttcggatcttttaatttcggtcgggtgagggggtactttattgccaaccgagagttcgagttagaccctcacattgcaactgtcatagcccagattgcctgctataaagacagtctcccacagggtagcccgtgttcccccgtcatcgccaatctgattacaaattcactcgatatcaagctgtcaaagctggctaaatccaatgggagtagctacactagatacgctgacgatatcacgttctccactcggaagaaaagcttccccgccgctattgtgaaagacgtgaaaagtataaccctgggcagcaaactgctcggagagattcggagagcagggttttccgtgaacccaaccaaaactcggctgcaatttaaggatagccgacaggaggccacaggcctggttgtgaacaagaaagtgagcgtgaaatcagagtactggaggctgactcgggctatggcccattccctttttaagacggggaagtttcagatagcggaacaggacggcagcttccgtgatggacacctgagcgagttggaaggtagattgacatttatcgactcaatcgacttctacaataatctggagaagaagaagcagcctgagagtaaattcgagcccaagatccacaccggcatcaataaatttagaggcaagctgaattctagagaaaaggtttacggcaggtttctacagtataagcattttttcgcgaatgagtaccctactattttaacagaaggaaagacagattcggtatatttaaagagtgcactcaatcaactccaggcctcctatcccaacttagtaaactttaagtcttcgaaggaggaatatagccctaagctcaagttcccagatctgaaccgtaagactatgtatctactggatattggagacggagctacctccttcctgcgtttcgttcaacgctatacagatgaccttaagtacttcgaaggtaagaaagcgaagaacccagtgatccttgtgctagataacgatgcaggaccgaaagatctacttaatcatctcgtcaaaaaggtgaagtcttgccccgacgacatcgcagtcctgaaaagcggagggtatattcacctcttccacaatctttatctgatcttgacacaattgaacgccgggggcaaggactcggcgatggaagatttgtttgatgcagaaacactttccaccgttattgatggtaagacgtttagccctgcaaaacatatcgacgtttctaaacattacggcaagcacatcttcagtaccaaggtcgtgcgagccaacaaagagaagatcaacttcgataaattcaagtacatcttcaacgagattgaaagggtgaagctccacttttcaaccctgtga

SEQ ID NO: 8416 - RNA, 1806 nt, synthetic construct
  source 1..1806: mol_type = other RNA
atgtcgtacttttttgcactgaccatcgaagaatgcaaccttattcacaggagaaactacctgttactgaagcaagctaagaccaagccccagctcgctagtattttgggagtgtcagctgccttcctaactcggacactgtataagcccggcgttgagtcccatgttaattcccattaccatcagttcgatattaccaagaaaagcggaggtgtacgaactatctccgccccatctgacgagttgaaggatctgcagcgtaaactgagcgacctattgctcgactgcaaagccgtgatacatctcgataacaaaattgagtgtacactgtctcacggatttgaacgcaaaaggagtatcatcaccaatgcccgcatccatcgcaataagaaaaatgtcttgaatctggatctcgctgacttttttggctctttcaatttcggccgtgttagaggatattttatcgctaaccgggattggaagctcgacccccacattgccaccatcatcgcccagatagcctgttacaaggacacccttccacaaggcagcccctgctcccctgtaatagcaaacctaatcaccaacagtctggacattaagctgtcaaagttggccaaaagaaacgggtgttcatatacgaggtatgctgatgatataacgttcagtactcggaagaaagcctttcccaccgccattgtgaaggatgtgaagaatatcactttgggaagcaaggtgttaggcgagattagaagggcggggttcgcagtaaatcccaaaaagacaaggcttcaattcaaagactcccgccaggaagccactggactggtggtgaataagaaggtcagtgtcaagtcggagtattggagaactacacgggctatggcccactctctctttaaaacagggaaatttcaggtggccgagcagaatgggagcttccgggatgggcatctgtcagaactggaaggtaggctcaccttcatcgactcagtcgacttttacaacaaccttgaaaacaagaaccatcctgagccgaaatttgagcctaaggtccacaatggtctaaacaaattccgcggcaaactgaactccagagagatagtatacgggagatttctccagtacaagcacttctttgctaatgaatacccaactatcttaaccgagggcaaaacagacaatgtgtatctgaaaagcgcactgtcccggttgcaaaccacatatcctaagctggtgaatcctaaatccgcaaaagcgaaatacagcccgaaacttaagttcccgaatctgaatcgaaaaacgatgtacctgttagacctgggcgatggagcgaccccattcgtgaggtttgtgcagcgatacgccgatgacctgaagtattatgagtgtaagaaggcaaaaaaccccgtcattttagttctggacaacgacacgggcccaaaagaactcctcaatcacttggctaagaaggttaaatcttgcccagatgatattgcaactctcaagagttctgggttcatccacctcttccataacctgtaccttattcttacacctctgaacgcgggagggaaggattccgccatggaggacctttttgacgcagcaaccctgggtaaaaccattaacggcaagactttcagcacagctaaccacttcgatgatacaaagcactttggtaaacacgtgttcagcacaaaaatagttcgctctggcaaatctagcattaacttcgacaagttcaagtatatcttcgacgagatcgtgaaggtcaagatccacttttcaaagatcaagaattga

SEQ ID NO: 8417 - RNA, 1761 nt, synthetic construct
  source 1..1761: mol_type = other RNA
atgatccatcgcaggaattacttactgctcaaacaggcgaagaccaagccagaactcgcactgattcttggcgtgcccgctgcatttctgaccaatacactctataaaccgggggtgaattctcacgtaaatagccactatcatcagtttgacataaccaaaaagtccggtggcgttaggacgattagcgccccgtccgacgagctcaaggatcttcaacgaagactgtctgacttattactggattgtaaggcagtcatccagtttgataaaaagatcgaatgcaccctgtctcatggttttgagcgagaaaagtcaatcattactaatgccagaatccacagagggaaaaaaaatgtgctcaacctggacctcgccgatttcttcgggtcattcaacttcgggcgggttaggggatacttcattgccaataaggatttcaaactgaatccccatattgctaccgtgattgcccagatagcttgctataaagataccttgccgcagggcagcccatgtagtcctgtcatcgccaatttaattaccaactcgctagacatcaaactgagcaagcttgcaaaaaagaatgggtgtagttacacaaggtacgccgacgacatcacattttccacccggaaaaagtgcttcccaattgccatcgtcaaaaacgtcgaaagcctgactctggggtcaaaacttctgggggaaatcaagcgagcagggttcagtatcaacacatccaaaacacgccttcaattcaaagatagtcgtcaagaggctaccggtttggtggtgaacaagaaagtaagtgtgaaatcagagtactggagactcactagagccatggctcacacgctgtttaagactggaaagttccagataaccgatcaggacggcagcgtcaaggacggcaacataagcgagttggaaggtaggctcaactttatcgacgccgtggacttctacaataacctggagaagaagaagcaccccgagcctaagtttgaaccaaaagcacatactggaatcaataaatttcgcggagtcctaaatagccgcgagaaggtttatggacggttcctgcaatacaagctctttttcgcgaacgaatttccaacgattcttactgagggcaaaacagacaatgtgtacctcaaatccgcattaaaccgtttgcagaacctgtatcccaacctggtgacacctaaatcagccaacattaaatattctcccaagcttaagttccccgatttgaataggaaaacaatgtactttctcgacattggtgacggagctacacctttcactcggtttgtgcagcgctatgctgatgacttgaagcactttgagaataagaaagcgcagaatcccgtaatcctggtactggataacgattctggccctaaggatctgctgaaccatctagtgaacaaggttaaatcttgccctaatgacattgccacacttaagaattccggcttcatccatttgtttcacaatctgtacctaatactgaccccactgaacgtcggcggcaaggatagcgctatggaggacttgtttgataccgccactctgggcagaaccctcaacggaaagaccttctcgactgctaaggattttgacgaaacgaagcactatggaaaacacctcttttctacaaaggttattcggtccgacaaggagaacatcaacttcaacaagttcaagtacatattcgatgaaatcgagaaggtgaaaaaccacttctccaatatctga

SEQ ID NO: 8418 - RNA, 1749 nt, synthetic construct
  source 1..1749: mol_type = other RNA
atgattcacagacggaactatctgctgctgaaaaaggcccagacaaagccggagctagcttcaattttggggatccccgccgcgttccttacacgcgtggtgtacaagccaggcgtctctacacattaccaccaattcaagattccaaagaaatccggcggggctcgctccatctctgcaccatcatccgaactcaaggacatccagaggcggctatccgacttgctcctcgactgcaaggccgtaattcacgtcgataataaagtggagtgtacattatcacatggttttgagagggagagaagcatcataaccaacgccagggtgcacagcaataaaaagaacatcctcaacctcgacttggaggattttttcggtagttttaactttggaagggtgagggggtacttcatcgccaataagcactttaagctccatccacatattgcgactgtgttagcacaaatagcgtgctttgaaaataaactgccacaggggagcccctgcagtcctgctatcgcaaacctgattacaagctcactggatatcaagctgtctacacttgctaaacgctctggctgtagctacacacgttatgctgatgatattacgttcagtacccggaagtcagcttttcctgtggcaataatcaaggacgacgaaaatcttactttggggtccaagcttttaggagaaatccggcgcgccggcttctctgttaatccacgcaagactagactacaattcaaagatagcaggcaggaggccacaggcctggtggtcaataagaaagtatctgtaaagagcgagtattggcggctgacccgagctatggcacactccctgttcaaaaatggaaaatttcacatccctcagcaggatgggacccatagagacggattggtttccgagctcgaaggccgcctgacgtttattgacagtgtggactttttcaacaacctggccaataaaaaacatccggcatctaagtttgagcccagagtccatagtggcttgaatgggttccgaggcaaactgaactccagggaggtggtatacgggagattcctgcactacaagcacttcttcgcaaacgagtaccctacaatactgactgaaggtaagaccgataacgtgtatctgaagagcgccctgtcaatcttacagggtacttatcccaatcttgttaccgcaaagaccgccaccggcccctataagcctaaacttaagttccctcatttgaaccgtaaaaccatgtatctgttagacatcggggacggagccaccccctttgttcgttttgtgcaaagatacgctaatgatctgaaacagttcgaagacaaaaaagcgattaacccagtgattctcattctcgataatgacgacggacccaacgtcctgctcaaccatcttgttaacaaagttaaatcgtgtcccaatgataaggccacgctcaaaaatagcggttttattcacatattccacaatctgtacctcatcctgactcctctgaaggctggaggaaaggattctgccatggaagacctatttgacaaggccactttggctcgaaaagtgggcggcaaaacttttagtacggccgagcactttgataacgcaaagcactacggcaaacatatattctccaccaagattgtccggtcggacaagaacaatatcaacttcgataagttcaaccatcttttcgaggaagtggagaaagtcatccagcactatgaaaccctgtga

SEQ ID NO: 8419 - RNA, 1749 nt, synthetic construct
  source 1..1749: mol_type = other RNA
atgattcaccggagacggtaccttttgctaaaacaggccaaaaccaaaccccagctagcctcattgttgggcgtgtccgcctcgttcttgacgcgggtcctgtataagccaggagctaacacccattaccacaaattcgatatacccaaaaagtctggtgggatcagaaaaatcagcgccccaacatcagagctcaaagacattcagcgaaagcttagtgatctcctcttggattgtaaaatggtgaatcatattgacaacgagatcgagtgtagtctttcacacgggttcgagcgagaaagatccataatcacgaatgcaagagtgcatcgcggcaagaagaatgttttaaacctcgatctggaaggttttttcgactccttcaatttcggccgcgtgagaggatatttcattgccaacagggatttcaaactcgatccacatatcgctaccgtgatagcacagattgcttgctataatgataccctgccacaagggtcaccttgctcacctgtgatcgccaatctgatcaccaatagcctggatattcgcctcgctcgcttggctcgtaaaaacggttgctcctacactcggtatgctgacgacatgaccttttctacaaggaagagcgagtttccatttggaatagtcaaggacgcgggaaatcgtatcctgggagcgaagctccttggggagattagaaggtctggtttcagcgtaaataacaagaagacccgagtccagttcaaagactctaggcaagaagtgacaggcttggttgtgaacaaaaaaattaacgtgaagagcgagtactggcggagcactagggcaatggcccacaatcagttcaagaacggcagctttgaagtcgtaggcatcaatggcgaaagccgtgtggggacgctgtcagaactggaaggccggctgacgtttatagatagtgttgactactacaacaacctgcaaaataaaaagcaccctaaacccatttttgagcctatgaaacataatgggctttaccagtttcgcgacaaattaaacagtagggaggtcgtttattctaggttcctgcactataagcactttttcgcaaacgaactgcctactattctgacagagggcaagactgataacatctatttaaagtccgccctctcgatgcttcagcccatctatcccaacctggtaaaacctaaaaccatcaacaatcaatacgagcctaagctaaagttccccaatctgaatgacaagaccatgtattttcttgacttaggggacggcgcaaccccctttctccgatttgtgaagcgctacgtggaagattataaatattacggcaaccaggaggccaagagcccggtcattctggttttagacaatgacgatgggccggagactctgctaaagcacctcgtgaagaatgtgaagtcatgtccaaacgatctcgtaactctgaaaaaatctggcttcatacatatctttcacaatctttacctcatcctgacacccctgaacgcgggtgggaaagattccatgatggaagacctgtttagcccagccacactgagtactgtcatcggaggaaagaccttctctaccgctaaaaacatcgacattactaaggaatacggaaagcacatcttcagtacaaaggtcgtgagatccaacaagtctacaatctcctttgacaagttcaagtacattttcaacgagattgagaaagttaaggcacattttacatccctgtga

SEQ ID NO: 8420 - RNA, 1764 nt, synthetic construct
  source 1..1764: mol_type = other RNA
atgatcctgatccacaggcgcgactatcagctgttaaagaaagctaagaccaaaccggaactcgcctcactgctcggcatcaccgctgcatttctgacccgcgttttgtaccaccctggcgcgaatgaccactaccaccagttcgagatagataagaagagcggagggaaaaggaagatttctgcaccctccaacgagttgaaggatattcagtctaggttgtcgacccttctgcagaactgtttggatgttatcaggttcgataccgaagtgtccagagaatgcctcgtctcccatgggtttgagagagagagatctataattacgaacgccgccattcacaaagggaagcggaacatcctgaatctcgacttagacgacttttttggacaattcaatttcggtagagtgcggggttacttcatcgccaataagcatttcgaacttgacccccacatcgctactgtgatcgcccagattgcttgctatgaaaactcactaccacagggctctccctgttcacctgtaatcgccaacttgatcacagccagcttggatatgaaactcttaaatctcgccaaaagctgtggatgctcttatagtcggtatgctgatgacattaccttttctacccgcaaaaaagagttcccttcttccattgtcaaagtcctggagccactggaactgggaggaaaactaattggtgaaatccgacgtgccggattcagtgtgaacgccctgaaaacacgactacagtacaaagattccaggcaggaggcgacaggcttggtggtaaatcgtaaggttagtattaagtccgagtattggaggctagtgcgagctatggcctttcgcctgtttaaaaaaggcgaattcgaaatcctggacgtgaacggggagccacggatggggaccctgaatgagctcgagggcaggctggcgttcattgacgcaatagatcggtataataacatcgtagcaagacgtagaccgaaggctccttgggggaccatcaaacatactgggctgaacgcatttaagggacgccataacagccgggaggcggtctactcccggtttctgttctataagtacttttattcctcggaatacccaacaattctgacggagggcaaaaccgataatgtttaccttaaatctgcactttcggagttacagggcagctaccccagtctggtgagtcctaagggtcaagacaacgcttactccccaaagctcaagttccctaatctgaacaagaggaccatgtatctcctggatcttggcgacggcgcaactcccgtggctaagctcgtccaacgctacgagacggagcttgcctattttcacggaaaaaaggccactagccccgccatccttatcctggataatgacagcggtccttctgagctgctaaaggaactggccaagcccaaatacagaagttgcccaaattcagtgactgatatcaagaagagcggattcctgcacatattcgaaaacctctacctgattctcactccacttaactcagggggcaaggacagcatgatggaggatctctttgacgcaaagacattggcaacacccattaatgggaagacattctccactttaagcagctttgatactgctaagcattatggcaagcatgtctttagtacaaaagttgtgagaagctccaagtcatcaataaaattcgaccgatttcgctacatcttcgacgaaatagagaaagtgaaggctcacttcgccaaactgtga

SEQ ID NO: 8421 - RNA, 1734 nt, synthetic construct
  source 1..1734: mol_type = other RNA
atgctcctgcagcacgctcggacaaaacctgacttggcactgatcctgggagtgtcagccgcctttctaacacgcgtgctgtacaggccgggggtcgattcccattatcatcaattcaacatcgtgaagaagtccgggggtactagaattataaacgcccccagtgaagaactgaaagagattcaaagaagattagctactttgctgcaggattgtctggaggtcgttcacttcgacaacaagatcagtctagagtgcacagtgtcccacggtttcgaaagaaataggtcaatcatcactaacgccagcgtccaccaggggaaaaagaaagtgctgaacctcgacctgaacgactttttcggaagcttcaactttggccgcgtcaggggatactttatctccaatcgccactttaaacttaacccacatattgctaccgttatcgcccaaatagcatgttacgacaactgcctcccacaaggatccccctgctccccagtgatcgcaaatcttatcaccaacagcctggatatgaagctctctaggttagccgaacggggcggctgttcctacagcagatacgccgacgacatcacgttcagcacccgaaaaagccatttccctaagtcaatagtcaaggcgattgaaccagtagagctgggcggcaagctgcttggggaaatccgtcgcgccggttttagcgtcaatgccagaaaaacacggctgcagtataaagatagtcgccaggagactacggggttggtagttaacaaaaaggtgtctattaagagcgaatattggcggctcacccgaacaatggctcaccgactcttcaagaagggggcatacgagattaccgaagcggacggcgaacttaggcctggcacccttaatgagctggaaggccgtctagcttttattgatagcgtggataggcataacaatgttgtagattcgagaaggccaaaacctccatatgagatagaaaagcattctgggctgctgggctttaaggcacgacacaattcccgtgaggctgtctacagtcggtttctgttctataaacacttctatgccaatgagtacccaacaattcttacggagggaaagactgacaatgtgtacctcaagagcgcgttgtctgaattacagtcttcgtaccccaagctcgttaatccgaagaccaattctaagccctataagcccaaattgaaatttcctgacctagataaacgcactatgtatttcttagatcttggagatggagctacccccttcttacggttcatcaagagatatgaggccgaaaggtcatacttccatgacaataaggctaaatctcccgtgattctgattctcgacaacgatgatggccctagtacaatcttgaagcatctggcaaaagaggtgaagtcctgccccaatagcgtagacgacatcaaaaaatcaggcttcctccacatatttcagaacctgtacctgatcctgacgcctcttaagtcaggaggtaaagatagtatgatggaggatttgttcgacacaaagactctgaataccaccattgacgggaaaacattttcaactcagagttcttttgacggctctaagcactatggtaagcatgtgtttagcaccaaggtgattcggtcgcagaagtcctccgttaactttgatgggttcaaacacatctttaacgagattgagaaagtgatagcccacttcgagaaactctga

SEQ ID NO: 8422 - RNA, 1719 nt, synthetic construct
  source 1..1719: mol_type = other RNA
atgcttaaacaaatcaaaacaaaaccagagctggctgctttgttgaagatttgtccttcgtttctgaccaacaccctctacataaagaagtcaaccactaactatcatgactttgagattcccaagaagtccggtggggtgagaactatatctgcgcctcccgaagatctaaaggaaatacagaggaagctcgccgacctgctgcaggactgtaagcaggtgattcacttcgataagtcaatcaaatgctcccttagtcacggatttgaacgcgaaaagtccatcattactaatgctagtatccacaagcgcaaaaaaactgttttaaatctcgatctcgaggattttttcggcaagtttaatttcgggcgcgtcagagggttcttcatctcaaacaaagatttccgtctggatccacatattgccacggttgtcgcacaaattgcctgctacaacgacaagttacctcagggatccccttgttctccagtaattgctaatctcatcaccaattcccttgacataaagttatccaaaatggccagaaagtacggctgttcttatacaaggtacgccgacgacattacattttctacgaggaagattgagttcccaaaaagcattatcaaaaacaatgtgccgttagaactgggcggaaaactgctgggcgaaatccgtcggtcggggttttctgtcaatcctaataaaaccaggctgcaattcaaggatagcagacaggaggccaccggactcgtcatcaataaaaaggtgaatatcaagtccgagtattggagagatactcgagccatggcgcatcgcttgttcaagaagggcaaattcgacgtatacgatagcgacggaaacgtgcgcgatggcaagataagcgagctggaaggccgactggccttcattgacagcatcgattacttcaacaacgtcaacagtaagaataaggtggataaacagaaaaacggcgggctcaattcccacctggaaaaactgaatagccgggagcggatatatgctcggttcctgcactataagaacttctttgcaaatgaacaccctactatccttaccgagggcaagactgataacgtttacctgaaggcagcactgtgcaacctccagaacatctatcccaatttggtgagcaagaaaaccgacacgtcacagtacatccccctgcttcgattccccaacctgaactcaaaaaccatgtattttatggatctgggtgacggtgctactccatttctacggtttgtgcaaaggtatacagtcgatttcaattactacgagaatcagaagcccaaaagcccggtgattatgatcctagacaacgacgacgggcctaaaacattgctgaaccatcttgtcaaaaacattaagagttgcccgaatacattgcccgaattgaaaagtaagggtttcgtacacctattcaagaacctgtacataatcctgaccccactcaataccgacggatctgattcaatgatggaagatctttttgacaagaaaacactcggcacagtgttagacgggaaaaccttttctacagagaagagctttgacgagaagaaacattacggaaagcatatctttagttctaaggtggtgagaagcaataaagcaaacgttaacttcgacaagttcacgtatatctttaacgagattgagaaagttagggcccacttctccaccctcaaattttga

SEQ ID NO: 8423 - RNA, 1758 nt, synthetic construct
  source 1..1758: mol_type = other RNA
atgataaggaaaaggcggtacctgctgctgaagcgagcaaccacaaagccagaactagctgatcttatgaacattgacccaagctttctgacccgggttttgtatgttgaaaagacaaagagtcactatacggagttcaagattgacaagaaaagtggaggcttcagaactattttcgcccccagtgctgagctgaaggatattcagcgatccttatcagatttgctgctcgattgcaaagatgtcattcaatttgagaagggcgttaaattcactctgtctcacgggttcgagcgagagaagagcataatcactaatgcgtccgtccaccgcaataagaagaatgtgctcaaccttgacttggaagacttcttcggatctatcaacttcggccgggttagagggtacttcatctctaacaacaactttaacctcgatccccacatcgccacggtgattgcccagattgcgtgtcataacaattcccttccgcaggggtcaccttgttcaccggtgatctctaatttaattgcccaatctctggatatcaagctaagtaagatagctaggaagaatggctgcagctatacgcgctacgcggacgacatcaccttttccacaaggaaagaaaagttctcaaagagcattgtaaaggacgtggagaatgtcaaggtcggttccgtggtcctgaaggagatcaaacgatcgggattttctgtgaatgacaaaaagacacgtgtgttgtttaaggattccagacaggaagccaccggactggtgataaataaaaaggtcagcgtcaaacgggagtattggagggagactagagcaatggcccattctctgttcaagaaggacttcttcgaaatccaggaaggtaattcaaacgctagaaagggtacactgagcgaattggaagggcgtctaaacttcatcgattccattgaccactacaataacatccatgaggagaaaaaacctgcccataagtatgagcttaaaaaacactcagggctgtacgactacaaaaacaaactcaatagtcgggagaaagtgtactcaaagttcctctactacaagtactttattagctccgagttctccaccatcctgaccgagggaaagactgacaacgtatatttaaagttggcattgagctcaatgcgcaatttgtacccaaaactcgttgaagtggacaaagagactaaactgtaccgcccactgcttaaatttcctaacctcaacagcaagacccgttattttctagatttagatggaggcgctagccactttaccagatttgtgcagcgctatgtgaaagagtgtgagtactatggcgaacggaaacctaagagccccgtgatcatgatactggacaacgatgacgggcccaagtctctgctgaaccacctggctaatcatgtcaaaagttgccccaataatatcgatagtatcaggggttctaaacatctgaggctctttaagaacctctacctcattctcactccactgggcgaatattctaaggaatcgatgatggaagacttatttgagcctaccctccttgacacaaaacttgacggcaaagcatttagtcgcaacgataagttcgatagcgacaagtattatgggaagcatgtgttctccacaaaagtagtagccaagaataaagcacaggtgaattttgacggctttaagtacatcttcgatagaatactggaggtgaacaaacactacgcctccctggataaagtttga

SEQ ID NO: 8424 - RNA, 1743 nt, synthetic construct
  source 1..1743: mol_type = other RNA
atgatccacaagcggaactaccttctactcaagctagctaaaacaaagccggagctggcagccttactgaatatttcaccctcctttctcacccgagtgctgtatcacccaggggtcgaacatcactacaattctttcacaattcccaaatcaagcggcggcgccagatccattaatgcaccttcgaaagaactgaaagacatccagaaaagactggcgaatctactgttggactgcaaggatgtcattctgcgggacaacaaagtgaaatgtactttttcccacggcttcgagcgcaaaaagtccattatcacaaacgcggctcagcaccagaacaagaaggttgtgctgaatttggacctgagcgatttcttcggctccttcaactttggacgggtgcgggggtttttcattagtaaccgatatttcaagctggatccacatatcgcaactgtgattgcccagatcgcctgctttaataacagtctcccgcaaggctcaccatgctctccgattatttccaacttgatcagtaatagcctcgacatcaggctgagcacacttgcgcagaaaaatggatgtacttatacaagatacgctgatgatgtcactttttctaccagaaagccaacactgcccaccagcattttaaaagagctaaatcctgtgacactcggatcacgcctgatcaaagagatcgagtctgcaggtttcctgattaatcataagaaaacgcgggtgcaactgaaagacagcaggcaagaggctacaggactgatagtcaacaaaaaggtaaacattcgtgccgaatactggcgtgatgtgcgagccatggcccatagtcttttcaaatacgggtcttacgagatcaaggaaatgaacggcaataaacggaaaggtaccatacaggaactcgaaggccgcttgacctttatcgatcatcttgaccattataacaacattatccgcagcaaaaagccaaagcccatcttcgagcctgccaaacacttagggctgtttcacttcagaaataagctgtcttcccgcgaaaaaacctacagcatctttctgttctataaacacttctatgctaacagctatcccactatcatgacagaaggcaaaaccgacaacatctacttaaagtgtgctttgaactctctccaaaatgagtatccctctcttgcaaagaagaaatccattacgcagcagtatgagcctaagctctctttcttaaacttgaacaagaagacgatgtactttctggacatagagggaggtgcctcccactttcagaggtttgttgccaggtacgagtcagaatttaagtactttaccaatcagagcccttcagctcctgttatcatgatcttggacaacgattcgggcccaaatgccctgatcaatgacctctcaaaaaagcagagctctaatagtgtccctattagaaagcagaggtttactcatatcatccacaatctgtacctcatactcactccccttggtaatagtgaaaacacgatgatggaggacctgttcgataagaacaccctttcaataaagatagacgggaagagcttttccaagaaggataatttcgacattaagaaggagtatggaaaacacatcttcagcaccaaagtgattacccaacatagggacactatagatttccacaagttcaagtacatcttcgatgcaatagtagatgtttgctcccattttagtgggaacaaggggtga

SEQ ID NO: 8425 - RNA, 1758 nt, synthetic construct
  source 1..1758: mol_type = other RNA
atgataaacctcctcccatacttcctgctgaagcaggccaaaagcaaatcggaccttgccagcgctctgggcgttaccccaagtttcttaaccaacgtcctttatcgacagaggcccgaaaacctatacacagactttgacatcaataagaagtccggagggaaacgcaccattagcgcgcctagtgatcagctgaaggacctccaacgcaggttgtcagtcctccttctgaactgcaaagacgctatccactataaccaggggactaagttcacagtgtctcacggctttgagcgagaaaaaagtattgtaagcaatgctgctgtccaccggaacaaaaaaaacgtgctcaatctggaccttatggatttctttggcacgatcaacttcggcagagttaagggcttctttgagaagaatcggagttttgcattagcaccggaggtagccctgactatcgcacagatcgcttgctaccaagggaagctgcctcagggatctccatgttctcccgtgatagctaatctgatagccaacaccttggacatgcgtctggttaagctggccaaaaaatgtggatgctcctacacacggtatgccgacgatataacctttagcacgaggaagtctgcgtttcccaaagaaatagtgaagttcaccgatgggcattcatatgagctgggcgggaagctggtgaacgagattaaacgcgcagggtttgacattaatccagacaagacacgcgttcagtaccaaaactcccgacaggacgttactggactgattgtgaacaagaaggtgaacgttaaaagtgagtattggcgcgaagtgagagccatggcccatcagcagtttaaaaaaggttccttccacatcgctgactcagacggtaagccacgtgccggcgaactgagcgagcttgaggggaagctcacatttatcgaccaagtcgataagtacaataacattcagcggaagaaacagcccaagattctgtttagcttggctcctttgaaactttcagaacacagactgacgcttaattctagggagaagacctattctaggttcctgtattacaagtacttctacgccaataactatccaactatcctgaccgagggcaagactgacaacgtgtatctgaagtgtgccctcaataggctacagaaagattaccctacgttagtggagtctacacattccaaaacaactcagtataaacctaagctcttgtttccgcatctggataaacggacttactactttttggatctagatggtggcgcaacccactttcttagatttattcagagattctccgaagagttcagctacttcgagaatcaaaaacccaagtcaccagtgatcctcgtcctggataatgatgatggacccaagactatcttgacccatctcgccggaaaagtgaagaattgccccaataccgtagatgagattagaaataagcccttcattcatatcttccacaacctatacttagtgctgacacctctcagcgggggcggaggtacagcgatggaagacctcttcacccaagatactttgcagcaggtcgtcgatggaaaagtgttctccaggaaggacaaactggacaccaataaggaatatggcaagcacatcttctcgacaaaggtggtgcgggacaaaatgcaggaagtcgattttgcaggtttcaagcctgtcttcgatgccatcttagcagtaaacgctcacttctcccgcctgagattttga

SEQ ID NO: 8426 - RNA, 1764 nt, synthetic construct
  source 1..1764: mol_type = other RNA
atgagtaagaataagtctctgctgaaattgcaggaggctcagactaagcccgacctcgctaagcttctcggactgaagagccatttcctcacatacatactgtacaaaaccgacatagactctcactacaaagagtttgaagtgaaaaagaagacaggcggcgtgcgagtcatttcggcacccagccctgaactgaaggatatccaacgcagactcagtaaactcttgctggactgcaaggacgccattatggtcaagaacgacattaaaaaagagtgtatgcttagccatgggtttgagaggcacaagtccatcgccagcaacgcttatgttcacattggaaagaagaatgtgctcaacatcgatctggaggacttcttcggcacaatcaacttcggaagggtgcgggggttttttataaagaaccgcgattttcagttggacccagatgtggcgacagtccttgcccaaattgcttgtcacaataataaacttccccaggggtcaccatgctctcccgtgattgcaaatctgatcaccaactctttggacatcaagctctccaaactgtcaaaatccaagggttgcagttatagcaggtacgccgacgacatcacaatttccacgcggaaggcagaattcgacaaaagcattgtgaagttagtaaacggtgacataactttggggaaaagactggtgcaggaaatctctcggtccgggttcagcatcaatcctaagaaaacgcgcgttcagttcaaggatagtaggcaggacgccactggacttgtcgtgaacaaaaaagttagcgtgaaatcagactactggcggacagtccgtgccatggctcattcccaatttaagaagggctcatatgagacagttaataagaaaacgggtctggtgatgaaaggatctctagccgagctggggggtaagctggcatttatcgattcgattgatcggttcaacaattatctgaagaagagtcatcccaagccaatctacgagttagttcagcacaagaagtctgcaagttaccgcaatcgactgaatgggcgagaggcggtatattcaagattcacatattaccgcacattttacgcaaatgagtatccgaccattctgaccgagggtgttaccgatccaatctatctcaagagcgctctgtacggacttagacaaatgtaccctaacttagtgcgtagaaaactgctggataaaacctataagcccaaactactatttcctgagtttgactcaaggactaaatacttctgggatctggatgatggcgccggcaccttctccaagtttctggagcgctttgagtccgaatttcattacttcaagaaccagaagccaaagaacccggtaattctggtgttggacaacgatgacggcgtagggactttacttggcaagttgaccaacaaaaagtatcctaattgtcctgtgaaaaccgaggatatgagaaaccaggaattcactcacatattccacaatctctatatgatactcactccacggaaaaaaggccaggcggaatcagatatcgaggaactttttgatgagaagaccaaggctatcaagctggatggcaaatctttctccaaagaacctaaccccgaaaacgaatacggaaaaaagccatttgccctcaaggtcgtcagagccaatagggatactatcgacttcacgaattttaaacccatcttcgacaccattgaaaaggtgaaactagacttcgaaaaaaggtacagctga

SEQ ID NO: 8427 - RNA, 1815 nt, synthetic construct
  source 1..1815: mol_type = other RNA
atgccagctgcccagggtagcgtgtacaaacccacatttttcttgcctatctatgtgacattcatgaaatcaactcagcaggactcgatcgactgtctgaatgagctgaaaaatgcaaagactaaatctgacttagcccacatcctcgggattacacctagcttcctgaccagagttctttacgtggaaggcacccagaatcaatacgtccagttttcaattacaaagcgcagtggagggacacgcacgattagcgctcctagtattgaactcaaagacattcaatctcggctgtctaaactgttgttggattgcaatgacgcacttaactttagagaaggacggaaaggaggcgcgagccatggatttgagcgcaaaaaatctatcatcagcaatgcggagaaacacaagaaccagaagaacgtacttaacttagatctggaggatttttttgggactgtgaacttcggaagaattaggggttacttcataaaaagcaaggatttcgcactgaactctgacgttgctaccaccattgcccatattgcatgctatgacagaaaactaccacagggctctccatgctcccccgtcattgcaaatctcatcgccaggatccttgatgtgcggctggtcaaggttgctaagaaatatggctgtacttacacacgctacgccgacgacatcacattcagcacaaggaagaaggtatttccctccagcattgtggagtctgtgaatgataaagatgtggttttggggactagtattacgagagaaatcagaaaatgcgacttcaagattaatcacaagaagacacgggtgcagtttaaggatagccgtcaggatgtgaccggcttaatcgtgaacaagaaagtcaacatcaagcgagaatactggcgtgacgctcggagcaagtgtcacaaactgttcacagacggagagttttttaccaaaaactccaatggcgataaagtagttgggaaaatcaaggaattggagggcaccctcacttttattgattccgtcgacgagtacaataacaaacggccgaagggctatgagaagccagttttccagaaaattcacaagcagaagcattaccgaatacgactcaacgtcagggaaaggacctattcagagttcctatattacaagtggttttgcgcgaatgaaaccccaacgattttgaccgagggtaagaccgatgtcgtatacctcaaggctgcactgagtcagctggccagcgattaccctatgctcgccaagtcagaaccatataagcctcagatcaatttctttggatgttctgggaagacaaattatttactgaatctggacggcggtgccgctcattttatagactttgtgaactcctatgagctcaatgcctccatgtacaagaacataaagaagacgtcccctgtgatcatgatactggataatgataccggtcccgtgaacctgcttaaccaacttaaagggaaatacggactcccccaaactgttgacgagatcaggaagagtaatttcctccacatcaagtcgaacctgtatctgatactaactcccctgaatgggtcctcaaagaccgacatggaagacatgttcgaggatcacgtgctgaacgccgaagtcaaaggcaagaagtttaataagtccaacaacatcaacactagtaaagagtatggtaagcatatattctcactgaaggtggtccaagctcgcaaaagtaaaatctccttctcaggcttctgtccgatcttcgatgccattaacaatgtgatcaaccactacgacaaaatgaagtcctga

SEQ ID NO: 8428 - RNA, 1794 nt, synthetic construct
  source 1..1794: mol_type = other RNA
atgcgcaagggtgttccagcctactccaatctttcagaaatcatctacatgaggaacaatatgtccagcttgaacaaattaaagtctgcccgaaataaagtagagctggcaaaggtgcttggagtgagccccgtgtttatcaccaacatattgtacatcatcaagaaggagaatcagtatacaacctttaccattaagaagaagtcaggcggggacagagtcattagtgcccctaatgactccctgaagaacttgcagcagaagctgtctgacgtgttgctcaattgccttgaccaaattcggaaagacgagaacatctctactaatataagccatggattcgaacgcaagaaaagcataattacaaacgcgatgaaacacatcaagaagaaaaatgtgctgaatctggatctcgaagacttttttgattgtttcaactttgggagagtcaggggctttttcatcaaaaataaccgattctcgctgaatgaggaggtagctacagttatcgctcaaattgcctgcttcgataacaaactgccccaggggagtccgtgttctccagttatcacaaatttaatatgcagctccctggacatcaagttgaataaactcgcaaagaaaaacaagtgcacttacactcggtatgccgatgacattacctttagtactaacaagcaatcgtttgacacagagatcgtgtccagcaaatcgacattttcagacatcattattggtaacgagcttgataaagaaatcaaaaagagtgggttcaagattaactccaggaaaactaggcttcagaccaaaaacagtagacaggatgtgaccggcctagtggtcaataagaaaatcaacacaaaggtagagtactctaaaagcgtccgggcaatgtgtaacactctgtttaaaaccggatcctatacactgattgatcgcaaaacgcacgaagaacggaatggaacggtgaatgagctcggcggtatgttgtcatttattgactacattgaccgttacaacaacatcatctacaagaagtcaatagatcgccccataaataataaggtcaagatcgagaagaagctcaacaaacgcgagcgagtgtattccgacttcatctatttcaacaagttccataacaacgatttccctactattattactgagggtcacaccgatcagattcacatcaagtgtgctttaacctcactgaatgggaactataataacctgattgagaaccatgacaaaaactatcacctgaagtttagattcctcaaactgtcaaacaaactcaaatggctactgaatatatccgagggaaccgatcctatcaagaagttcattagcaattacatctgcaactatcgtaaatatccttgcttcaaggctaaaaagcccgtgatcattatacttgacaatgactctggcagcaaaggctctggcgggatactgagcatcctgaccaatggaagtttttctaacattacggaagataggaatagtctgagacggaagaactacattcatgtgtacgaaaacctctacattattttcaccccaatgattagcgataaagattcttgtatcgaagacctatacgacaaggaaatactcgaaacgaagttaaatggcaagaagttcaagaattctaacatcgacctgaaagttgatgagtattccaagaatcacttcgccaaatatgtcatacagaataacatcgagaacatcaacttttccaatttcaaaagcatcctcaatacaatcgatgaaatcattaggatctaccagtga

SEQ ID NO: 8429 - RNA, 1728 nt, synthetic construct
  source 1..1728: mol_type = other RNA
atgagctccctgacgaagctgaagtccgctaagaataaagtcgaattggctgctgttctaggcgtgtctcccgtattccttaccaagactttgtacaagataaaggtggagaatctctacacctcctttaccatcaaaaaaaaatccgggggcgatagggaaattttagcccccgacgactccctgaaagaccttcagcagagactcagtaacattctgctcaattgtctcgacgacatccggaaaaatgaatccacgagcaccaatatctcacatggattcgagcgaaagaagagtattataactaatgccctcaagcacactaagagaaaaatagtgttaaacctggacctagagaactttttcgattgtttcaactttggacgggtgcgcggctttttcattaaaaatgacaggttcctgctgaatgaagaagttgccaccgttattgcccagatttcttgtgtgtataataagctgcctcaagggtcgccttgttcaccagtgatcactaatctgatctgctcaagtttggacataaaactgaacaagatcgcacgcaaaaataaatgcacctacacccggtacgccgatgacatcacattcagcacttctaagatctcttttggtaatgaaatcgtttcccccaatagtacgaataaagacattgtgctgggtaaaaagctgaagaaggagattatcaaatcagggttcacaatcaactacaagaagatcaggattcaaaacaagaattcacgccaggatgtaacaggcctagtggtcaacaataaggtgaacaccaagatagaatatcacaaaaacgtaagagcaatgtgtcacaacctgtttaaaacaggcaactttaacctgatcgatagagagactaaaaaagaacgtattggaaccatagatgaattagagggcatgttgtcgtttattgacaacatcgacaaacacaacaacatcatctacaagaaaaacatcaagaccaacagcaagaagagcaaacttgagaagaatctcaataaaagagagcgagtctattcagatttcatttacttcaggaagttccactctaatgaactgcccacaatcattaccgaagggcatactgaccagattcacattaaatgcgccctcacttcactctactccgactttcctaacttgatcgagatgaagaatgaaaactaccatctgaaattcaacttccttaaactatccaagaagaataagtggctgctgggaatgggagagggcacagatccaatcaggtttttcattagcaactacatcaagaactacaataagtatccgtgctttaaagcaaagaaacctgtcatcatcctgcttgataatgacagcgggtctaaaggctctggcggaatcttatctctgttaacacaagggacctttagtaacataaaagagaatcgtaacgagctccgcaaaaagaagtatattcatgtgtacgagaacctgtatgtgatatttacaccactcatcaagggtaatgatagctgcattgaagatctttatgatcggaaaacacttgagaaaaagctcaacggtaagaagtttaagaatagcaacctcaatctgaagccagacgagtatagtaaaaaccatttcgcgaaatatgtcatccaggataacatcgagaacataaacttcgacaatttcaagcagattctggagagcttggataagattatattggagtattga

SEQ ID NO: 8430 - RNA, 1746 nt, synthetic construct
  source 1..1746: mol_type = other RNA
atgaaaagtcgcagtttggatcttctgagacagactaacaacaaggtggacctcgctaagctcctgggagtgtcgccagtattccttacgaatactctgtaccgtatcaaggttgagactctgtataatcagatcaagatccctaaaaagacgggaggcataaggtacatctattcccctgattcccgcttgaaagagattcagaggaaccttagcaacctcttattaaactgcctagatgagattcgggctgaaaacaaaactaaagcaatcatttcccatgggtttgagcgcgagaagaatattatcactaacgccaagaagcatatcaataagaatattgtcctgaacctcgatctagaaagctttttcgactctttcaattttggccgggtccgggggtttttcatcaagaacaaatacttcctgctgaatgacgaggtcgcgaccgtaatcgctcaaatatcatgccttaatatccaaattggggaacgtaaaatcagcatcctcccccaaggttcaccgtgtagtcctgttatcaccaatctgatatcttcctccatggatattaaactgaatagtctggccaaaagaaatcgatgtacatacacaagatacgccgacgacattaccatctctacaaatctgatgtctttcgggaaacagattgtcaaagacgtggacgagaacaataacgtctctctgggaaataagctgatatcttacatcgaaaagagcggatttgtgatcaatgataagaagacaaggatccagtacaaaaatagtcggcaggatgtgaccggtcttttggttaacaagaaaattaacccatcacgcaaatattcagacattttaaggagcatgtgcaattcactctttaacagtggggaattcgaactgattgacaaggaaaagaaaaaacgcaaaggcacaataaatgaattggagggtaagctttcatttgtggaccagattgataggttcaataacaaagatatcctctctaaaggaggggtgctgttgaaaaatagacgagagaacctatattccaagttcatctacttcaagaagttcatctttaacgacgaagtcaccgtgataactgagggccacacagatcacatttatattagaagcgccgccatctctcggaaggataaatttaatgacctgatcaaggaggacaataagaaaatcaagctgaacttttccttcctcaagatcaacaataagattgagtatctgctggacgtgcgcgaaggcaccagctccattaagaagtttatcgagaggtttcctgagaactactcaaagtataacattggcaaacccaaaaaacccgttataattatcctggataacgattccggtagttccgggtccggcggaatatttcagttgctcatctcggacaagttcaagaacattactaatgataaggacgaaatccgtaacgtggaatttattcacgtgttcggcaacttgtacatcattttcaccccactgaaagatggaaaagacacaagcatggaggacctttttagcgatgagatcttaaacaagaagatgaacgagaagaagttcaatagaacgaacaagaagtgtaaaaacgacgagttcggcaaagattattttgcacggttcgtgatcaaacccaacgtaaaaaccatagactttagcaaattcgacaccatattcaatcgaataaagctcgttattagcgattacgaaaagaaggagatttga

SEQ ID NO: 8431 - RNA, 1758 nt, synthetic construct
  source 1..1758: mol_type = other RNA
atgactagccccttgattaagcttaagtcgtgcaagagtaaaccagatttggcccaccttttgagactggatcctgtttttctgactagggtagtttatatccggaacacagacaatttgtacacggattttagcattaagaagaaaaacggaaccaatcgaatcataagcgccccagactcagaactgaaagaaattcagtccaaactgtctaaattgctgcaagactgcttggatgacatacgcgagtctctgaaactgaacaatacaatttctcacggctttgaacgcaagaagtccatcattactaatgccgagaaacataaacgtagaaagtggatcttgaacctcgacctgtctaacttttttgacgaattcaatttcggcagagttcgcggctacttcctgaagaataaaaacttcagccttgacgagacaatttgcaacctgatcgctaagattgcatgttataagaatcggctcccccagggatcaccttgctcaccagtcattaccaacttaatattactgtcactggaccagcgactgaataagatctgtaaatctgtcggttgtacatacacaagatacgctgatgatatcacaatctctacgaacaaatcgttcttcccgactaaaatagtgacaagttacgacaacgagagtatcgtcctcaacaaaaaattcctgaaggagatcacatcatctggcttctcccttaatgaagataagattaggctgcacaataagacctatcggcaggaagttaccgggctcaccgtgaatcaattcgtgaatgtgaatgcaaagtacgccaggaaggtccgcgccatgacccattctctgttcataaacgggatttttcatttagtggacaagaagactcgtgagatccgagcgggaaccattaacgaattagctgggatgctaggctttatcgactcccttgacaaacacaataataagaacattcgcgataggaccttgcagtatagcaataaggataagaagctagagcacaacaagagggaaaaactctatgccaattttctctactacaaagctttttacgctaataccaggcctatgataattactgagggtaaaaccgacatcacgtacctgcgggtagccctgaacagcctggcaggcagttatccctccctcattgagaaaaagctcgtcggttcagacagcatttgtgattacaaactcacctttttcaagaattccggcaaaacaaagtattttctgaatctggacggcgggacaggacatctaaaagatttcctgagcaaattcgacaagaaatccaaacagtataagggcaacgaaaacatgaatccagtgattatgatcctcgataacgactcaggatctgatggctccggggggatttttagtatcctcaatggtaagagcttccccaatataaccagtagcaaggatgaacttagaaacaaagagtggttatgggtgatccagaacctgtatatcatctttactcctctgaacggagcgaaggattcctccatggaagacctttttgacaaagagacgcttgatataaaactcgggaacaaggtatttaacaagaccaacaagccgtgcactgagaaccagtatggtaaggaggcattcgccactggagtggtgctgaaacaacgggagaacatcgatttcagtggattctccctaatcttcaatagcatcgtgaagatcattgagcactacaacagcatcaagcagatgaattga

SEQ ID NO: 8432 - RNA, 1737 nt, synthetic construct
  source 1..1737: mol_type = other RNA
atgccaactcgcctggaaaaactaaagaaatgtacgtctaaacccgactttgccagactgcttggggttgatcctgtgtttcttacacgtgtcgtatacatccgcaatactgaaaagctctacacagagttcaagataaaaaagaagaacggggatgaccgaattattagtgcaccagacaaagagctgaaagagattcaaagtaaactaagcaaactgctgctggactgcttagataacatcagaagttccctggagatcgacaacaattttagccacggcttcgagaggaagaagagtattatttcaaatgccgaaaagcataagaggaagaagtggatactcaatattgacctgaagaactttttcgatgagttcaattacggtagagtgagggggtacttcttaaagaataactacttctcccttaacgaaaacatttgcaatttgatcgcaaagatcgcgtgctacaaaaataagctcccgcaggggagtccatgttcccctgtgattacaaaccttatcttactcagtttagaccgacgtctcaaccagatctgtaaaaatagcggctgcacatatacccggtatgcagatgacattaccatatcaaccaacaaaagcattttccccaagaaaatcataagctcctatgaggagaattctatcacactcggtaagaaattcatcaacgagattatcagctccggatttaccttgaatgagaaaaagattcggcttcatgatacaacacacaggcaagaggtaacgggcctgaccgttaaccagttcgtgaatgtggagaataagtatgctcgcaaggtcagagccatggtacactcgctgttcaccaagggagaattttacctgatcgataaagttacgcaggaggcgaggttagggaccgtgaacgagctaacaggcatgctgggatttatcgactccctcgataagtacaacaacaagatcctcaagaataccataaagcagtcaaacttcaatatcgagctgaataagcgggaaaagatctatgccaacttcttgtacttcaagtctttctactttaacgctaaacctgtgcttttgactgagggcaaaactgacatcacgtatctgcgggtggcactcgacagcctggcctataaatatcccgacctgatcggatataaagaaaacggccggaacaaaataagggactacaagctaacttttttcaagaattctccaaagaccaagtatcttctgaatctggacggcggctctagccatctgaaggaatttctcaacaacttcgagaagaaggcccgaatatacaagactagcggtgagattaaccccgtcattatcatattggataacgattctggttccggggggaacaatggaatctttgagagtctgatgaacaaattgcgcggaaaaatttcatcgaaagaagaactgagaagcaaaaaatggatttgggtgacccagaatctttacattatctttactccgctgaatgggaaaaaggagtccagcatggaagatctgtttgataaagacaccctcaacattaagttgggaggcaaagtctttaatcgcactaattctaagtgtaccgctgaacagtacggtaaggaagtttttgccaatggagtggtcctcaaaaaacggaagtctattaatttctcaggcttttcacctatcttcgatgctatctcagaaatcataacatatcacaactcctccaaatga

SEQ ID NO: 8433 - RNA, 1722 nt, synthetic construct
  source 1..1722: mol_type = other RNA
atggccactcggttggagaaactgaaagagtgctactccaagcccgattttagtagacttttgggagtagaccccgttttcctgaccagagtcatctatattcgcaatacagacaagctgtactcggaattcacaattaagaagaagaatgggagtgatagagtcatatccagtcccgactcagagttaaaggaaatccagagcaaactaagtaacctcttgcaggattgtcttgagaatattcgggagagcctgaaactggaaaacaatttgtcccacggctttgaaagaaagcgtagcatcatatctaacgcggaaaagcacaaacagaaaaaacgcgtgcttaacctagacctctccaacttcttcgatgaatttaactttgggcgcgtcagggggtatttcttgaaaaacaaccagttcctgctcaacgagtccatctgcaacctgattgcgaaaatcgcttgttataacaacaagctgccacaaggttctccctgtagcccagtcataaccaacttaatcctcctgagtctggaccaacgcctcaacaagatttgtcgtaatgctggatgcacttacaccagatacgccgacgacatcaccatatcaacgaacaaatccattttcccaaagaacatcattacttctcacgaggacgatttagtgacccttaacaaacggttcatcaagaagattacaagcagcggcttttcattgaatgaaagaaagattcggctgctggacaccaaatgcaaacaggaggtgacagggttaacggtaaataaattcgttaacgtggacgacaagtatgcccgaaaggtgcgcgcaatggcccataggctgtttattgacggagaattccacctgatcgataaaaagactcataaaaagagggtaggcaagatcaatgagctggcagggatgctcggatttatcgattcgctggataagcataacaatacatttccgcacaataagaagctgtcactcaataaacgagagaggatttactccaagttcatttactatacagccttttgcgctaacaccattccaacaatactaactgagggcaaaacggatattacttacctcagggttgctctgaatagcctcgccgacaaatatccgaacctcatcggtgataaaaaggtggcaaacgaaactgtgagggactacaaggtgaaattctttaagaatagcgccaagacaaaatactttttgcatctagatgggggtagctcacacctcaaggagttcctggtttcttttgacaaaaaaaccgacggctacaagacggttcggaatagtaatcctgtcataatgattcttgacaacgattctggttctaccgggggaaatggcatcttccaggctctgatcggcaaatctttccctaatataacaatgagccgagatgaacttcggagccagaaatggatctgggccgtgaagaatctgtatatcgtctttacccctctcaacggaagtaaagattcctccatggaggatcttttcgacgtgcctaccttacaaactaaactggaaggaaaggtgttcaatagaaccaatgagaagtgtgctgagaatgaatatggcaaggaggcattcgcaacaggcgtggtcctgaggcagcgcaagtcaatcgacttttccaagttttcatctatctttgactccataatcgagattatcgatcatcacaaggataaggaatga

SEQ ID NO: 8434 - RNA, 1725 nt, synthetic construct
  source 1..1725: mol_type = other RNA
atgacaacacgcctcgagaaactgaaagcatgcaacagcaaacccgatttcgcacggttgttgggcatcgatcccgtctttatgacacgtgtcatctacattaggaatacggacaacctctatagccagttcgccattaagaagaaaaacggatcagatagaatcatatccgcccccgattctgaactcaaggagatccagtcaaagctttctgacctactccaagactgtctcaacaattttagggagaatctgaaggaagataaccacttttcacatgggttcgagagaaacagaagcattataaccaatgctgaaaaacacaagtcaaagaaatgggtgctgaatatcgacctgtgcaacttcttcgacgagtttaattttgggcgcgttagggggtattttttgaagaacaacaacttttccctgaacaccgaacttagtacactcatagccaagatagcatgtcaccaagacaagctcccacagggttctccgtgttccccagtgatcaccaatttaattctggtgtccctggatagaaggcttagcaacctttgcaattcagtgggttgtacgtacactcgctacgccgacgacattaccatttccaccaataaaaaggagtttcccaaaggtatcatccgggatcatgacgagaagagtatcaccctgaacaacaaattcctgaatgagatcacctcatctggattcaagattaatcataacaagctgcgtctgctggataaaaagatacggcaggaagtcacagggttgactgttaatagatttgtgaacgtcgatagaaggtatgctaagactgtaagagcgatggcccatagcctgttcaaaaaaggcgaatatactctgattgacaagaagacccggaaggaacgggttgggaatatcaatgagctaggtggcatgctgtctttcatcgacttcgtcgataagtacaataatcggttaccacatagcataaagtcgtcccacaataaccgagagaaagtatactcggattttctgtactattccgctttttgggccaacaccaagccaacaatcctgactgaaggcaagaccgatattacctatcttagggtggctttggacgctgtgagtgaaaagcaccctaatttgattgggaacaagaatcctggaaacaaaacagttcgagattacggcattaagttcttcaagaacactagtaagacaaagtaccttctcaacctggatggcggagccccccacctgaaagactttatagtgggctttgagaagaaaaccgaggcattcaaagttatcgcgaatcagaaacctgtcatcgtgattctggacaatgacagcggttccgctggagccaatggaatcttccaaatcctcatcggaaaatcttttccgaacattactttaacccgcgatgagttacgcaaccagaaatggacttgggtgacacgaaacctatacattatattcacgcctctaaacggcttgaaagatagtagcatggaggacctctttcacagtagcgtcctgcagacaaccctcgggggcaaagtgtttaaccgtacgaatacaaagtgcaaagacaatgaatatggcaaagagttcttcgcaactggagtggtacttaaaaagaggaagactattgacttctccaacttcaactacatttttgaaagcatctctgagatcatcgaacacaataattcccgcaaaaagtga

SEQ ID NO: 8435 - RNA, 1725 nt, synthetic construct
  source 1..1725: mol_type = other RNA
atgacaacccgcctggataagctgaaatcttgcaatagtaagcccgatctggcccgtctactcgggatagatcctgtgtttatgacccgcgtgatatacattcggaacacagacaatctctactcacaattcaccatcaagaagaaaaatggatccgatcggcatattagtcctccggatccagaactgaaagagattcagtccaaattaagcgatcttctccaggattgtctcaataatattcgggagaattccaaggaggagaataatttttcccatgggttcgaacgcaacaggtcaataataactaatgcggaaaagcacaagtctaagaaatgggtgctaaatattgacctgtccaacttttttgacgagtttaatttcggccgggtgcggggatacttcctcaaaaacaaaaacttctccttgaatactgagctatcaacacttatcgctaagatcgcctgtcatcaggacaagctcccgcagggcagtccatgctcacccgtgataacaaatctgatcttgctcagtctggacagacgactctctaacttgtgcaaccgtgctgggtgtacatataccaggtacgccgatgacatcaccatctcgactaacaagaaggagtttcctcgtaaaatcatcaagtcacacaacgagaactctattgacctgaacaaaaagtttctgaaggagatcatctccagcggcttccagataaacctgaacaagctgaggctgttcgatagaaaatgcaggcaggaagttaccggattgacggtaaaccggttcgtcaatgtcgataataagtatgcgaagaaagtgcgcgctatggcccacagcctatttaccaagggaggctacactctgacagacgaaaaaaccagagaacaaagggcaggaaacatcaacgagctgggtggcatgcttagcttcattgactatgtcgacaagcataataatcgcctgcctcatgccactaaaacctctctcaataaaagagagaacgtgtacagcgattttctgtattatagcgccttctgggccaacccaaagcccacgatcctgacagaaggcaaaaccgacatcacgtatttacgcgttgcactggacagcttgtctgcaaattaccctaatcttattgggaacaagaaaatcggcaacaaaattgtgagggattacggtgtgaagtttttcaagaataccaccaagagcaagtattttctgaacttggacggcggggcttcgcacttaaaagatttcatagtcggatacgaaaagaaaacgaacgcattcaaggcaatcgctgaacaaaaacccgttattattgtactggacaacgactctggcagtggaggttccaatggcatctttcagactctcatcggaaaggcctttcccaatatcactctgtccaaggatgaacttagaaaccagaaatggacatgggtcacaaagaacctctaccttattttcacaccattaaatgggctgaatgactcatccatggaagaccttttccacagttcagtgctgcagacaaagttaggtgggaaagtatttaaccgaactaatgctaagtgtaaggacaacgagtatgggaaagagtttttcgcgactggtgttgtgttgaaacaacgaaaagccatcaactttagcaacttcaactacattttcgagagcattaccgagattatcgatcacaatgcctctagaaaaccatga

SEQ ID NO: 8436 - RNA, 1731 nt, synthetic construct
  source 1..1731: mol_type = other RNA
atgaccacgcctctggataagttaaactcctgcaacagcaaacccgactttgcaagactcctcggtatagacccagtatttctgactagagtggtatacatacgcaacactgacaatctgtactcacagttcacgattaaaaagaagaacggaagtgacaggttcatttctgctccagatgacgagctaaaagagatacagagaaaactgtcgaacctgttgcaagattgtctgagtaatattagggagtccctcaaagtggagaataattattctcatggattcgagcggaataagaacataattacaaatgcggagaagcacaaaaacaagaagtgggtcctgaacttagatctgtccaacttctttgatgatttcaacttcgggagagttaggggatacttcctgaagaataacaacttcagcttaaacgctgagatttcaactttgatagccaagattgcttgccacaacaataagttaccccagggtagtccatgttctccagttattacgaatctgatcctttttagtctggatcggcgtctgtcccggatctgccaacaggtgggatgtacttatacacgctacgccgatgacatcacaatttcaaccaacaagagcaccttcccgcgcaatattattaagtccctcgaaaacgaaaagatcaatctgaatcgtaagttcctgaaggagatcacaagcagtggcttttctttaaaccctgagaagatcaggctccatgaccggaagtgcaggcaagaagtaaccggacttaccgtcaaccagtttgtgaacgtggacaacaagtatgccaaaaaggtccgatcaatggtacatcacctgtttacacagggcgaataccagctcgtcgataagaaaaccggcgaaaagcgtaacggaaaaatcaatgagcttgccggcatgctagggttcatcgacagtctggataaatataacaatagcctgagccacgagcgcaatgcaacacttaataaacgagaaaggttgtacggcgagtttaaatactacactaccttttgggcgaatactatcccggtcatcctgacagaggggaaaaccgatataacctatctcaaggtggccctctccagcttggctgcaaaatatcccaatctgatcggagaaaaaaaactttctaacaaggtggttcacgattacaaaatcaagttcttccgaaacactgccaaaaacaagtattttctagacttggacggcggcacctcacacttgaagaacttcatgatgaagtacaataagaagacagacgcttttaaactggtggcaactcagcagcctgtgattattgtgctcgataatgatagcgggagcactggtagtgacggcatctttaacgcccttgtcggtaaatcctttcctaacatcacggactctatggtgaccctccgcaataagaaatgggtttgggtgaccaaaaacctctacatcattttcacaccccttaatggcaaatctgactccgccatggaagacctgtttgaagatagcgtgttgcagagacaactgggggggaaggttttcaatcggacaaacaagagatgtgaagccaatgagtatggcaaagaggcgtttgcaaccgggatagtcctaaaacagcgggacaatatcaatttctccaagttcagctcgatttttgactccgtgatggaaatcatccaacaccatgctcatcagaagtcatcatcttga

SEQ ID NO: 8437 - RNA, 1743 nt, synthetic construct
  source 1..1743: mol_type = other RNA
atgactactcgtttaaagaagctgcagaattgtaagagcaagccagattttgcacggctgctcggaattaagccggtcttcctcaccagggtcgtctatataaggaatactgagaagctctacaccgacttcaaaattaacaagaagaacggcgacaaacggataatcagttctcctgatccggaattaaaggaaatccaatcacgcctgtccacgcttctccaggactgtttaaccgatatccgggattcccacgaagtgattaataatttgagccatggctttgagagagaacggagcattataacaaacgctgaaaaacataagcgcaagaagtgggtgctgaacctggatctctccaactttttcgacgagtttaactttggcagggtgagaggctatttcattaaaaacagcaacttcaagctcaatgaggaggtgtccaatattattagtaagatcgcttgctacaacaatagattgcctcagggaagcccctgtagtcctgtaattacaaacctaatcctgcatagtttggatcagagactgaaccttatatgcaaaaaggtgggctgcacctatacaagatatgcggatgatattaccatcagcaccaataagtctgagttccccaaaaagatcattgcatcctgtgagtcaaatattgtaaacctgaaccagattttcctgaaggagatcactaagtctggattttcccttaattttagcaaggtccggttacttggtaaaaattgccgccaagaggtgaccggactgactgtgaataagatcgtcaacgtttcagacaaatatacgcggaatgtacgcgcaatggccaataacctctttaaaaatggggaattctacctttttgacaaacagacaaatcagaaacgcctggggtcaatcaacgagctaacagggattttcgggtttatcgactctctggataaacacaacaacaaaatcagccataagaatcaaggttcacttaataaaagggagcgtttgtacagtgattttctctactacaaatccttctgcgccaatgaaaaacctatgatactcacagagggcaagacagatattacctacctgaaggttgccctggacagtttggctaaagactatccaacactgattggagacaaggaagaaagaatgagttacgttcgagattacaaaatatccttcttcaagaactcgatcaaatccaagtatctgctgaagctcgacgggggaactccccacctgaaagacttccttgtgaattacgacaagaaaagtagcaaatactcaaagagcaagaatgagaaaccagtgatcatgatcttagataacgactcaggcagcaacggcgggggcggaatctttcagtgtctgctagggaagtcgtttcccaatatcaccatcgactcaaaaaagtctttgcgagatgaaaagtggatctgggtcaccaagaacctctatatcatttttactccactgaatggcaaacaggagtctagcatggaggacttctttgatgaatctgttctaaagaggacgttgtctaagaagactttcaacaggtccaacaacaaatgcaaagacaacgaatatggtaaagaggccttcgccaaaggtgttgtgctgaaacgacgtaagaagatcaacttcaccaagttttctatcatcttcgactccataaacgagataattaatcaccacgaatctgtgaacaatctgaaaaccattgcttga

SEQ ID NO: 8438 - RNA, 1719 nt, synthetic construct
  source 1..1719: mol_type = other RNA
atgacaactcagctcgctcggttaaagttgtgctttagcaaacctgactttgctcgcctgcttgaactggatccagtatttctcacacgcgtcgtctatatgagggatacagaaaaactctacaccgactttaccatcttgaaaaaaaacaagacccagcgggtgatctcagcccctgacgaagagctcaaagagatccaacggaagatcagcgacctgctactagattgcctgactaccatcagaaacgaaaacaagagcaataacaaattgtcccatggatttgagctgggaaagaatattatcactaatgcggagaggcacaaatcaaagaagtgggttctgaatatcgacctgctaaactttttcgatcagtttaactatgggcgggtgtccggctatttcatcaagaacaagtttttcgagttgcacagtaatattgccaacctcattgccaagatagcatgttacaagaataagttaccacagggaagtccctgttcccctgttatctcgaatctcatattgcagtcgctcgaccaacgactgaacaacatttgtaaaaaaaacgggtgcacttactctaggtatgcggatgatatcactattagcacgaacaaaaagaagttccctaaagcaattgtatctaaccatagtgacaaggaaatcaatctgaataacgggttcattaaggagatactaagggctggttttagtatcaataatgacaagactcggctgcgttttaataccctccgacaggaggttacggggcttacagtgaactctaaaattagcgtggacgataaatattcccgcagggtgagatccatggtgcacaaattattcctttcaggagaatacacgctgatcgataagaagacccgcgaaccgcgttttggcacaatcaatgagatccaaggtatgttaggattcgtggactccatagacaagtacaataacaatctcccaaataactctaagcatacccctaataaaagagagcggcttctggccgatttcatttactttacccgattccactttaacaccaaacccaccataattaccgagggcaaaacggatattacctatttgagagtagccctcaatgccctttgcaaaaagtatcccagcctgatcgagaagaaaaaatcatacaagggcgagattaatgactacaagttctcattcttcatcaagaatgccaagactaaatttctgctgaaactggaggatggcagtagtcacatcaagaacttcattaaggactacgacagaaacattgaaaaatataaggctgatggcggcgtcaatcccgtgataataattctggacaatgattccgggagcacaggttctggaggcatcttttcactgctgctctctaacgtgtttcccaacattaaactctcccgcgaagacataaggaaggtcgactggctgtgggtcactaagaacttgtatgttatattcacaccgcttaaagatggtcaggacagctctcttgaggacctgtttgatacaaaaaccttagcaactacactgaacggcaaggtgttcaacaatacaaacaaggactgtaaaccaaatgagtacgggaaggaatacttcgcaaaacatgtcgtgctgaagaacaaggataccattgacttcaagaacttcatcaaaatcttcgatagcatcgaggaaattatcaagcaccattccaagaaatga

SEQ ID NO: 8439 - RNA, 1716 nt, synthetic construct
  source 1..1716: mol_type = other RNA
atgagtactaaaatagaactgctcaaacagtgtacaaccaagccagatttcgctcgactcctcggtcttgaccccgtattcttaacccgcatagtttataggaaagacacagaaaacctttactcaaactttaccatcctcaagaaggacatgtctgaacgacacatctcatccccagattctaagcttaaggagatccagagaaaggtcgccgatctgctgctaaattgcatagaggatattcgagtgctcacggaatcaaagaatctgctgtcacacggatttgagaaacaacgcagcattattacaaatgcagaacgccataaaagaaagaaatgggttctgaacattgatttgtctaacttctttgaccagttcaattatggaagggtcagagggtattttatcaaaaacacacacttcgcgttagatgagaacattgcaaacatgatcgctaaaatcgcctgttatcagaacaagttaccgcaggggtccccttgcagccctgtaataaccaacctgatactgtcttccctggaccagcggctgaacaaaatctgcaagaatagcggttgctcctatagtcgctacgctgatgacatcacgattagcactaataaaaagacctttcccagcgaaatcgtgaagagctatgatgccgagcacgttgaattaaataagaacttcacgaaggagatcatgagggcaggcttttcattgaatgataagaagactcggcttcagggaagaactcaacgtcaggaggtgacagggctgacagtcaactataacctatctacagacgtgaattacagcaaaaaagtgcgggctatggtgcatcacctgtttatggatgggaactacactctcatagacaaaaaaacaagaaagccaaggaacgggaccatcaacgaggttgagggcatgttgggtttcatcgacagcattgacaagtataacaacaaactggcgtacagagcaaaaggcggcttgaataaaagggagaagctgtatgccaatttcatctattaccggtcttttcatagtaatgaaaaggttacgatcctgactgaaggcaaaaccgacgtaacctacctgaaggtcgccctgcatatgcttaaaggaaaatatcccactctgatcagctccaaaaccgtctctcacaagaccgtgaacgactacaagctctccttcttcaaaaacaacaataagtcgaactacttcctggggctgggcgagggcagttcccatttcaagaattttgtgaagaagtaccaaggcaagatttccgagtttaaggctgtcggtggaaggaagcctgtgattatcatttcagacaatgatagtggcgcaaatgaattgatcagtctcctcaacggtaaaggctttcctcatatcacctccgacaagaatgagctccggaagaacaagtggctgtggatcactgaaaatctatacatcattctgaccccctttgatggaaaaacagatacctcaattgaggacctattcgatacaaaaactctttctcgttccctgaatgggaaaacattcaatcgcaccaataaagagtgtgccttgaatgaatttggaaaggagtactttgccaaacacgtgattttgaaggaccgggacctcattgacttcaacatgttcagttacatattcgatgccatccttgaaattattaaggagcacgatagcaaggtgtcgtga

SEQ ID NO: 8440 - RNA, 1941 nt, synthetic construct
  source 1..1941: mol_type = other RNA
atgtttataaatacacacgtcggccgatttgtcggttgtgagtcccaaccagttgcactgatggcaggtggaatagcctctctgaaatcactaatccagtcttacaccgccggcgtgctttgcgaaggtgtgccagcatgtgtgtcaccctggcccttcttcctgtgggacgaggaggaaatgacaaagacttccaagctcgatgccctaagagccgcaactagtagagaggacctcgccaaaatcttggatgttaagctcgtattcctgactaatgtgttgtatcgcatcggcagcgacaaccagtatacacaatttactattccaaagaagggcaaaggcgtgagaacgatctccgcccctacagatagactcaaggatatacagcggcggatatgtgatctccttagtgattgcagggacgaaatttttgcgatccgtaagatatccaataactactcctttgggtttgaacgggggaagagtatcattctgaatgcatacaaacataggggtaaacagataattctcaacatcgatctcaaggattttttcgagagcttcaattttggcagagtgcgggggtatttcttaagcaatcaggattttctcttgaaccccgtagtcgcaacaactctggctaaggccgcttgttacaatggcacactgccccaggggagtccctgctctcccatcatcagcaacctgatttgtaatattatggacatgaggttggctaagctggctaaaaagtacggatgtacatattcacgctatgcagatgatattacgattagcaccaacaagaatacctttcccttagagatggctaccgtgcaaccggagggcgtggtcttagggaaggttctggtcaaggaaattgagaattctggattcgaaatcaacgattcaaagacgcggcttacttacaaaacgtctaggcaggaagtaaccgggttgaccgtgaaccgaatcgtcaacatagaccgctgctactacaaaaaaactcgcgccctggcccatgctctgtacaggaccggagagtataaagtgccggatgaaaacggcgttcttgtgtcaggcggactggacaaactggagggcatgtttggatttatagaccaggtggataagttcaacaacatcaagaagaagttgaacaaacaacctgacagatatgtcctgactaatgccactctgcatggtttcaaattaaagttgaacgccagagagaaggcttacagcaaattcatctactacaagttcttccacggaaatacctgcccgacaatcatcaccgaaggcaagacagaccgcatctacctcaaggccgcgctgcacagcctcgaaacctcgtatccagagctgtttcgggaaaaaacagattccaaaaagaaggagatcaacctgaacatcttcaaatccaatgaaaaaacgaagtgcttcttagacctttccgggggtacagccgaccttaaaaagttcgtagagcgctacaaaaataactatgcttcctattacgggagtgtgcctaagcagccagtcattatggtgctagacaatgacaccggccctagcgaccttctgaactttttgaggaacaaagttaagtcgtgtcctgacgacgttaccgagatgcgtaaaatgaagtatatccacgtgttctacaatctgtatattgtgctcaccccactgtctcctagtggggaacagacctctatggaggacctgtttcctaaggacattctcgacattaaaatcgacggaaagaagttcaacaaaaacaatgatggagatagcaaaactgagtacgggaagcatattttcagcatgcgagtggtccgtgacaaaaaaaggaagattgacttcaaagcgttttgctgcatttttgatgctatcaaagatatcaaggagcactataagctaatgctgaattcatga

SEQ ID NO: 8441 - RNA, 1482 nt, synthetic construct
  source 1..1482: mol_type = other RNA
atgaagaagaacaagagtattatcctgaacgcctatcgccaccgcaacaagagaatcatcttaaacatcgacttgtccaactttttcggctcatttaattttggtcgagtgagaggttacttcatgtctaataaagatttcctcctcaacccaatcgtggcaaccaccattgccaaggcggcctgttaccgcggagtgttaccccagggctcaccttgcagcccagtcattagcaatctgatctgctctattatggacatgagactggccaagctggccaaacagtatggttgttcgtactcccgttatgcagacgacataacattctctaccaataaaccttcattccctactgaactcgcattgctgcaacccgagggggtcattcttgggaaatacctggtaaatgagattaagcgtgcgggctttgaaataaatgacgcgaaaaccaggctggcttacaaaccgtcccgcctcgaagttacgggcttgacagttaataagattgtcaacgttgagaggcggtatagtgataagacaagagccctggctcatacgctttatacaaccggagaatacaaattaccggacgaaaacggagatgaagtcgctggcagccttgataagctagaggggatgtttgggtttatcgatcagcttgacaaatttaacaacatccagaagaagaagagcaaacaacccgaaaaatatgcactcgcacctgctaccctgcattcgttcaagtctaaattaaatgcccgggaaaaggcctacgggaagttcatatactacaaattctttcacggtaacacttgcccaactatcgtgaccgagggtaagacagatcgcatctatcttaaagcagccctgagagccctgagtaacaactacccagaactgtacagggagcgaaaggacaaaaaagggaaagagatcgacctgaatatccttaaaatcaccgataagctgaattatttcctgaacatttccggcggaacagctgatctgaagaaattcgtggagaggtatagggagcattattcaagctactacggaagtatagctaagcagcctgtgattatggtgctagataatgacactggacccaatgagctgctcaattttctcaaaaacaaggtcaaacagtgtcccgatgacgtaggcgctatccggcggatgagatatctccacatcttccacaacctgtacttggtgctgacacccttgactgagggcggcaatgaaacctccatggaagatttttttcctacggaggtgttgtccattgagctagacggcaagatcttcaacaaaaataatgacggagacagcaagactgagtatgggaagcacgtcttctctgtaaaaatcgtgaaggataagaagcgggttattgactttaaccgattcagctacatattcgatattgtgagggagataaagattgactaccagaagatcctcattaaaaacaagccatga

SEQ ID NO: 8442 - RNA, 1557 nt, synthetic construct
  source 1..1557: mol_type = other RNA
atggtagcaacctccaaacttctccttctgaaagtggcgtcctcccgtgctgatctagctaagcttttggacgtgaagctggtctttctaacaaatatcttgtaccgaattgggaccgattctcaatataaggacttctccatacctaaaaaaggcaaaggggtaaggttaataagtgcgcctgaagacagccttaaggacttacaacgacggatcgccgacctcctgatggattgtagagacgagaacttcaagatcaagaagatcaagaacaactattcctttggtttcgaacggaataaatcgatcatcagtaatgctttcaggcaccgcggcaagaacatcatactgaacattgacctcaaagatttcttcgaatccttcaatttcgggcgcgtgagaggatactttctgtctaatcgggactttctgctgaacccgatagtagccactacactcgcaaaagccgcttgctataaagggtccctcccacagggatctccctgttcacctgtgatcacaaattttatctgtagcatcatggacatcaggctcgccaagctcgcaaaatctctgggctgctcttactccaggtacgccgatgacatcactttcagtacaaacaagaaggaatttccagccgagctggcaatttcactgcccgagggggtggttctgggcggaattctagtttcagaaattaaacgggctggtttcgatattaatgacgcgaagacccgcctcagctataaatctactaggcaggaagttaccggcctgacgatcaatagatttgtgaatgtcgaccgaaaatactccaataagacgcgcgcactcgctcacagcctgtatagcaagggagaatacaaactaccagacgaggatggtaagttagtggtcggctcaattgagaagttggaaggccgtttcggcttcattgatcagattgacaagtttaacaacatccagaacaagctttcaaagcagcccgagaaatatgcccctatccacattaccttgaagaattacagacttaaactgaatgctcgggagaaagcctacagcaagtttatatacttcaagttcttccacggtcatgcttcccctacaatccttactgagggaaaaacagaccgggtctacctgaaaagcgcaattagaagtttgagtactaagtttccggagtttctgaagaaatccgcagatgggaaaaggaacgacattaacctgaatatattcaagtctgacgagaagagcagctattttataaatatgtctggcgggagcgccgatctgaagaaatttatcgagcgctacatggatgaatacagtagttactatggatcgatcccaaaacatcccgtgattatgctgttggataacgattcaggcagcgacgaggtcttgaactttctgaagaacaaggttaaatcttgccccgatgataccgatattatgcgtaagatgagctttatccatgtgttcaagaacctctatattatcctgaccccattaaatgcctcaggagagcagaccgccatggactatagagtgtga

SEQ ID NO: 8443 - RNA, 1776 nt, synthetic construct
  source 1..1776: mol_type = other RNA
atgactgacaccaagaaaatcgatgccttgaaaaatgccagttctcgttcagacctggccaaactgctaaacgtgaacgttattttcctcacaaacattctgtacaaggtcgggaccgacaaccagtataaacagttctccattcctaaacggggaacggggattagggtgatttctgctcctaacgacaagttaaaggaccttcagcggagaatagcaaatctccttatagattgccgccaagagttgttcaattcgaagaagatcaagaacaacttttcctttggtttcgaaaaagataagagcatcatctcaaacgcatcgcgacataaggggaaacgcataatcctgaatctcgatctgagggatttcttcggttcttttaactttggtcgagtgcgtggctattttatcagcaatcgagacttcaaacttacaccggtggtggcaaccaccctggcccaagcagcgtgctataaaggagtactacctcagggatctccttgctctcccgttatcaccaacttcatctgtaacattatggatatgagacttgcgaaactggccaaagaactgggatgtacatacactcgctacgctgatgatatcacttttagcaccaataagaagatctttcccgaagaactggccattccagagctcgaaggggtcatattaggcagtaggctcgtgaacgagatcacaaaagccggctttaaggtgaatgatgctaagacacgcctcgcatataaaagctcaagacaggaagtaacaggtttgaccgtgaaccagatagtcaatgttgacaggcggtatgctaagaaagttcgagccctggcacaaaccctgtactccacaggaaaatacaaattgccggacaagaatggcaacatgattttgggcaacttagctcggttggaaggcatgttcagctttattaacttcattgacaagtccaacaacattgagaacaaaaagaacaagcaacccgagaagtacgtgaaggtacaggagaaactgaatgggtaccgccttagactcaatgctcgggagaaagcctactctaaattcatctactacaagtacttccacggaaatacaattccaactatcctgactgagggcaagacagataggatctacctgacgaccgccctgcactccctatccgccatttatcctaatcttatcgaagagactaacaacgggaagaagattaagctgaatatatgcaagagcaatacgaaagccagttattttctcgacctgtctgggggcaccgctaatctgaagaaattcgttatgcgctaccgggatgaatatgaactgtactatggcacggatgctaagaaccccgtcataattattcttgataatgattcaggcccaaacaaactgctggaccacttaaagaataaagtcgagaattgtcccaacgacgtgaagtccatgaggagaatgaaatacatccatgtcacccataatctctatatcgtgttgaccccattatccgagtcagtgcgggagacaagtatggaagacctctttagtcccgaggtgctcaatatcaccctaaatggaaagtatttcaacaaggcaaacgaccaggacactgagactgagtattcaaagcacatctttagcactaaggtagtcagagataagaatagaaacatcgacttcaaaggttttaagccaatcttcgacgcgattgaagccatcattaaacactaccaggagctgagcaagagcaggataatcaataaagctcgttga

SEQ ID NO: 8444 - RNA, 1761 nt, synthetic construct
  source 1..1761: mol_type = other RNA
atgaaaaatacccccggattggacgatttgaaagcggcgaccacaagacgtgacctcgctaagcttcttaacgtgaagcttgttttccttacaaatgttctctaccgcatcggggtggataatcagtactctaactttccaattcctaaacgcagcgggggagtccgtatcatcagtgctccgtcttccaagttgaaagacctccagtcaaaaattgccaagcttctgatcaactgccgccaggagattttcgccattaacggcatcgaaaacaatctctctcacgggttcgaaaaggacagaacaatcatcaccaatgccttaaaacacagaggcaaaaacgtggtactcaacctagacctctcagattttttcaagagctttaatttcgggagggtccgcggcttcttcctctacaacaaggactttaaactgcacccagatatagctactactatcgctaaggctgcttgttatcagggcagtcttccacaagggagcccatgttcgcccgtgattaccaatctgatctgtaacattctcgatgtgaggctggccatgttggccaaaaagttaggatgcgcatatagccggtatgccgatgacattaccttcagcaccaataaaaaggatattcccgaggagctggcactcaacgtgactgacggagtgacattgggaaggaaactgcgtaacgagatcgaacgagcaggctttgagattaatgacagtaagacaagactatccttcaagcccgctaggcatgaagtaacagggttgacggtgaacagatttgtgaatgtcgatcggagatactcaaaaaaggtgcgggcactggctcacagattataccagaccggttcctataccataaagaatgccgacggagaagtcgatggtacactgcaacaactggaggggatgtttggtttcatcgatcagatcgacaagttcaacaacatcgttaacaagaaaaaccgcaagaaggaaaaatatatcctggcgaaacagtccatccttgagcatcgatccagactgaatgccagggagaaagcctacgcaaagttcatatactataagaacttccacggatctatcatcccaaccataatgactgagggtaagacggaccgggtatatattaaaacggccctgctatctctgagtggcaggtaccctggttttatcattcgcgacaacaagacgaagaaggagaagattaatctgaagattatcaacccgcagtttaaggagaaatactttctggacatagaagacggcgccgcctcctttgaaaagtttgtccgacgctacgattcggaattcaagagcttttacggaactaaggcaaataatcctgttgtaatgatactggacaatgacaccggccccaacgagctcttgaactatatatctagggagtgccctacctgccctaatacagttgaggatattcggaaaatgccatttgtgcacgtgatgcataatctgtacctgattctgactcccttagatgccactgggggaatgaccgccatggaggacctgttcgatgcaaaaactctaggcaaggatctggagggcaggaagtttaatcggggcaaaaaatttaaccccaaaaaggaattcgggaaggacgaattttccattaaagtcgtgcgagatatggcaaaggatatcgacttcaacggcttcaatagcatattcgaagcgctcacagatgtggtcaaacattatcgggactcaatcaaagctccttga

SEQ ID NO: 8445 - RNA, 1326 nt, synthetic construct
  source 1..1326: mol_type = other RNA
atgtttaaacccacgtacctagcccggctgcaagcttgctgtaacaaatttgagctcgccgacctcctccagattaaagtcacttttctgacgaatgtcttgtatcgcattaggccagagaatcagtacaaaaagttcaccatcaaaaagaagtcaggaggcgagcgtgaaattttcgcccccgatgagaagctcaaagatattcagcagcgattgtctgaactgctgtatatttgccaggaagagatctgggcgaaaaataatatcaagcagaatgtgtcccatggtttcgagaagaataaaaccatcatcacaaacgcagagcgccaccgggataagaacatcgtgttcaacattgacatcgaaaacttctttcccagtttcaattttgggagggtgagagggtattttatcgctaaccagaacttcaagttacatcctaacgtggccacaataatcgcccaaatagcttgtctggatggctctcttccacagggcagcccgtgtagtccagtgatcacaaacctgatttgcaggattctcgattttcgcttgagcaaactggccgtgacatacggttgttcctacagtagatatgcagacgacattaccttctccaccaataagaaaaacattccagatgccctagttagcaacgaaaaggagaatgagcctggaaagatcctggtagaagaaatacacagggctgggtttacactgaatcacaacaaaaacagggtgtcacgctgtacctccagacaacaagtaaccggactaactgtcaataaaaaaatcaacgtctcacgagagtatattaagaatacacgggcaatggctcactcgctgtattttgagggctcatacacacttatcgagaaagacgggaaacatcggaagggtacccttagcgaacttgaaggccggtttgcgttcatcgacatgttagataagtacaataacgtggaggcaaagaaaaatgctagacctgagagatacgttgttaagggctttggactcgacttcaagcagcgcctcaatagcagagaaaaagcctattccaagtttctgtactacaaaaacttctacgggaatgaacagataactatattaactgagggaaagactgaccccgtgtatctgaagtgcgcaatcgactctctgtttcttgattaccctcagttggttcgagaagagaagaacactaagaaccgtgtgctcaaggtaaacctgttcaagacgaatgacaagaagaaaattttctctcggttcgtgtggtggagctgcaggctgtttgaggtcttccagaccacttggttcaccttgtga

SEQ ID NO: 8446 - RNA, 1770 nt, synthetic construct
  source 1..1770: mol_type = other RNA
atggaattcaccattatgttcacgcccagttatcttgaaaggctgaagagctgcaaaacaaagttcgaattcgcccgtctgctgcaaatcaaggtgagttttctgaccaacgtgctgtataggatacgaccagaacatcagtacgagcggttcatcataaaaaaaaagagcggtggggatcgtgaaatatttgcacctacagaaaagctgaaggatatccaacgcagactatccgatctactgtacgtgtgccaaagtgagatttggaagacgaataacattacccccagtctgtcccatggctttgagaagaacaagacaattatcacaaacgcggagagacaccggaacaagacgaatgtcctcaacatagatctcgaggacttttttccaacctttaatttcggacgcgtacgcggctactttatcgccaatcagtactttaatttgcacccctcgattgccactattatagctcagatcgcctgttacgatgggaaattgccccaggggtccccatgctctcctgttatctctaatctgatctgcaatatcctggacattcgcttgtctaagctggctttatcaaatggatgttcctattctcggtacgctgacgacattacgtttagcaccaataaaaaccaattcccagactcaatagttatcaacgaaaacagcaatgagttggggcccctcctggtgaacgagatcgagaaagccggtttcaaaatcaacaataacaaaacccggattctgcgacatacatcccggcaggaagtgaccggtctgaccgtcaataagaagatcaatgtcaacaaggactatatcaaaaagactcgggccatggcacacgctttgtataaagagggcgacttcacactgcttgatatttccggcaaacctagaaaaggcactctgaatgaactcgagggccgattcgtgtatattgacatgttggacaagtacaataacattaatgccaaaaagcacactctccctgaaaagtacgtgctgaagaaaaccggcatcaacttcaccctcaaactaaacagcagggaaacagcattttcgaacttcctccactacaaatatttctacgggaacatcaaacctactgtgctcaccgaggggaagacagatcccatttacttaaagtgtgcgatcgatagtctctatctttcttacccagccctggttcgtgtagatgatagaaccaagaatcgcattctgaacatcactctctttaaaaccaacgccaagaaggaatattttctggacctttacggaggagcagctgactatgtgaggttcttccgacgccatagggagcagtgtaaaaagtttgagagacagcctcccaagaatccggttattattgtgttagataacgatactggacctagcgacttcatcaacaatatcatcaaggagtatagccatctcccgaggaaatcagaggatgtacggaaacacaaatttttacacctcgagaacaatttgtacgtgctgcttaccccactgcttgctggagataaacagtcatgcatggaagacttctttaaagacgaggtcttaacaaaaactatcaatggcaagtccttcgacaagagcaacaatcatgattcaaccacaactttcggtaaggacagatttgcaaataacatcattagggagaatagacagacaatagacttttctcttttcaagcccattctggacgcgatggtcgatataaacaaccacttcaagaacctatactatccatga

SEQ ID NO: 8447 - RNA, 1740 nt, synthetic construct
  source 1..1740: mol_type = other RNA
atggtagcacccaccactattgagagactgaggttaataaccacaagacaggagctggccgcactgctgaatctaaaagcacatttcttgacgaacatcctgtataggaatggagtgaacactcagtatagccaatttcggattccgaaaaaggatggttccttcagattgatctcctcaccttctagtaagctcaaggacatacagaaacgccttgccgaactcctgtatgaatgtcaggcgaatatccatttcgagagaaagatcaatcctgtgctctcacacggcttcgaaaaaaacaaaaccatcgtcacaaacgccactaggcacagaaacaaacggattctgctcaacattgacctggagaacttctttgagtcaatcaacttcggccgggtcagaggctttttcatcgctaataatgacttcaagctctctcctctaatagccacaactattgcccagattgcgtgctttaataatagcttaccccaggggtccccctgctccccaattatctccaacctgatttgtaccatcttggacatccgattaagtaagcttgcacaaaagaatggctgtcagtactctcgttacgctgatgatatcacattcagcaccaataaaaaagagtttccacaggaactggttatcgacaacgatgttgtgaatgtgggggccgtacttctgaaggagatagagcgggccggatttcgaattaatcatcgtaaaacacgacttctgtacagcaccagtcggcaagaagtcacaggccttaccgtcaataagaaagtgaatgtggacaatcgctattataaaaaggtacgcgctatggctcacacgctgtacaaggaccaatcatttgcaattatcaaagagaacgccaagccgcagaaggggaccttgaaccagctcgaaggcatgatgagttttattgacagcatagacaagtacaacaacaagcttaagttagccaataagcagccccaaaagtatcagtccttcaattacggtttaaactacgagggaaagttgaacaggagggagaagactctgagtaagtttctgtactacaagtacttccatggactgcatgtccctacaattctggtggaaggcaaaactgatagggtgtatctaaagtgcgctctgcgatccctgtttctcacttaccctactctggttaaaaaaaataacgccacaggcaacattaactatagtctcaactttttccgtgagagcacccggacgtcgtactttctcgacatctctggaggggcggctgaatttgaaaagttcatcactcgctatccagaacagtacaaaagatttaatcacacacctctctatcccgtgattatgattctggataacgactcaggaacaaggaccatcgtccggaaaatctccaaatctctcggggtgacggaggattcaataaagaaaaactcattcacccacatcatacacaacctgtacatcgtgttgacaccactactgcccggggatcgcgattcgtgtatggaagacttgtttgatagcagcgttcttagcaccgtaatagatggtcgcagcttcgataaatctaacaactacaataagtccacccactatggtaaaaacgacttctctcttaaggtgatcaaagtgaacgagaagaatattaacttctccggcttcctgccagtgttgaatgctgttagggactgcctcgtccactataataatatctctaagtga

SEQ ID NO: 8448 - RNA, 1758 nt, synthetic construct
  source 1..1758: mol_type = other RNA
atggctcccctctccatacttgaacggttgcaaaacgccgccaatcggcaggacttagcctccatcctgaacctgaaaactgcatttctcaccgatgtgatctacagacttaaggcggagacgcagtacacccagtttaccattccaaaaaaaaatggcgcacctcgcgttatcagtgcaccaaccactaagctcaaggatattcagaggagactcgccgacgtgctgtatctctgcagagcagaaatctacaagaagtacaacattaaccctgtactaagccacggattcgagaaggagaagagcatcattaccaatgcggaacgccacaggggaaagaccctcttgctgaacatcgatctagaggattatttcgactcgtttaacttcggcagggtcagaggtttctttttgagcaatagggattttcggttaaacaacacagtcgcgacaaccattgcacaaattgcctgttttcagaatggactgccacagggctctccttgtagccccatcattagtaatcttatcagtggcgtgctggacattcgcttatccaagcttgcaaagaaatatgggtgcaattatagcaggtatgctgatgacctgacgttttcaacaaataagaagacgttccccaaggagatagctgacgtggggggcgaaagtgtgacccttagtccgacacttattaaagagatcatcaaagctgggttcaagataaacgataaaaagacgagagtatgctataagacttctcgccaggacgtgacagggctgaccgtgaataaaaaagtcaacgtaggtaaggaatacgctaaagtgacacgggccatggctcactcattgtacaaagatggctcattcgttatcgttaccgaatccgggaagattgagaagggaacctgcgctaagcttgaaggccgattcggcttcatcgattctattgataagtacaacaacttgaagctgaagaatgctcggcaactggaaaaatatcagagcgttaaccatgggctgaactatacggccaaattaaatagtcgtgagaaggcctactcctactttctctactacaagaatttccacggtatggagatgccgactatcctaactgaagggaaaactgatcgtgtgtacctgaaatgcgctctcaaatcactcgccaactcttatcccttgttattcaatagctctgacgattcttcaaaaaacgagtaccgtgtcaacttctttaaagccacagagaaaacatcatacttcctggacattagcggaggggccactgactttaagaggtttatcctgagatatcaagaacagaagaagcggttcgagaaatttaagcctaaacatcccgtcataatgctgctggacaatgattccggacctaaagacctcctgaaccatctgaaggataaggttaaaaattgtcccaacgacgtggatactatccgaaaggcccgatacacacacattttcgacaatctctatctgctgctcacaccactgctgccaggcggaaaagaaagctgtatggaggatttgtttgactccaccgtactatccactgtgctggacggcaaaaccttcaataaatcgaatgacactgacacaaaaacagaatacggtaagcatgtcttctctaccaaggtcatcaaagccaactgtaagaccatctcctttgagaaatttaaggtgatcttcgatggtatagaggagattatagcagactattctaagcgctgcaaggtgtga

SEQ ID NO: 8449 - RNA, 1638 nt, synthetic construct
  source 1..1638: mol_type = other RNA
atgaaaatatccaggcttaaactgcttagctccccatccgagttggcgcagctgttgaatattccccagaaattctttctgtatcacctgtatggacaacaaccaacaaaccagtatatgcagtggagcatccccaaaaagaatgggggaaaaaggaatattacatccccgaatccagagctgaagatgattcagagtaggctcgctaattatcttcaggagtgtcttcaagagattcggtctaaccagaattttcatattaacctgagccatggttttgaagttgacaagtctattctgaccaacgccgaaatccacatcggccagaagtatatcctgaacattgatctagagaacttttttcactccataaacttcggaaggatccgtggcttctttattaagaacgtccactttcagctgcaccctacaatcgcaacatgcattgcccatattgcatgttacaataactacctgcctcaaggtagtccttgcagccctgttatcagtaatctgatctgctccgtgttggatatacgcctcaaaaatctagccaagaagtacaagtgcttctatactagatatgctgacgacctgacattcagtacctatctcaaatatttcccggagcagattgctaaatcaaattactacctgaacgtcgaactgtctgccctgctgatcaaagagatacagaaggcaggttttaacattaatcctacgaaaacccgacttcagcacacaaatatacgtcaggaggtaactggcctaactgtcaataagaaactttcagtgcatacggattacagaaacttgtgtagagctaaagcacatcacttgttttctcacggctactatttcactttcgataaacagacactctcacagcggtctggaagcttaaaggaactcgagggccagctcgcgtttattaactcgttagacaaatacaatcgcgaaatcaacaaagccaaaactgaaaagaccaataagcgggagaatttatacggcaagttcatcttttacaagaatttcctctgtaacgaaaagaccatactgttgaccgaaggcaaaaccgatatccaacacatcaaatgcgctctaattggattaaagctcaacaccctgagcaacagcctgcaattttacaagcactcccctagtaagaccttcttaatgacttacatctgccagcagaagctcaatttctgtgccggatcccccgggctgaaggccttcataaaggcctacaatagactctacaaatccatcttgaaagggaaacataagccttctaaccccgtgatcatcatagtggacaacgatcacgaaggggaggatattaagaagatcatcatgaaggagttcaacattccaatcaatacaaaccagcccacccgcatcatctacaaccttttcatcatcttcctgagcccgccctcatttatgtcatcacatactaacacagcaccacatcgaaacattgagatcgaggacctgtatccacaatacattctcgacacccagctgaacgggaaaaagttcaatcggacgaatcacgaatcgactgacacggaatatggtaaggatagttttgtgtctaaggtgataaagagcaaaattgacaagcccatttga

SEQ ID NO: 8450 - RNA, 1749 nt, synthetic construct
  source 1..1749: mol_type = other RNA
atgaaggaattcaatcagattaaaactcgcaatgagttggccgattttttgaatatcccccgcaagcagctgagttacgtgctatacgtgaagggtattaacaacctgtacaactctttcaagattaggaagaagaacggcgggtttagagagattaatgcccctcttgaagagctgaaaggtatccaacgaagactgcaggaggttctctacaagaagatcgggaataagtggattaataggaacataagccatgggtttgaacgcaatcgcagtattattactaacgcgattgtgcaccggaacaagcggattgtattgaacatcgacctcgaaaactttttcgaatccatacattttggacgtgttcggggctttttcaacaagaataagaacttcagccttcctatcgacgttgctacggtaattgcccagatcgcctgttacgaaggaaggttaccacagggagcgccttcatctccgatcataagtaatctcatctgcgagatattggattatcgcctgctgaagatcgctaaaaagtataaggtcaactatacccggtatgctgacgaccttacatttagcaccaatgataagaacttcctgtttttacaacgagagttctatgaggaaatttcccaagagctgattcgaacaggtttcaagatcaatgagaaaaagaataggctgcaactgagagattctagacaggtggtgactggcctcgtcgtgaataaaaaaatcaacgtcaaccggatctattacaaagaaacgcgtgccatggcttaccagctgtacaaacaaggctcctttaaaatcaacgacgagccggcaaccataaatcagctcgaagggcggttcgcattcatcaatcagctcacttggcataataacctagttgatgggattaccgccaactttaataactttacaagtagggaacagcagtatcaaaggttcctattctacaagtatttctttgccaactctaagcctgtcatcgtgaccgagggcaaaacagacgtcagatacttaaagtctgcactgaaatcactctataaagactacccaaaactgattgtcaaacacaaagacggttctttcgagttcaagatacacttcctaaaaaagacaaagcgcttatcatactttctgggaatctataaggatggggcaaacgccttgaacaatatctaccagttttttgggagcaaaaattcaaagctgaactacctgaactatttcaaaaagatctccggcaactcccccgagaatccagtgatcctcttgtttgacaatgaaatcaagtcaggcaataaaaaacccatcggaaagtttctgaactatgctggcttggatgacgagaaaaagactacactgaagaaagaaaacatggtgaatattgtagactcgctgtacctccttaccgtgccacttataaacggcaaactcgaatgcgatatcgaggacctcttcgataacaataccctgttccttaagatagagggaaaagaattttccaagaaggatagctacgacgtgagcaaatattatggaaaggagattttctcccagcacataagtcagaactacagcgatattaatttcaatcagttcagacccgttctggacaacatcaataagattatcgatgtgtacaccagacagaatgataatatgcttgtcaatctggagctgaaaaaggtagacaagaggaacatgaacaaagtggagctttttaaatga

SEQ ID NO: 8451 - RNA, 1749 nt, synthetic construct
  source 1..1749: mol_type = other RNA
atgagggaattcaacgaaatcaaaaccagaaatgagctagcagactttctgaacgttccccggaagcagctgagctatgtgttatataagaagggcgtagataacctatacactagcttcgagatcaataagaaaaatgggagcgtccggaaaatcaatgcccctttggaagagctgaaagacgtgcaacgcaaactggctgaggtgctctataagcacatgcgcaacaagtggaagaagaaaaatatatcgcatggcttcgagaaaaataagagcatcattactaacgccaagatacacaggaataaacgcctcgtactcaacatagacatcgaaaacttcttcgagagcattcactttggtcgcgtgagaggatacttttcgaagaataacaatttcctccttccaattgaggtcgccaccgtgattgctcagatctcttgctacaaaggtaaattgcctcagggcgccccatcttcccccatcatctcaaacctgatttgtgaaatattggaccatcgtctgctgaaaatcgccaagaagtacaagcttgattatactcgttatgccgacgaccttactttctctaccaacgataaaaagttcttagggctgcaaaaagcattctacaaagtgatctcaaaggaacttataagagcgggatttaagattaacgaaaagaaaaaccggctccagcttcgcgactctcgacaagtggtcacaggcctcgtggttaacaagaagatcaacgtgaatcggatctattataaagagacaagagctatggcccaccaattgtataaagagggaagctttgagattaatggggaacctgcaacactaaatcagctggagggtcgattcgccttcattaaccagctgacctggtataataataaagttgatgggatcaagaccaacttcaataattttacgagccgagagcggcagtatcagaggttcctcttctacaagtacttctttagtaactccaagcccgtgattgtgaccgaaggcaaaacagacgtcacttacctgaagagcgcactgaagtctttgtataaggagtacccaaacttaatcactaaacatagtgatgggacctttgagttcaaagtgagctttcttaagaagacaaagagactcggctattttttgggcatataccaggacggggggtcagccttgaataatatctacaactttttcggctccaagaagagtaccttgaactatctgaacgactttaaaaagatctcaggcaatctcccaaagaaccctgtcatcttaatgttcgataacgagattaagtccggaaagaaaaaaccgattggtcagtttctctcccatgctggactggcagacaaaaagaggctgatactggagtctgaatatatggttgacgtaattgactcactgtacctgttaacagttcccctgattgacggaaagtccgaatgcgatattgaggatctctttgagaaaagtacgctgtcacacaagattgaaggcagggagtttagtaaaaaggatcattacgatacctccaaatgttacggaaaagaaatctttagccagtacatcctgaaaaattacagtgatatcaacttctccgagtttagatctgtcctcaacaacatcaataacatcattgacatctacaagaagaggctggctgatgcggaacacaatctggaggcggaaaatattgataagtcctctgctgacaaaatgctacttgaaatatga

SEQ ID NO: 8452 - RNA, 1746 nt, synthetic construct
  source 1..1746: mol_type = other RNA
atgatggagttcgacgaaatcaagacccggaatgagctggctgattatctgaacgtcagccgcaaacagttatcctatgtgctgtacgtgaaagggataaacaacctgtacacgtcatttgagatacataagaagaacgggggagtgaggaaaattaatgccccccttgaggagctgaaagatatccaacggaaattaacagaggccttacacagtcatatgaagaaaaagtcgaagaagaagaacaacatctcccacgccttcgagatcgataaatccatcataaccaatgcagaagtgcaccgtaacaaaagactggtgctgaacattgatctcaaagacttttttggctctattcactttggcagagtgcggggcttcttcaataagaacaataagttccttctgccaatcgaagtcgctaccgttattgcccagataagttgctttgaaggtaaactgcctcagggtgccccgtctagtccaattatatcgaacttgatttgcgagatcctggactataggttgtctaagatctctaaaaagtacaagctcgactatacccgctacgcagatgacttgactttctccaccaacgacaagaattttctgggactccaggacgagttttacatcgagatctccaaggaactgatccgagccggattctcaataaacgaggacaaaaaacgccttcagttgaaggatagccggcaagtcgttactggcattgttgttaacaataagttgaacgtgaacagagattattacaaagaaacaagagctatggcccatcaattatacaagcagggaaagtttgagattaacggcgaggtagcaacacttaatcagctggaagggcgattcgcctttattaaccagttgacttggtacaacaataagaagaatggcatcaaacctaagagttttaggaatcttctgtcccgggagctgcaataccagaagttcctgttttacaagtacttcttcgctaatccgaaacctctaatcgtcacagagggcaagactgacatagtatacctcaaaagcgctcttaaaaatctccattctgagtatcccaatctgattacaaaaaatagcgacggttcatttgaattcaaggtgagcttcctgaaaaagacaaagcgtctgaagtatttcctaggaatctatcaggacggtgggagtgcactcaataatatctacgacttctttaccggtaagaagaacacgccagacttcctgtcctattttcgcctgatctcaaacacactcccaaagaaccccgtcatcctcatctttgataacgaaggcaaaaataaacctttgggcctttttctgaaccacgctgtcctggatgtgaagaagagggaaattctggatagctcttatatggtggacctaattgacaatctgtatcttctaactgttcccttgatagacgggaaatcagagtgtgatatcgaagatctcttcgaagatatcaccctgtcctatgaaatttctgggagaaagtttacgaaagaggataaatacgataccagcaagtactatggaaaagacatgttctccaagtacattctcaataattacgcggacattaacttcaatgaattcaggagcattctcgacaacatcaatagcattatagggatctatactaacggcatcgtaggaaccgggcaggagctcgaagcaaaaaacattgataagtcaagtgcggataaagtgttactcgagatctga

SEQ ID NO: 8453 - RNA, 1752 nt, synthetic construct
  source 1..1752: mol_type = other RNA
atgagcgaattcagtgagatcaagactaggaatgatttggcagatttcctgaacatccctaggaaacagctaacttatgtgctgtatgtcaagggcataaataacctctacacctccttcgagatttataagaaaagtggaggcgctcgacggattaatgcgccaattgaagaactcaaagatatccagcgcaaactggccgaagctctgtacaaacacaagaaaaggaagtggaagaagaagaacaatatctctcatggtttcgagaaagataagagcattataaccaatgccaaaattcacagaaacaagcgatttgttctgaacatcgacctagagaatttctttgaaagctttcatttcggacgcgtcagagggttttttatcaaaaaccacaatttcctgctccctatagaagtggcaaccgtcatcgctcagatttcttgctatgaaggaaagttacctcaaggcgctccgtcaagcccaataattacgaatcttatatgcgagatcctggactatcgcgtcagtaagatggctaagaaatacaaactgaactacacaaggtacgctgatgatcttacattttccacaaacgacaagaatttcctgcgcctacagaccgaattcttgaagaatatttccaaggaactgatccgagcgggctttaagatcaatgaaaaaaaaacccgtctccagctgcgggattctcgtcaggtggttaccggcctggtggtgaacaaaaagatcaacgtgaatcggatctattataaagagacgagagccatggcccaccagctgtataagcaaggcgaatttgagattaaaggcgaacccgccacattaaatcagctggagggaagattcgcctttataaaccaactgacctggtataacaacaagattgatggagttaagcatcactttaacaacttgacttcccgggaattacaataccagaagtttctcttctacaaattcttcttcgcaaatccaaagcctctcatagttactgagggcaaaacagatattgcatatcttaaatctgccttgaagaatctctataaagaataccccaatctgatctcgaagaatagcgatggcaccttcgagttcaaagtatcctttctaaagaagactaagaggcttaagtactttctgggaatctatcaggacggtgggaatgcgctgaacaatatctacaactttttcgactcaaagaagcccgcacccaactacctgtcttatttcaaaacaatcagcaatactctcccgatgaatccagtcattctgatgtttgacaacgagattaaatcgggaaacaaaaaacccataggtaagtttctgaactacgccaacttagacgctgcaaagagagaaacacttgagaacaactacatggtagacattattgataacctttacctcctcaccgtgcctctgattggggggaaatcagagtgtgatatcgaggacctgtttgaggagatcactttgttgaataagatcgacgggaaaaagttcatcaaagccgacaaatacgacgtgaccaaatattacgggaaggagatcttcagcaagtatatcattaacaactacaccgacatcaactttactaaattccgggccgtgctcgacaagatatccaatattatcgagacatacacgaaggggcttgtggatacaggtcataatttagagacgaagattaaggacaagtcaagtgccgacaaagtaccattggagatctga

SEQ ID NO: 8454 - RNA, 1758 nt, synthetic construct
  source 1..1758: mol_type = other RNA
atgatggagttccaggacattaagaccagaaatgatctggcagattttcttggtatcccccgaaagaagctgtcttatctcttatacaagaaggagattaacacactgtatacctcattcgagatcaacaagaaaaatggaggggttagaaagattaacgctcctctggccgaactcaaggatatccaaaggaagctcagcgaagctctttacaaacacaagaagaaaaagcaagacattaagaacaacctgtctcacgcctttgaaaaagagaaatccatcattaccaacgccaaaattcaccgaaataaaagactcgtactgaatatagaccttgagaacttttttggctccttccatttcgggcgcgtgagaggattcttcatcaaaaataacaacttcctcctatcctctgaggtggccaccgtaattgcccagctgacgtgttatgaggggaaattgcctcaaggagcgccgacatctcccatcatcaccaatttaatatgtgagatcttggaccaaaggctgctgaagatcagcaaaaagtataagcttgactatactcggtacgccgatgatctaactttcagcactaatgataagaactttctggaacggcagactgaattttatgagctgctttcctccgagttgattcgcgctgggttcaaaattaatgagaagaagaaacggctgcagctgcgcgactcaaggcaggtggtgaccggcctggtggtcaacaagaagataaacgtgaaccggattttttataaggaaacaagggctatggcacatcagctgtacaaggaaggcaagtttgagataaatgggaagctagccaccctaaatcagcttgaaggccgcttctccttcataaatcagctgacccggtacaataataaaatcgacggtgataagcataacttcaacatcttgtcatcaagggaaagacagtatcaaaagttcctcttctacaagtacttttatgccaatcccaaacccataatcgtcactgaaggaaaaactgacattgcctatctcaaagctgcgctcaaaaacttacataatgattacccgaacttgatcactaagagttcggatggcagctttgaattcaaagtgagctttctgaataagacaaagcgattagcccactttttgggtatttttcaggacggaggtagtgcactcaacaacatttacaactttttcgacgataaggcaaaaaaaacaaccccttcctatctcgactacttcaaagagatctccaatacattaccaacaaatcctgtgatattgatgttcgataatgagatcaactcaaagaaaaacaagccaatcggcagtttcattaatcacgctaagctgggcgataaaaaaaaaggaatactgctggaacagaacatggtcaatattgtcgacaacctctatttgctcaccgtgccactgatcgatgggaaactggagtgcgacatcgaggacctctttgaaaaaagcacactttctcagaagatcaacggccgtgagttctgcaagaaagacaagtacgactacagtaaatactatggcaaggagatttttagcaagtacattctggacaattacacggacatcaatttcaatgagtttcgttcggttctgaacaacatcaacaacatcatcgatatttacacgaaaggcctggttgacaccggagggaatccaaaggcaaaaagtcttgataagagctctgaagataaagtccccctggaggtttga

SEQ ID NO: 8455 - RNA, 1749 nt, synthetic construct
  source 1..1749: mol_type = other RNA
atggaatttcaggacatcaaaactaggaatgacctagccgattttctgagaatcccgaggaagaagctatcctatctcctatacaaaaagggcataaataccctgtacaccagcttcgagatcaacaaaaaatccggcggtttcaggaaaattaatgcgccactggctgagctaaaagacatccagcggaaactcagcgaagctctttacaaacataagaagaagaagaggaacattaagaacaatctcagtcacgcttttgaaaaagagaagtccatcattaccaatgccaagatacaccgaaataaacgcctggtgctgaatattgacctcgaaaatttcttcggttcgttccactttggcagagtcagaggatttttcatcaagaacaataacttcctgctcccaacagaggtcgcaacggttatagctcaactcacatgttatgaggggaaacttcctcagggagcccccacttcccccatcataactaacctgatttgcgagattcttgatcagcgtctcctgaagattagcaagaaatataagctggactacacacgctacgccgatgacttgacgttctctaccaacgataagaagtttctggaacgacaaactgaattctatgagatcctttccagtgaattaaagcgggcgggttttaagatcaacgaaaaaaagaagaggctgcagtttagagactctagacaagtggtgaccggactcgtcgttaataagaaaattaacgtgaaccgcatctattataaggagacacgcgccatggcccaccaattatacaaaaaagggagtttcgagatcaatggacagcctgctaaattgaataagttggagggacgtttcgcatttatcaaccagctcacctggtataacaataaagtcgaaggaatcaagacgcattttagtaacttcacaagccgcgagttgcaataccagcgcttcttattctacaagtatttcttcgcgaatcccaagccactgatagttaccgaggggaaaaccgatgtgatttatcttaagtccgctttgaagagcctgtacaaggagtatcccaatctcattaccaagcacacagacgggcgatttgagttcaaggtgtcttttctgaaaaagacaaaaaggcttggctattttctgggtatatatcaggatggcggctccgccttgaataacatttacaactttttcgggtcaaagaaaagtaatctgaactacctgaacgactttaagaaaatctcaggcaatcttccaactaatccggtgatcctgatgtttgataacgagatcaaatctggcaaaaaaaagcctataggccagtttttcatacatgccggcctggcagatgagaagcggaagaaacttgagaacgagtacatggtaaacatcatcgactcactgtatctcctcactgtacccctcattgggggtaaacctgaatgcgatatcgaggacttatttgagaagagcaccctgtcacataaaattgaagggaaggagttcagcaagaaagacaattacgatgtttcaaagtactacggaaaggaaattttcagccagtacattctgaagaactattcggacattaactttaacgaattccggtctgtgttggacaatatcaacaacatcatggatatttaccagaagcggctggcagacactgaaagaaatctggaagcaaaaaatatcgagaaatcttccgccgataaagtgttgctggaagtctga

SEQ ID NO: 8456 - RNA, 1752 nt, synthetic construct
  source 1..1752: mol_type = other RNA
atgagagagtttaatgatatcgggacccggaatgaactggccgattttttgaaaataccacggaagcagttgtcatatgtgctgtatgtgaagagcatcaacaatctgtacacttctttcgaaatccacaagaagaatggtggggtgagaaatattaaggcgcccctcgaggagctgaaagatattcagcgtaaattggccgaggctttatacaaacacaagaagaaaaagcagggccgaaaaaataaactctctcatgcgttcgagaagaacaaatccataattaccaacgcagaaattcatcgaaataaacggcttgttctgaatattgacctagagaacttttttgagagttttcacttcggaagagtccgcggcttcttcaccaagaacaaaaacttcttgttacccattgaggtagccacaattatagcccaactgagttgctacgaagggaaactgccacagggcgcaccgacaagtcctatcatctctaacctcatctgtggcatactcgactacaggctcctgaagattacgaagaagtataagctcaattacactcggtacgccgacgacctgaccttttccaccaacgataaaaacttcttgaatgtgcagaccaagttctatgaggaaatttcaaatgaactgatccaggcaggcttcaaaataaacgagaagaaaacaagactccaatataaagactccagacagaccgtgactgggctagttgtgaactccaaaattaacgtcaaccgtactttctacaaagaaaccagggctatggcccaccagctgtacaagcaaggcaatttcaagattaatagcgaatctgctgatctgaaccaactcgaagggaggtttgcctttattaaccagctgacccgctacaataatcagaaggacggcgataagcacaatttttacaatttaagctcccgcgaactgcagtaccagaaattcctattctacaagtactttttcgcaaatcctaaacccctgattgtgacagagggtaagactgacattgtctatctgaaagccgctctgaagaagctttacaatgagtatcctgatcttatcacgaaagacataaacggaacttttgagtttaaggtatccttcctgaagaaaacaaaaaggcttggatattttctgaacattcaggagggtggcactggactgaagaacatcaatgacttctttaatagcaacaacgctaaaaagtctgctatgaactacctaaactatttcaagaccatcagcaatacattaccacagtcaccagtgatccttatgtttgacaacgaaattaagtcaggcaaaaagaagcccattggagattttcttcatcatgcaaaagtcgacaatgagcaagttgatacgcttaagagcgagcacaagataaacatcatcgataacctctatctcctgacagttcctctgattgggaagagtgaatgcgacatagaggatttattcgataatacaaccttgtcccataagatcaatgggaagaaattcatcaagaaggacgactatgataccagcaaatattatggtaaggacatcttctcgaaatatatcctcgataactacctcaacatcgattttaacaacttccgcagcgtgttggacaacatcaacaacatcatcaatatctacatgaagcgggtcgtagacactggaaggaatatcgagacgacaaaaaatatagacgaatctgagaaagtgccgctggaaatctga

SEQ ID NO: 8457 - RNA, 1755 nt, synthetic construct
  source 1..1755: mol_type = other RNA
atgatggaattcaatgacattaagacacgaaacggcctggctgacttcctgaagattccaaggaaacagctttcttatctgctgtatttcaaagacgtcaacaatctctatacctctttcgagattcgcaaaaagaatggcggaagtaggaagatcaaggcccccatcgaagagctgaaggatattcagaagaagctggccgaagcactctataaacacaaaaaggagaaacgagggaaaaagaacaatatctctcatgctttcgaaaaagacaagtccatcatcaccaatgccaagatacatcgcaataagagactggtgttaaatatcgaccttgagaattactttgagagcttccattttgggcgggtacggggctttttcgctaaaaacaatgactttctccttccgattgaggtggcaacagtgatagcccaaattagttgctatgagggcaagctaccacagggtgccccttcaagtcccataatatcaaacctcatctccaaaattctcgatcacaaaatcatgaagatcgccaagaaatacaagctagattacacacgttacgccgatgacttgacctttagcactaatgacaagaagttcctcgaccttcaatcagaattctacgaagagatttccaaagagattaagagggcgggttttaagatcaatgagaagaagaagcggctgcagtttcgtgatagcaggcaagtcgtcaccggacttgtcgtgaacaagaagatcaatgtgaatagggtgtattacaaagaaactagagccatggcgcaccaactgtacaaatatggtaagttcggaattaatggaaagcccgctaccttgaatcagctggagggccggttcacatttatcaaccagctgatctggtataataataagatcaacggggaatactctaatttcaattatctgcactcgagagaactccagtaccagaaattcctcttctacaagtattttttcgctcaccctaaaccactgattgttacagagggtaaaactgacattgcttacttaaagtcagcactgaaaagcctttacaaagaataccctaacctcattaccaaaaaagatgatgggacctttgagtttaaagtttccttcctgaacaagacgaagagactaaagtacttcttgggcatcaaccaggatggcggcagtgcactgaacaatatttacaactatttcgacagcaagaagccagcccccaattacctgagctactttaaacagatctctaataactcccctatcaaccccataattctcatgtttgacaacgaaattgagtccggaaagaacaagcctattgggaaatttctgaaacacgttggattagatgacggcaaaaaggttatcctagaggataaatacatggtgaacttgattgataacctgtttctgcttacggtaccgttaatcgatgggaaagcggaatgtgatatagaggacttgttcaaggacgacgcactgttgcataaaatcgatggaagagaattcatcaagaaagacaagtacgatgtctccaaatattatgggaaggagatttttagccgctatatcagtgacaactattcgaacatcaacttcaagaactttaagtcagtgctgaacaacataagcaacataatcgacatatacactcatcgcctcgtggatactgagcacgatacagaaggcaaaaagatcgacgagtccaacgccaataaagtgccattgtctattatctga

SEQ ID NO: 8458 - RNA, 1758 nt, synthetic construct
  source 1..1758: mol_type = other RNA
atgatgaaattcaatgatattgaaacccgaaacgacttggcggactttcttaagattccgaaaagccagctctcgtatctgctgtacttcaaagacgttaacaactcctacacaagctttgacatttccaaaaagaatggcggtattcggaaaatcaaggctcctaccgatgaattgaaagaaattcagcgaaaactcgcggaggcattgtataaacaccgtgaaaagaagcagaacaacaacaacatttcccatgccttcaagaaggataagtctatcatcactaatgccaaaatccataggaataagcgctttgttttgaacatagatctcgaaaactactttgaatccttccatttcggacgggttcgcggcttctttgccaacaataagaacttcctgctgcccatgaaggttgctaccgtgatagcccagattagctgctatgacggtaaactacctcagggagctccaacatcacccataatttctaatctcatctcagagattctggaccggaggattatgaaaatcgcgaagaaatataagctgtattacacacgatacgctgatgatctgactttttccaccaacgacaaaaacttttcaaatcttcagaccgagttttatgaggagatctcagaagagattacgaacagtgggtttaaaatcaatgacaagaagaatcgcctgcagtttcgcgattccagacaggtggtcaccggcctcgtggtgaataaaaaaatcaacgtgaaccggatttactataaagagactagagccatggcacatcagttgtacacgcatggcaaatttgagattaatggtgagccagcaacacctaaccaactggaagggagatttagctttatcaatcagctgacctggtataacaacaagatagatggtgagaaacacacattctataatctgagttcgagagagctgcagtatcaaaagttcctcttctacaagtactttttcgctaattctaagcctcttatcgtgacagagggaaagactgacatcgcctatttaaaatccgccttgaagaatctatacgcagaataccctaacttaattaaccggaatagcgatgggacattcgaatttaaggtgtcattcctgaaaaagacaaaacgtttggcctacttcctcaaaataaaccaagacgggggatctgcactgaacaatatttacgacttctacaacgacaggaaaagaaataaatccacgcccaattaccttaggatcttcaaggaactgagtaacactagcccagaaaacccagtaatccttatgttcgataatgagatcaagtctgagggcaagaagcccattgggagcttcctcaatcacgctaaactgaatttcaagaagaagaccaagcttagtaatgactacatggtcgatatcgtcgacaatttatacctacttaccgtacccctggtcaagggaaagagtgaatgtgatatagaggacttatttgatgatggcgccctctctcaaatcatagacggaaaggagtttaccaaagaaaatgactatgatcactccaaatactatggcaaagagatattcagcaagtatgtggagagcgactatagtaatatcaacttcgacaggtttaagtctgtgctcgacaatatgaacttcatcatcgatacttacaagaaagagcacctgaataaggagcactcactggataccatcaacactgataactctaacaaggaccaggtgccgctggaagtctga

SEQ ID NO: 8459 - RNA, 1689 nt, synthetic construct
  source 1..1689: mol_type = other RNA
atgagggctttttatgacgtgaagaaccgcaatgaattcgcagatcttctgaagatccctcggaaacaactcagctacgtgctgtacattaaagggataaacaacctgtatgccagctttgagatcccaaaaaaggacggtggcatccgaaagattaatgcccctttggaagagctaaaagtcatccagcgaaaactcgctgaggcactgtacgagcacaagaagagtaagcgaaaaaacaacaatatctctcacgcattcgagaaagacaagtcaatcataactaatgccaaaatacaccgcaataagaggtttgtgttgaatatcgacctggagggatttttcgagtcttttcatttcgggcggattagagggttttttttgaagaacaaggacttcttgctgagtgaggaagtcgccactgtcattgctcagatcagctgttatgagggaaaactgccacaaggcgccccttcatcccccgtaattaccaatttgatctgcgagatcctggatcatagaatctctaaggtggccaagaagtacaaaatgaattacacccgctatgctgatgacctaaccttctccactaatgaccggaagtttttagatctccacgtgaagttttatggggaaatcagcgaggaactgattagggcaggctttattatcaacgaaaaaaagacacgcctccagttcagagattctcggcaggtggttacgggtctggtggtcaataagaagatcaacgtgaaccgcatttactataaggagacaagagcaatggctcaccaactttacaaacacgggaatttcgagataaatggcgagcccgccacccttaaccagttggaagggcgtttcagttttatcaaccagcttacttggtacaacaataaaatagatggctcgaaaaaccatttctccaatctgaagtcaagagaactgcagtaccagaaattccttttctacaagtacttcttctccaatcccaaaccattaattgtaaccgaaggcaagactgatatcgcctatctgaagagtgctctgaaaaacctgtataatgagtatcccaacctcataaccaaaaattctgatggcaccttcgaattcaaggtgagctttctcaaaaaaacgaaaaggttaaggtacttcctaggaattaatctcgatggaggtagcgccctgaataatatctacaacttcttcgacagtaagaaaccggcgcctaactatctcaactactttaagtcaacatcgaatacatcaccaactaatcccgttgtcctcatgttcgataacgagatcatctctggaagagagaaaccaattggcaaattccttaatcattccgcgctcgatacaattaaaaggaagaccttggaaaaggaatatatggtagacgttattgacaatctctatctacttacagtccctctgatagatggtaagccggagtgcgacatcgaagacctgtttgaggatatcacaatctcccatcgtattgacggcaaggaatttacgaaggacaataaatacgacaacagcaagtattatggaaaagagatgttttccaagtacattctgaacaactacagcgatataaactttaacgagtttcgcttagttctggacaacctgaacaatattatgaacaactacaagaacgcgttcgtggaacgggtgtga

SEQ ID NO: 8460 - RNA, 954 nt, synthetic construct
  source 1..954: mol_type = other RNA
atgaaagagttctacaacataaagacaagaaacgagtttgctgattttctcaatatccccaggaaacagttgtcctatgtgctgtacgtgaagggggtcaaaaatctgtacaccacattcgaaattccaaagaagaatgggggaatacgaaaaatcaatgctcctcttgaagaactgaaggatattcaaactaaactggccgaggccttgtataatcataaggagaagggcagaaagaaaaataataacatctctcacgcctttgagaagcagaagaacataattaccaacgcgaaaatccatcgaaacaaacgctttgtcctcaacatcgatctggagaatttctttgaatcattccacttcggaagggtgagaggcttttttaacaaaaacggcaatttcctgttcccaatcgaagtagcaaccgtaatagcacagattagctgctatgagggtaaactcccgcagggcggcccttctagtcccatcatcacaaatctaatttgtgagatcctcgatttccggatcatgaaaattgccaagaagtacaaactgcattacaccaggtatgcagacgacctaacgtttagcactaacgacaagaagtttctgaacctgcaggatgaattctacaacgagattagtaaggaaattgtcagggctggattcaacgtgaatgaaaagaaaacccgtcttcaattccgtgactcccgccaagttgttaccggactggttgtgaataaaaagatcaacgtgaatcgcgtgtactataaggagacgcgggccatggcccaccagttatataaacagggttccttcgagattaacggggaacctgctactcttaaccagttggaggggcggctgtcatttatcaatcagctcacatggtacaacaataagattgacaacatcaagcaccactttaacaatttaagcactagagagcggtga

SEQ ID NO: 8461 - RNA, 1752 nt, synthetic construct
  source 1..1752: mol_type = other RNA
atgggagagtttaatgacatcaagacaaggaatgagttagccgatttcctaaaagtgccgcggaagcaactgagctacatcctgtacgtgaaagggtctaacaatctgtatacaagtttcgaaatcagtaagaagaacggcgggaccaggaatattaatgctccttcaaaagagctgaaagatattcagaagaagctagctgaggccttgtacaatcacaaaaagaagcgcggatctgcggataaaatcagccatgcatttgaaatcgataaggggataataaccaacgcagagaaccataggaataaacgatttgtgctgaacattgatctggaggatttttttgactctttccacttcggaagggtgagaggctttttcaacataaacatccacttctcacttccaatagaggtggccacagctatcgctcaaatatcttgttatgaaggcaaactcccacagggggccccctccagtccaatcatcaccaatctgatttcagagattctggatcacaggctgctgaagattgccaaacaatacaagctggattacactcgatatgccgacgatctaacgttctcaacaaacgataaaaactttcttgagctgcagaccgaattttacatcaaagccagcgaggtgatcattagagctggtttcaaaataaacgagaagaagactcgtttacagcttcgcgactccaagcaggtcgttactggcctcgtagtcaacaagaagattaacattaacagcgtctactacaaagaaacgcgggcgatggctcaccacttgtataaatatggggaattcgagatcaatgataagcctgcgacattgtatcagttagagggacggttcgccttcatcaatcagctcacttggtataataacaagctggacggagaaaaacatcattttcagcgcctctgcagcagagaaagacagtatcagaagtttctgttttacaagtacttcttcgcaaatcccaaaccactgattgtgaccgagggaaaaactgacgttgcctatctgaagtccgcccttaagaagctctacaacgaataccccaatttgatcacaaagaactccaatggcaaattcgagttcaagatctcctttctgaacaaaacgaagagattgaagcatttcatgggtatttttcaagacggtggtactgcactcaaaaacatatatgacttctttgactcgaagaagtctgacaccaccaactatctcagcttttttaagaaaacctccaatactctgccgatcaatcctgtgatcctaatgtttgacaatgagattcactcgggcgataagaaacccatcgggaactttctcaatcacgccaaactcgatgaaaagaaacgtgaggacttaaaacacaagaacttcgtcgacataattgacaatctctatttgcttaccacacctctgatcggggacaagagtgaatgcgatattgaagacctcttcgaggatagtgtactgtctcacaagattgacggcaaagaattcactaagaaggataaatacgacgtttccaagtactacggcaaagaaatttttagcaagtacatccttaccaactatagctcaattaacttcacaaacttccgcaccatattggacaatatcgacaacatcatcaatacacatcggaaaggcggtgcaggagctggacatgacctggaggaaaaaaatatcgatatgatttccgcaggcaaggtcctgcttgagatttga

SEQ ID NO: 8462 - RNA, 1680 nt, synthetic construct
  source 1..1680: mol_type = other RNA
atgggtgaattcaataatatcaagacacggaatgggttagccgatttcctcaaagtcccacgaaaaaagctgtcctacattctcttcgtaaagggcacaaataacctatacagctcctttgagattaataagaagaacggagggacccgtaagatcaatgcgccctccgaggaacttaaagacattcaaaagaagcttgccgaggcattgtataaccacaagaaaaaaaaacagcgcgggtctttagaaaagatatcacatgccttcgaaatcgataaagggattattactaacgctgaaaatcacaggaataagaggtttgttttgaacatagacctggaggattttttcgattcattccactttggccgggttagaggttattttcataagaacgatcacttctctctccccttggaggtggccactgccattgcccagataagctgctatgaaggcagcctgcctcagggatcaccaagcagtccgattattaccaacttgatatgtgagattctggatcatcggattctcaagatcacaaaacaatacagactcgactatacacgatatgctgatgatctgactttttccaccaacgacaaaacctttctcgagagtcagacggagctgtacaagagaatctccgaagaaattaacagagctgggttcaaaattaacgacaaaaaaactcgcctgcagcacaaagatagccagcaggtggttacaggcttggtcgtgaataaaaagatcaatgtgtcaagtgtgtactacaaagagacacgcgctatggcccacaatctttacaagtatggggagttcaatataaatggcaatcttgcgactttgaaacagctcgagggtaggctctcttttattaaccagctgacgtggtacaacaataaaattgacggagagaagcatcattttcaacatctgtgttcccgggaaagacagtaccagaagttcctgttctacaaatatttctttgcaaaccctaagcccctgattgtgactgaaggtaagaccgatgtggtctatctgaaatctgcccttaaaaagctgcacaaggactatccatcactgatcataaaaaaatccaacgaggagtttgagttcaaggtatctttcctgaataagaccaagcgtttaaaacactttatgggcatctttcaagatggcggaacagcactgaagaacatctatgacttctttgctagttcgaaaagcaatattaactacctcagctacttcaaaaagacctctaacaaaagtccaaataaccctgtcatcctcatgtttgacaatgaaatcgagtccggaaataagaagcccataggaaactttctgaatcataccaaagcagatgaccgcaccaagatggacttaaagcagaagtacttcataaacatcatcgacaacctatatctgcttacaatccctctgatcggaggcaaaagcgagtgcgatatcgaggatctatttgaggactctgtgatatcgcacaaaatcgagggcagggaattcactaagaaggatgaatatgacatctctaagtactacggcaaggaaatcttcagcaagtacatttccaagaactatagtagcatcgacttcaccaatttcaggtcaatcctggacaacattgacaacatcatcaaatgtacggggtgcaagtga

SEQ ID NO: 8463 - RNA, 1479 nt, synthetic construct
  source 1..1479: mol_type = other RNA
atgatcacaaatgcacgcaggcacaggaataaaagaattgtctacaacattgacctcgaagacttttttgagacaatccatttcgggcgcgtgcgcggcttctttaacaaaaatcggaacttccagctgcccatcgaagttgccaccgtgctggcacaaattagttgttttaagggcaaactaccacagggatctcctagctcaccaataatctcgaatttgatctgccagatcttagacaatcgactccttaaagttgctaaaaagtacaagctcgtctataccaggtatgctgacgacttaaccttctctacaaatgacaataagttcctggataaccaattcaatttctacaaggacctgagtgaggagattaacagatcaggcttcaaaataaacgagaacaagaaccgaatacagtataaagaaagtcgtcaggttgtcacaggaatcgttgtaaacaagaagctgaacgtgaacagagattactataaagagactcgggccatggctcatcagttatataagaccggcagcttcgaaatttctggggaatccgggaccataaatcagcttgaaggaagatttgcctttatcaaccagcttaccaggtacaataatgagctggataatcagaaacacgacttccataatctgagttctcgagaataccaatatcagaagttcctgttctacaaaaccttctactataatcccaagccagtgatcgtaaccgagggcaaaacagatattctgtacctgaaagccgctctgaaaaatctgtacgatgagtacccgaaactcattacgaagaataacgacggcacgttcaagtataacatcagcttcctgaaaagaactaagcggcttaagcactttttgaacattaacatggatggggcctcagcgttgactaatatctacgactttttttccaaccggaataataagaaggcacccaactatcttaagtattttaagagcctgaacaacagcctgcccaagaatccagtcatcttgctctttgacaatgaattgaacaacaacgaaaagcctatctcccacttttgtaggaaggtcgccaagatcggtgatgagaagatcgaggctctgaaaaccgaattcaaagtaaacctaactgagaacctgtacctcctcacggtgcctttgatcggtgaaaagtcagagtgcgagattgaggatctgtttgatgagtccactctcctagagcgtatagaagggaaaaccttcactaaggcagccaagtatgatgtgacaaagtactatggtaaggagatattctccaaatacattctcaagaactacgcagacgttaattttaatgagtttcgggccgtgcttgacaatatcaacgatatcattgaccagtataacgtggactttgtgacagtgggagataaagcgaaagaggtgcaactgaaacgcagcgatattgacaaagtccctgtggaaatttga

SEQ ID NO: 8464 - RNA, 1728 nt, synthetic construct
  source 1..1728: mol_type = other RNA
atggagcagtttaataatctcaagagcaggaatgagttttcagattttctaaacatccctaggaagcaattgtcatacctcttgtacatcaagaagatcaacaattcttacacgacgttcgaaatccagaagaaatctggtggcgtccgcaaaatcagtgcaccatcagacgagctgaaggctgttcaaaagaagttggtggaggcgctgtacaaacataggaaaagcggcaatgggaataagtttagccatgcattcgagaaacagaagtccatcattaccaatgcacgtatacatcgtaaaaagcgatttgtgcttaacattgacctggagaacttcttcgagagtatccattttgggcgcgtgcgagggttcttcaacaagaacaaaaattttctgctgcccatcgaggtggccaccatcgtagcacaattatcttgctatgaaggtaaactcccccagggcgcccctagttcaccgattatatccaaccttatttgcgaaatcttggactaccggctgtttaaaatcgccaagaagtataagctgaattacactcggtatgctgacgatctcacgttctccaccaatgacaataattttgtgaataaccaggacgacttttataacatactttacactgagctggaaaaatccggcttcaagattaacgaaaaaaagaagcgcttacagctgaatagctcaaggcaagaagtgactggcttggtggtaaatgaaaaactgaacgtgaatagagtgtattacaaggagacaagggccatggcccaccagttatataagcagggcgaatttacagtgaatgggaataaggccacactcctgcaactcgagggaagattcagtttcattaaccagctgacctggtataacaacaaaatcgatgatcgaaaacacaatttccacaatctaagctctcgggagctacagtatcaaaagttcctgttctacaagtacttctttgctaatccaaagcctctgattgtcacagaaggaaagaccgacgttgtataccttaaatccgccttaaaaagcctgtataaagagtacccaaacctgattaccaaaaacaaggacggggcttttcagttgaaggtcagttttctcaacaaaacaaaacgcctgcagtatttcatgggaatctttcgggatgggggtagcgcgctgaataacatatataacttctacgaccacaagaaatccttaccggactatctcaagtacttccagaacatttccaatacctccccctctaaccccgtctttctgctgttcgataacgagattaagtctaagtcaaagaaacctatcggacagtttctcaatcatattagcctgaccgagaagagaaagtccctcctcgagatcgattatatagtcaagctaataggcaacttgtacctcttgactgtgccccttgttaaaggaaaagaagagtgtgacgttgaggatcttttcgacaacactgtcctgtcgcacaccatttctggtagaatctttactaaagaagacaactacgatgtaagcaaatattatggcaaggatatcttctccaagtacattcttaagaactacaacaacatcaacttcaacgacttcaaaccaattctggataatatatctcaggtggttgatagttactcgaaggagacagtcacaaatggagtgctggaaatcagccacaaagataaagttcctcttgaagtgtga

SEQ ID NO: 8465 - RNA, 1698 nt, synthetic construct
  source 1..1698: mol_type = other RNA
atgctcaaatttaacgaaattaaaacgaggaacgagctcgccgaatatttaaatatcccgcgacgccagttgtcctacatcctgtacgtgaagggaatcaataatctgtacaccagttttgagatacccaaaaaaaatggagggagccgtaaaattaacgctccctctggagatctgaaagacatccagctcaaacttgccgaagctttgtacgcccacgtgaagaagaaactgaacaagaagaacaatatcagccacgccttcgagaagaacaagagcatcatcaccaatgcaaaaatccaccggaacaaaagatgggtgctgaacattgatctggagaatttcttcgaatccatccatttcggtcgagtccgtgggttttttaacaagaacaacaacttcctgcttcctatcgaggtggccactgtgatagctcaaattagttgctacgaaggcaagctgcctcagggcggacccagctcaccagtgatcagtaacctaatttgcgagatattagactataggctgctgaaaatagccaagaagtacaagctgaactatactcggtatgcagacgacctcaccttttcaacgaatgaaaaaaaattcccggaattgcagatggacttttataaggagatctcgaaagagattagaagagcaggctttatcgttaacgagaaaaagaagagactccaatatgaggacagtaggcaggaagtgaccggccttgtcgtgaataaaaaagtcaacgtaaaccggacatattacaagaagaccagagcaatggcacaccagctgtataagcaagggtcttttgaaatcgatggcgagccagccactattaatcagttggagggtcggtttgcttttataaaccagctcacatggtacaataacaaaattgacggtgttaaacgcaattttcggaatctgtcatctcgcgagagggaatatcagaagttcttgttctacaagtacttctttagcaaccccaaacctctgattgttacggaggggaaaactgatatagcgtacatcaagtcagccctcaagaacctgcatgatgaatatcccgaccttatctctaagaattctgatggcacattcgagttaaaggtgtccttcctcaagaaaacaaagcgcctaaagtatttcctggggatttatcaagacggaggctctgcgctgaataatatttacgagtttttcgatagccgcaaaccaattcccaactacattaagtacttcaagaagattagcaacagcttgcctcagaatccagtgttccttatgtttgataatgaaatccgatcgggcaagaaaaagccaattggaaagtttatagaccacgtaaagcttggtgatgaaaaaaagggaatactcgagaaagactatatggtcaatatagtcgacaatctcaatattctgacagttcctttaatcaaagggaaatccgaatgtgacatcgaggacctgttcgacgataccgttctgtcccatattattaacggcaaggagttcaataagaaagacaattacgattccagcaaatactatgggaaggagatcttcagtaagcatatcctaaagaactacacctcagtggatttttccgagttcaggtccgtattgaacaacatcaacaatatcgtcaatgatcagaagaaggctcttaaagaaaaatctatggtgtga

SEQ ID NO: 8466 - RNA, 1677 nt, synthetic construct
  source 1..1677: mol_type = other RNA
atgaaagagctgcataacgtgaaaaccagaaacgaatttgctgattttctaaagatcccgcggaagaagctttcctacatattgtacatcaaaaaggtgaacaacctgtatcactcattcgagatctataaaaagtctgggggaatcaggaaaattaatgccccaactgtggagttaaaggatattcagcagaagttagccaaagcactctataagcaccaggctgacaaatggaacaaaaagcggaacaacctcagccatgcctttgagaaaaagaagagcataatcacgaacgctaaaattcaccgaaacaaaagattcgtgctgaatatagacctggagaactttttcgagagtttcaactttggtcgggtgagaggcttcttcataaaaaacaaccatctcttactgcctaatgaagtggcgactgttatcgctcagttgtcatgttatcagggaaaactccctcagggcgccccttcgtcacctatcatcacaaatctgatttgcgagatccttgacctgcgtttactgaaaatcgccaggagatataaggtagattatacaaggtacgcagatgatctgaccttctctacaaataaaaacagcttcctggaacaagaaacccgcttcctcgaagagatttctaaggaactaaagcgctctgggtttgagatcaatgaaaagaaaacaaggcttcagttcaaagacagtaggcaagtcgtgaccggattggtggttaataagaaggttaatgtcaagcgggactactacaaaaataccagggcgatggcacacactctgtacacacaaggcaaatttgagattgatggcgaggaggctacaatcgaccagctcgaagggcgcttttccttcataaatcaattggactggtctaataacatgaaaatcaaccggaacaacaaggactacaaaaatcgctttgctagttttaagagctcagagcgagagtaccagaagttcctgttttataagtatttctacgccaactccaagccactcattattaccgaaggaaaaactgacattgcctatctgaaatccgccctgaaaaatctgtacagcgagtatcccgacttgattacaaagaagaatgatggcacgttcgagttcaaaattagcttcttgaagaagagcaagcgtctcaattactttctggatatcaacaaggacggggcagaggggctgaagaagatctataaccttttctgcgaaaaaggtgatgtacgcaactactccaagtacttcaataagattagtgacacctttcccaacaaccctgtcatattggtttacgataatgagccatcaaatggcaaacccctgaatcagataatcaactatgcaggtctagagagagaaacgatccgagacaaactcatgatcactatagtggataatctgtaccttcttactgtccccccagtgaatgaaccgtctgagagtgatattgaagacctctttgatatcaagacccttgaacacaagatcaacggcaaaaccttcaataagaataatgagatggaccccactaaacattatggaaaggagagatttagccagtttatttccgaaaactactgtgatatcaactttgacaacttcaagcacattctgaataatatctccgacattgtcaaggaatacaaaaagtga

SEQ ID NO: 8467 - RNA, 1710 nt, synthetic construct
  source 1..1710: mol_type = other RNA
atgaaaaagttcaatgacataaagacaagggacgatctttcagacttcttaaaaataccaaccagcaagttaacctatgtactctacaagaagaaaacctcaaatctgtatacctctttcgaaattcccaaaaagaacggaggcatcaggcatatcaaagctcctctcaaagaccttaaggaaattcaaaaaagactggccctctccttgtggactcatcaaaaatatatctggaaagagaacggcattaatcccaatatctctcacgccttccaaaaggagaagagtattattacaaacgctcagattcacaggaacaagcgctttgtcttgaatatagacctcgagaactttttcgattcatttcattttgggcgtgttaaaggtttctttgagaagaacaagcattttctgctgccacaaggcgttgcaactatcatcgcacagctcacctgttacgagggcaatcttcctcagggggctccgtctagcccaattataaccaatctgatctgcaacatactggatatgaagctgctcaagatatccaagaagtacaagctcaattacacgcgatatgcggacgacctcaccttttccaccaatagtaagcagtttctggttcaacagtcagacttccacgaggagatctcaaaaatcatcgaaaaggcaggattcaagattaatgagaaaaagacacggcttcagtttagagatagtaagcaggaagtgactggtttgatcgtcaacaaaaagattaacgtggacagaaactattacaaggccactagaagcatggcgcacagcctatatacaacagggacctttcagattgatggcgaaactggcacgatcaatcagcttgaaggacggtttacgttcataaatcagttggaccagtacaataacaagattaacaagagtatcgacaagacaaccaagctggggttccatcacctgaatagtcgggagaaacagtaccagaaattcctgctgtacaagtatttttttgtgaacaacaagccgctgatcgtgacagagggtaagacagatattgattacatcaaatccgccctcaaaaatctgtacatccattacccaaacctagtgaccaaaaatagcgacgggacttttgaattcaaggtatctttcctgaataggactaaacgcttgcgatattttctagatattcagcaagacggagccgataccatgaagaacatctataactacttcaacaacaacggcaaggacagctaccccaatcactttaaaaaatttcaggagtctggattcactcctgcaaaccctattatctttattctggataacgaactgtcgaacaaggagaaacccctgaagaatctcacaaatcacatcaaattggacaaagataccgccaagaaagacttcttcaaaactaacttctacatcaacatcacatccaacttatatttgctgacacatcagcttgtcaaggaacttcccgagtgcgagatcgaagatctgtttgatgacttaacgctcaatcagactataaatggaaaacggttcgagcgcgataccaaaatcttcaacagcgctctacactgttctaaagccaaattcgccgatcacattagccagaattacgaaaagattgacttcaacaacttcaagtgcatgctggataatctgaacaccattgtgtcctcctatggtaataattga

SEQ ID NO: 8468 - RNA, 1707 nt, synthetic construct
  source 1..1707: mol_type = other RNA
atggacaaattcaataatatcaagaccctttacgacctgtcttatttcctgaaaatcccaacgaggaaaatcacctacatcctctataaaaagggaattgacaatctgtacacaagcttcgagatccctaaaaagaacggaggggtgcggcacattaatgcccccagtaaagatctaaaagacatacagcgcaaattggtgttgtctctctgggctcatcagaagcacatctgggaagaatcaggcaagaatttaaacgtctcgcacgcattccagaaagagaaatccattattaccaatgctcaaattcaccgcaataaacgttttgttctgaacatcgacctggaaaatttttttgagtctttccactttggcagggtacgcgggttctttgagaaggacaaaaacttcttgcttccaaagaaggtggcgaccatcatcgcccagctgacttgttatgagggacatcttcctcagggtgcccccagctcacctattatcaccaatctgatctgcaatattctggacatgaagttgctgaaacttagtaagaaatacaagctgaactacactcgatatgctgatgatctcacattttccacaaacaacaaacattttctcgatcaacagtctgatttctatgaggaaataagcaagatcatcgaaagagctggtttcaagattaacgagaagaaaactagacttcagttccgggactctaaacaagaagttacaggtctggttgtgaacaaaaaggtgaacgtggatagaaattatcataagatcactaggagcatggcccacagtctctacacgaaggataattttcaaattgatggggagtttggcgaaatcacacagcttgaggggcggttcagctttataaatcagctcgatcggtataacaatttagtcaagaaggaccgagacaaaaatgtgaagctgaactttcgaaacctgaattcacgggaaaagcagtatcagatgttcctgttttacaagtacttctacaaaaacaagcgcccgctcatagtcactgaggggaagacagatatcgagtatctgaagtctgccctgaagaatctgtataaggactatcccaacttgatcacaaaaaaaagcgacgaaaccttcgagtttaaagtttcctttttgaggagaaccaaacgtctgagctacttcttagatattaaactcgacggagccgacaccatgaagaatatttacaactactacatcggcaaagaaaacaacggttacccaaacttcgtgaaaaagtttaaagacctcggatcgatcccaaataaccctgtgatttttatactcgacaacgagctgaataattcaaataagcccctgaagaagatcatgaaccatatgggcttaaacaaaggcgtcagcaaatcaagtttcttttccgaagattactacattcacataacggagaatctatatctactgactcatcagctagtcaaagatctgcacgaatgcgagatcgaggatctcttcgacgatagtatccttaaccaaaagattcatgggaagaatttcgagagagatgataagaagttcaacattaacaaccactatggcaaggcaaattttgcagactacatatccaagaactataggtccattaacttctccaagtttaagtgtatgttggaccacttaaactctatagtaaccttcaagtccaattga

SEQ ID NO: 8469 - RNA, 1716 nt, synthetic construct
  source 1..1716: mol_type = other RNA
atgaataagttcaacgaaattaagaccaggaatgatcttgcagacttcttggatatcccccggtcaagattgacatacatcctgtatggcaaaaagattgaaaacttctacacgagctttgaaatactaaaaaagaacggagggactcgacagattgacgccccgaataaggagctgaaaatcgtccagaaaaaaattgcgaatgccctgtggaaccactataagggtctggccaagaaaacttcctcaaagaccaacttttcccatgcctttgagaaggaaaagagtatcattacaaacgctaaaatccatcggaataaaagattcgttctgaacatcgatctcgaagacttttttcacagtttccacttcggccgcgtgagggggttcttcgagaaaaataacaatttcaccctgcctaaagaggtagccacagttatggcacaattagtgtgttatgaaaagcatctgccacaaggagctccttcctctccaatcatcaccaaccttatatgtaacatcctcgatttccgtatgctcaaactgagccgcaaatataaatttgactacacccgatacgcagatgacctcacattctcatccaataacaagtatttcctggagaagcaccaggagatctatgacgagattagcaatgagattgaacgggccggatttagaatcaatgagaggaaaacaagactccagtatagggactctaaacagcaagtaaccgggttagtggtgaataagaaaattaacgtggatcgcgtgtactacaagaaaaccagagctatggcatttagtctctatagctgcggaagctttgagattgagggcgatcagggttctattaatcagctcgaaggtaggtttgcttttatcaatcaactagatcgctacaacaacaaactgtcaagcgagaaaaacgattttcggacactcaacagtcgagaaaagcagtatcaacagttcctgtattacaagtacttctttgctaacaagaagccccttatcgtgactgagggtaagaccgacgtcagatacctgaaggccgcaatgaagagcctgtgcgacgagtaccctaatctgatcacgaaatcctctgacactgaattcgaattcaaagtctcgtttctacgccggaccaagcgtctgaattacttcttgaatataacccaggatggagccgatacgatctcaagcatttataaattttcccaggcgaataatgagaagggctacatcaactaccttgaatacttcaagaaaatcagcaacactaaccctaagaatcccgtcattcttatcttcgacaatgagttgaatggagatcagtccaaaggcaagaacaataaaaataagcccttgcagaagttcatcaacctcattaacctcgataatgaatcccacgagaaattcaagaactcgctttcttacaacattctgggcaattttcacttactgactaaccagttagttaataacaaggatcaatgcgagatagaagatctgatagagtcaaaagtgtggaataataggatcggggggaagacttttagtattgacaaggagtttgacttggacaagcattttggcaaggaaattttcagtcagtacatcgaacagaactatgagacaatcgacttcgagaactttaaaccaatactggacaacatatctcagattatagacgagtataacgtcaagtcttga

SEQ ID NO: 8470 - RNA, 1701 nt, synthetic construct
  source 1..1701: mol_type = other RNA
atggacaccattgacaaagtaaaaagtcgcaatgaactggcagacttcctggatataccacgcaagaagttgagctacatactgtatatcaaaggcgtggacgacctctacactagtttcgaaattcccaaaaaaagcggcgggttccgccatatttatgcaccacagaaggatctcaaggttatacagagaaaactggccgaagctctatacaactgccagaaagagatctggaataagtgcaacgtcaacccaaatatctcacatgctttccagaaggaaaagtcctttatcaccaatgctaaaattcaccgtaataagcgctttgttatcaacattgatctggagaatttcttcgattcttttcactttggaagagtgcaagggtatttcctcaagaaccggtcttttcagcttccgtctgaagtggccaccgtcattgcacaattaacatgttaccaggggaaacttccccagggcgctcctactagtcccatcatcacgaacctgatctgcaacatcttcgatgttaggatttccaagctggcaaaaaaatatcgactggattatacgcgatacgtggacgatctgaccttttccacaaacaataaggagttcctcaacatcaaaaacatttttttcgaggagctcgaaaaagagatcattaatgccggcttctccattaataaaaaaaagacccgaatccagtacagagatagcagacaggaggtgaccggtgtggtggtgaataagaaattgcacgtcagccgtgattattacaaaaggaccagggccatggcctatcagctttacaagtctggcgaatattttatcgaaaacgagatcaaagggacaatcaatcagctggaaggtcggttttcattcattaatcaactggagtggtacaacaacaagttgaatcttgaggggaaaaaacttacctacgagtacctgaacggtcgggaaagggcgtattcccagttcattttttacaagtacttcttcgccaatcccaagcctttgatagtcacagagggtaaaactgacgtcacttacctgaaagccgcgcttaagaatctgtggaaggaatatccaaatctggtatctcggaattcaaagggccagtttgagtataaggtgagctttttgcaacggtcgaagaggtttgcttactttctcaattttaagaaggacggggcagacactatgaacaacatctataagttcttcagcgaggaggggggagagaagtatcccaactatattgagatgtttaagaacctgggatcaactgtacccctaaacagtgttatattactcttcgacaacgaactcaacaacaaaaacaagcctatctacaagtttgtgtcgaacaaaataagtgatgacagaaagaagcagctatgcacgaggacctggataaatctgctcgaaaatctctacctgatgataacaccgctggtcggcgagagcgaggaatgtgatatcgagatgttattcgatgaagccacattatctcatgaaatcggaggcaagaaattttgtaagaaggacacatacgatacttcaaaattctatggcaaggagatttttagccagtacatcatgaagaactactcctccatcgacttcggaggattcaaacctctgttgaataatattgacgtggtgatcaaggactataaagagcgcattcaatga

SEQ ID NO: 8471 - RNA, 1698 nt, synthetic construct
  source 1..1698: mol_type = other RNA
atgaacaccatcgacaaaatcaaaacccgaaatgaactggcagatttcctggaagtcccccgtaaaaaactgtcctacattctatacgtcaagggggtggacaatttgtatacctcttttgacatcccgaagaagaatggcgagagtcggcatattcatgccccacagaaggacctgaaagtcgtgcagaaaaaactggccgacgccttgtgtacgtaccagaaggaaatttggaaacgccgtaatatcaatcctaatatatcccacgcgttccaaaagggaaaaagctttatcacgaatgcaaaaatccacagaaataagcgtttcgtggtgaacattgatctggagaacttcttcgactcttttcactttggacgcgtgaggggctttttcttgaagaatgatgacttccagttctccgtcgaggtggccaccgttattgcccagttgtcctgttaccaggggaaattacctcagggagctccttgctcccctatcatcactaatctcatctgcaacatattcgacattagactcctcaagctcgccaagaaatattgtctggattataccaggtatgcagatgacctgacatttagcactaacgatgtaaagtttcttgagatagaagagctgttcttcgagaaactggaaaaagaaattaactcagcaggttttcggatcaacgagaaaaagactagaatccagttccgagatagccggcaagaggttactggcgtagtagttaatcggaaactgcacgtcagtcgcgtgtattataaaaagacacgggcaatggcttataacctttacaagacaggagagtatttcatagaaaaggatactcaagggaccattaaccagttagaaggcagattcagcttcattaatcaactggagtggtataataacaagctgtatccaggtaacaagaagctcattttcaacaatctgaatggcagggagcgcgaatattcccagtttgtcttctacaagtactttttcgcgaatccaaagccccttattgtgacggagggcaagaccgacgtgatatacctaaaggctgctttgaaatcattatggaaggagtaccctgagctggtttctagagataagaacgggcactttgagtataaaatcgctttcctacgaagaagtaaaaggcttgcctactttttaaaccttaaggaggatggcgccgacaccatgaacaacatctacaacttttttagcaagaacgggggagaaaagtatcccaattacatagaggtgtttcggaagcttgggaataggtttcccctgaatcccacaatcttgctctttgataatgagttgagcaacaaggaaaaaccggtgtgtaaatttaccaaaggtaaaatctcggaggagcagcgcgaagaactcaattcgaagacctggatccatatgacagaaaatctgtatctcctcatgacaccactgatcaacgaaaggaacgaatcagatatagaaatgcttttcgacaacttcacactctcaaaggagatcgacggtaaaaagttctgcaaaaaagatcgctacgacactgacaagttttacggaaaagagattttcagcaagtacatcatgaagaactactctaacattgatttcagtggctttaagccactgctgtctgacatcaaaattatttgcgagaactacaagaagaagatgtga

SEQ ID NO: 8472 - RNA, 1764 nt, synthetic construct
  source 1..1764: mol_type = other RNA
atgagctccattctggttggctatctttcagcctcacataatgagttgccacacgtgcttttctatgttctcggggattctatgaacaattttaaagacgtccgcacccgcattgcccttgcgaatctcttgggcgtgcccgagaataagctgacctatgtcctctatattaagaagattgagaacctctacacttcttttagcatccccaagaagaatggagaatcgcgccatatcaatgcccctcagaaggaccttaaagatatacagaaaaaactggcggactgcctgtacgaatatcagaaggagaataggatcaacaacaacattaagaccaatattagccacgcttttgagagagacaagtcctttattaccaatgcaaaagttcacaggaataagagattcgtgtacaatgtagacttagagaacttttttgggagctttcacttcgggagagtcaaaggcttcttcgaaaagaataaggacttccaactgccatccaatatcgccacggtcatatcacagatcgcttgttatcagggcgagttgccccaaggtgccccttccagcccgataattaccaacctgatttgcaacatctttgatatcaggctgatcaaactcgctaagaagtacaaactggactatacaagatacgccgatgatttaaccttttccaccaacaataagaagttcctagacactatttcagactttcactctgaacttagtaaggagattaaacaggctggcttcgagatcaacaataacaaaacacgtctgcagttccaggatagtaaacaggaagtgacaggtcttaccgtgaacaaaaagctgaacgtggataaaagttacttcaagacaacacgcgcaatggctcaccacctctacacccagggatctttcaaaatcaatgacaaggacggaactataaatcaactggaaggacgttttgcatttattaaccagctggaccggtataacaataagctggataatgggagtcataacattagggaactcaattcccgagaaaggcagtaccaaaaatttctcttctacaagtacttctacgcaaacaacaaacctatcatagtcacggagggcaaaactgatattttgtatctgaaagccgccatcaagaaattccattcggaatatcctgcgttgataaacaaacgatcagacggcaaattcgaatttaagattagcttcctgcggcggacaaagcgcctgaactactttttagacctgcaaaaggatggggccaatactatgaagaagctgtacaatttcttcagtaataaggaatctcggcactttcccaactactctgcatactttaaaaaaaacagcgtggttccaccaaagaatcccgtgatttttgtgtatgataacgagctcaagaataagaagaagcctatcatcgacttcttgaattacgctaacatcaaaccggagaaaagactcgaactagctgagatcctaagtatcaagatcatcaacaacctgtttctactgaccaatcctttgatcgtagaaccagagtccgagatcgaggacctgtttgacgagaagacattatccatcgtgcttaacggaaaaactttctcccggaatgacgatagcaacgataaagagcattatggtaaggagatcttctcaaaacatattagcagcaactactctaagataaacttcgataacttcaggcccatgctcgatcgaattactgccataatggagacgtatgaaaaatga

SEQ ID NO: 8473 - RNA, 1665 nt, synthetic construct
  source 1..1665: mol_type = other RNA
atgaaaaagttgaaagagcttcaaacaagggaggacctcgcactgtacctcgccataccactgcagaagcttacctatattctgtacaaatctaagccggattcctactacgacaccttcgagatccctaagaaaaacggagagtcccgccaaattcatgccccttcaggagatctcaagcagttacagagaaaactggcccagaggctctgggatgtgtatcgggaatttatagaagagaacgaaattcaggacaatatctcccatgcctttcaaaaaggcaagagtattatcaccaacgctaatattcaccgaaacaaacggtatgtgttaaaccttgacctgaaggatttcttcgatcactttcactttggcagagtgaggggattcttcatgaaaaacaagaatttcgagctccctgtggagattgccactatgatcgcacagttgacgtgctacgagggcaagctcccacagggtgctccaaccagccccattatcacaaatctggtgtgcaacattttggatatgcgtttactgaagatcgcgaaaaaatacagggtagtctatactcgttatgctgacgacatgacattttctactaacgataagaagttcctcgagaaccaggagaacttcatgaaatcgataaagaaggaaatcgaaagctttgggtttgagattaacgataaaaaaacccgcctgctgttctgtgacagccgtcaggaagtgaccgggctggtagtgaataagaaaatctctgtcaatagggagtactgcaaaagaacaagagccatggcggatgctttttatcgaagggggatctttgaaatctgtggggaagagggaagcgttaatcagctagaaggacgaattagtttcattaaccagatagactgctacaataataagaatgaccgggaacagaagcataccttctggactttaaatgcacgcgaacgccagtaccagaaattcctgttcttcaagtatttttacgcaaatacgaagccactaattgttacagagggaaagactgacatcgtgtatctgcgggcagcccttaaaaagtactataaggaatatcccgaactgataaagaaacaagatgacaacttcgaattccaggtcacctttctgcgcagatccagcagactgaaatattttctcggcatccaaaaggacggcgctgataccatgaagaacatctataacttctactctggcaagaacaacgcccccaaactctattcatggttcgcccaaaattcttgtaaaaagtcccagaaccccgtgatttttatcttcgataatgagcaggtatccgatcggcctttgaagaagttcttgaaccacctgaacaacaagggccttctggagagtagcaattataaccatatccaagacaatctctacatattgacaaatccgctggttaatgggaaaaaggagtgtgaaattgaggacctttttgatgatgtcgtgctgtcacacacaatagacggcaagatcttctcacggaaagaaactgacaatgagaagtactacggtaaagctattttttcccagtacgttgagcgccagtacgattctatcgactttagcaattttaagcccatgctagaggacatcaaaagtatcgtcggtagcaaaaagcaggggtga

SEQ ID NO: 8474 - RNA, 1659 nt, synthetic construct
  source 1..1659: mol_type = other RNA
atgctcaagtttaacgaaatctcctatcgagatgagctggcagagtttctgaatatccccttgaaaaagctgacctatatattgtacgtaaagaaagtggactcttattacacatcctttcagatcccaaaaaaaaacggggactacaggtccatagatgccccgtatggcgacctgaagtatatacagaagattctggccattaagctctgggagtatcacaacaaatacaccagtgataacaacatcaatatgaaagtctcacatgctttcgaaaaaaagaagtccattatcacgaatgccatcattcacaaaaataagcggttcatactgaacattgacttatctgacttctttgcctcattccactttggaagggtgagaggatttttcgagaaaaacaaggagttcaatcttcccatagaggtcgctacgattattgctcaactaacttgctataaagggcatctgccacaaggtgcacccagcagccctatcatatctaacctcatttgcaacatcttggatatgaggttactgggcatttcccaaaagtacaaacttgattataccagatacgcagaggatatgaccgtgtcaaccaacgacttcaaattcatttacttagttgacgacttcatgaaagagatcactaaagagatagagaaatctgggttttctatcaacaacaaaaagaccaggtttgttttcaatgattcacgtcaggaggtgactgggctggtggtgaacaagaaaattagcgttaatcgggattattgcaaaaagactcgggccatggccgatagcctttacagaaagggtgaatatgttatcaatggcagtaagggaactattcaacagctggagggaagattcgcctttataaatcagatcgaccgcttcaataataacttcaactacgtcaagcacaaaatctgggatttcaattcccgcgagaagcagtaccagaagtttctgttctacaagtatttctacgccaatacaaaacccttgatcgtcacagagggaaagacagacattctgtatattaaggctgctctgaagaagtactattataagtaccccgaactaattttcaagaaggacgaagactacatctttaatatctctttcctcaagcgatccagctttctggagtattttctgaatatctatcaggatggggcggatgacatcaaaaatatctacaacttctacgtgggtaataaccattacccaaacctttacgaattttttctcgaaaagtcaagtctcaaacctaaaaatcctgtgatcttgatcttcgataacgaacagaattcggatcggccgcttaagaaatttctcaaccacattaagatcgacagcaaaaatttcaagagcggccagtgtatatacgcgaacatatacctaatcacaaatccactggtaaagggcaaagcagaatgtgaaattgaggatctgtttgaagagacaattctcgaaaacgtcatcgaagataagaagtttagccgcgagaaaaagtatgacatcaataagttctacggcaaagacattttcagtaagtatatcaacgacaactacaaaaccatcaattttgacggctttattcctattcttgacgatatcaacaaggtggtgaccaacatggacttctga

SEQ ID NO: 8475 - RNA, 1686 nt, synthetic construct
  source 1..1686: mol_type = other RNA
atgaagaaactgatggaaattaagaccagaaatgagtttgccgatgtgctcgagatccccaggcagaaactgagctacatcctgtatgtcaagcacgtggacgaaatgtacacaagcttccaaatcccaaaaaaaaatggcgatttccggaatatcaacgcgcctattgaggatctcaagaatctgcagaagaagctttccgaacttctgtgggagtgtcagaaggagattaggatgaacaatgggatagattcaaacatgtctcacgcattcgaaaaagaaaagagcatcattacgaacgctatcatccatcgcaatcgccggatcgttctgaatatcgatctggaagatttctttggcagcatccattttggccgagtgaaagggttctttgagaagaatcgggattttaaacttagttctgaagttgcaaccatcattgcccagttggcctgctatcgcggagtgttgccccaaggtgcacccagtagccctatcataaccaacctgatctgcaacatgatagacatcagacttctcaaaatagctaccaaatacaaggtaaactacacgaggtatgccgacgatctgactttttctaccaataacaaaccctttctagacaagcagtccgagtttttatcagaggtgactaaggagattgaaagaagtggattcaaggtcaataataagaaaacgcggatcctctttagagactcccggcaagaagtaaccgggctgatagtcaatgagaaaatttcggtgaacagaaagtattacaagaaaagcagagcgatgtcttatcagctgtataaatctggcagctttgagatcgacaatgaggagggcagtgtcaatcagctggaaggacgatttgcctttatcaatcaactcgactggtataacaacaagcgcgatggcttagaacacaatttttggagcttgaattccagggagaaacagtatcagaagttcctgttttacaagtacttcttcaacaacaacaagccgttggttatcacagaggggaaaaccgatatcgattatattaaggccgctttgaaaaacctgtacattgagtatccggacctggtaactaaaaactccgacggtacatttaactttaaagttagtttcctccggaagagcaaacgcctgaggtacttcttaaatattcacctcgatggtgctgacacaatgaagaacatttacaagttctactccgacaaagagaataacaagttccctaacttctgtaagtacttcaaagagctttcaggtaacataccaactaagcccgtgatcctgattttcgacaacgaacttacaaacaaagaaaagcctctatacaagttcgtgaattatgccggcttaaacgggttgtctcagtgtattaaggagaagctgaatactaagctcacagataacctctatctcatgaccaatccacttgtctcaaataagacagagtgcgagattgaggacttgtttgaccgtgaaaccctatcgcatgaaatcaatggaaaattcttctcaaggaacaagacttccgacaacaataaattctacggaaaggaagtgttcgctaaatacatatcctcaaactaccgtgagattgattttgacaacttcaaaccaatactgaacatgctgaatgacattgtgtctctgcgaaagcaggcatga

SEQ ID NO: 8476 - RNA, 1713 nt, synthetic construct
  source 1..1713: mol_type = other RNA
atgaagttcaatgagatcaaaagtagaaacgagttggccaactttttaggcattagcatcaggaaattaacctacatcctctattctaagaagactgaatcttgctatacgagtttcgatatcccaaagaaaaatggaggcgtgagaaacattaatgcccccactgaagatctcaaacatattcaagtcaaacttgcaaatgcactttgggaatacaagaaatccatcatcaaggagaagaatatcaatgttaagatctctcatgctttcgagaagagaaagtccattataacaaatgcacagatccatcgtaagaaacgcttcatcttcaacatagacctagagaatttcttcaattccatccactttggccgtattagaggatactttgaaaagaacgagaacttcaagtttcctattgaaattgccactataatcgcgcaactgacctgctataatcactgtttgccccagggagctcctagctctcccattattaccaacttcatctgcaacattctggatatgaagctgctgaagatcgctcgaaagtataaaatggactatactcgatatgccgacgatatgacattcagtacaaacgataacaactttctcaacgaaatctccacattttacgccgaaattgaggagaagatcaatcagaacgggtttaccataaatggcaataaaacacgcctggcattccaaaattctaggcaaaccgtgaccgggctcgtagttaataataaaatatccatcccacgggagtattataagttaacacgggccatgatttactcattgtataagaacggggaatttacggctaatggcgtgaattccaccatcagacagctggaaggacggctagccttcataaaccagattgacctctacaataacaggattaccgatggccctcacagcatgcggactctgaattcacgcgagaaacagtatcagaagttcttgttctacaagtacttcttcatcccgcagaagcctctgatcgtcacggagggtaaaaccgatatagtgtatctgaaagctgccctgaagaaatactactataagtatcccgatctgattaccaaaatcggagataagtttatcttccacattagctttctgaaacgcactaaaaggctggcttacttcttgaatattaatctagacggggcagataccatcaagaatatctacaacttctacacaggtatagactcagtgccgaacatatgtaaatggtttgacgagaaaactaacgtcaggcgcattaatcctgtgatacttattttcgacaacgagcaggaaaacaacaagccactcaaaaagtttatcaatcacatgcagaagagccggcagaacaaagagatcaagctggagaaccccaggtacaaaaacatcattgacaacctgtaccttctcacaaacccactcatgaaaggtaagaatgagtgcgaaattgaggacctgtttaataaccagactctttcgcataagatcaacggtaaatctttttgtcgaaatggcaagtttgatagcgaacaatattacgggaaggaaaaattttcacagtacattgcctccgactacgagagtattgacttcaaaaattttcaggagatgctgaacgacataaacatcaccatcaacgaatataagagcgcgaatgagaacgaagagccaatcaaaaaggtatgtaaatga

SEQ ID NO: 8477 - RNA, 1683 nt, synthetic construct
  source 1..1683: mol_type = other RNA
atggatggctttaccaacattgctagcagaaatgaactggccgatttcctacgtatacctcgcaagaaactgacccacatcctatatatcgaagaggtcaacaatctgtacacatcattcgatattccgaagaagagcggggaaaagcgccacattaatgctcccacagacgacctgaagagcgttcaaaaacgcctcgcctacgctctttgggaacaccagaaaaacgtttgggaggagaaggatgttaatcctaacatttctcatggctttgagaaaaacaagtccatcatcacaaattctcggattcatagaaacaagcgcctagtgctgaatatagaccttgagaacttttttgactctttccactttggccgaatcagagggttctttgacaagaacatcgatttcaaagtgccgattgaggttgcaaccgtgattgcccaactgtcctgctataaaggatgtctgccccaaggagcgccctcctcccctattctcaccaatctgatcgggaatattctcgatatcagactcttgaagctggccaagcagtataagctggattatactcgctacgcagacgacctgaccttctcaactaacaatagggacttcctggctaactatcccacctttatcaaggaactaagtatcgaaattgagtcttctggattcaggatcaatcatcagaaaacccgattgcagtaccgggattcaaaacaagtggtgacaggactgatcgtcaaccagaagattaatgtggacaagtgttactacaaagtgacaagggccatggctcacagtctctattcaaaaggcggactcactataaacggtaaggagggaactatcaatcagctggaagggcgatttagttttatcgaccagatcgagagatataacaacaccatagatgaggacagccatgacttccggaatttgaacggccgggaggagcagtatcggaagttcctttttttcaagtacttcttctccaactccaagccactcattgcaacggaagggaaaacagatgtagcttacctcaaggcagccttgaaaaatctgttcgcgttatatcccgatcttatcagcaagaccgaatcggatgacttcgaatttaaagtaagtttcctgcgtaggaccaagaggcttaggtatttttttgggctgtccttggacggggccgacacgttgaagaatgtctacaatttttacactggcaaagaaggcctgccaaactacctgaagtacttcaatgtcatgtcatctgacaagcctaaaaacccagtcatcttattgttcgacaatgaactggccaataagaacaagcctctgtataaactcgtgaacaacaatggtctgaatgagacacagaagaaagacctcagcgacaaattaaatgtgaagataagcgagaacctttttcttttaacccacccattggcagagggtaaagacgaatgcgagattgagaatctgtttgatatagagacactctcgcatgtgatcgagggtaagactttatcccttgatagcaaatttgacaacaacctgtactatggcaaagaaatattctccaaatacatctctagcaactacaaggatatcgatttttcaggcttcagacagctcctggataaactcaacgagattattacgactttcaatagtacttga

SEQ ID NO: 8478 - RNA, 1785 nt, synthetic construct
  source 1..1785: mol_type = other RNA
atggctagttttaccgacataaaaacccaggatgacctgtttaagctgcttaacattcccaagaaaaacatgacgtatctgctgtacaacaaagaggagaaaggccctgagaatgcttaccacactttttccattctgaagaaaaatggggacaagcgcgaaatagatgcgcctaacgacgagctcaaatttgttcaaaagcggcttgcaatactgttgtgggccaatcaaaaaaagtcatggcgcctcaataacactaaaccaaacatctcacacggttttgaggagtctaagtcgatcattacaaatgccaaaatccacaggaacaagaaaatcgtgcttaacctggatttagaggatttttttcccagcatccattttggcagagtgaaaggcttttttgagaagaacaagaatttcaaggtgccaaaggaggtagctctggtgatagccaggctcgtctgctataaaggaaggcttccccaaggtgctcccaccagcccgatcatcagcaatttgatttgtagaatcctggacttccggctcttgaagctggccaaaaagtatcgactggattatacacgatatgctgacgacctgacatttagtactaattcctctagtttcgtggatgaagaacagttcttcctcgacaagttagaaaaagaaatcattagagcagggttcaagataaatgccaagaaaaccaggttgcaattttccaattccagacaggaggtaaccggacttaccgtcaataaaaagttgaatgtcagcaaggagttctataagaatactcgggctatggcacataaactgtacaccacaggagagtttttaattgatggtgaatcaggaacgatcaatcagcttgaaggccgattcgcctttatcaaccagctggacaagtataataacggcctagagtacgagatttccctgaataaaaacaatatcgagtaccagaagttcctgctgtccaccattaaagtcgagaataaccatcagatcatgttactgaatctgaacagcagagaaaaggaataccagaagttcctatactacaagtatttttacgggaacgaaatacccacgattgttacagaaggaaagactgatattcgctacctgaaagcagccctgaaaaaaatgtacaaggattatcctatcctgatcgaaaaaaacgggaacgattataaattcaaggtgcactttctcaagcgtgtgaataaaaagggcaacaaggacatttctcgtctgaagtacttctttaacttgccaatcgatggagccgacgcgatgaagaatctatacaatttcttctccgacaagaacaataagttatatcctaactacctggagtatttcaactttctctctacatcaaagcctagcaatcccacttttttcattttcgacaacgagctcaataatgacaagaaaccgctgcgggggttcatcaactacataaacgagaagaagaatatgcagagtcttaaggataacgggagtctccgggtgaccgaaaacctctatgtccttacaaatcagcttatcggtgaagcagaagaaaacgaaattgaggacttgttcgataaaaaaaccttggagcacaaaatcggcgggaaatcattctcgaagaaatccattagcgagaaaaacaatttctacggcaaagagattttctctaagtacgttctcgacaattttgaaaacatcgacttcgagaacttccgcccaatgctaaacaacctctctaggattatcagcgattatggcaagtga

SEQ ID NO: 8479 - RNA, 1749 nt, synthetic construct
  source 1..1749: mol_type = other RNA
atgaacgttttcaaagatgtggagaatcgcgacgacctctttgaaaggcttggaattagtaaacaactggccacttatctgctgtacggtaaaggcattgataattgctactcaactttcgtcatcgagaagaggaacggcgatccccgggtaatcaatgccccaaataaggagttgaaaagcgtgcagaaaagattggtaaacgcaatcctgctgcaaagaagctgtaataatcaaaacgggaaaagcctcaagatagcgcacgccttcgagaagaataaaagtattatcacgaacgccaaggttcatcggaataaaagattcgtactcaacgtggatttagaagacttcttcacttcctttcactttggccgtgtgcggggctttttcgagaatgataatacattcaaggtccctcgcaaggttgcaactgtgatagcccagttgacctgctataagggagtgctcccacagggagctccttctagtccgattattacaaacctcatctgtcgcatcatggacctgagaattttaaagctctctaagaagttcaacctaaattacacgcgatacgccgatgatctgtgtttttccactaatgaccagaagttcctgttggacgaacaggtctttttatctaaattaaccagggagatctgcaaagccggcttcaagattaactctaaaaagaccagactgcagttcagggacagccgtcaaaaggtgacaggactagtcgtgaaccgaaaacttaacgtcccgagagagttctataagaataccagggccatggctaataagttgtatgcaaatagtgagttcaccatcgacggcaagaaaggctccatcgatcagctggaaggccgctttgcttttatcaatcagattgacaggtggaataactcccttgaattagaacagagtattaccagcaatatgctcaattaccaaaagctactgcttcggtcaaagtatcagaacaaagagatctttggtaggctgaacgcccgggaacgagaataccagaagttcctgtactataagtacttttacgggaacgataaaccaatcgtggtgacagaggggaagacagacattctctacattaaggcagctctgaagaatctctatcagtcgtatcctgacctggtggagagaataggtaatgactataagttcaaggtcagctttttcaagaagtccaagaataacaaggagatcccccgcatcaaatactttttgaacatccctcaggatggggcagactctatgaaaaacctgtactcatttttctcggataagaactcctgctatcccaactatttggactacttccagaaaaaatactctagcaagccccttaatccagtgatttttatcttcgacaatgagattgagaacaataagaaaccagcgcgaaactttgttaaccatattaaaatccgcggggctctgtcagaactgcgtgacaagcagaggctacggataataggaaatctgtacatgatagtcacacctctggtaaactccctcaaagagactgatatcgaaagcctttttagctcacaaaccctggggcacaaaattgatggaaagtctttcaaccggaacgggggtaaagaatactatggcaaaggcatatttgctcagtatgtgtccaaaaactatgagaacattgacttcaccaattttaagccccttctggataacctcaacaaagttatcatcgactacaaagatggatga

SEQ ID NO: 8480 - RNA, 1785 nt, synthetic construct
  source 1..1785: mol_type = other RNA
atgtcaaacttgagtgagattaaatctagagaagacctctttcgcctgcttaacattcccaagaagaacatgacatacctgctctataacaaagacaaaaagggcactgagaatagttataccactttcaccatcaagaaacgaaacggagaagacagaatcatttgtgctccgaataatgagctcaagttcgtgcagaggcggctagccaatctgttatgggtcactcaaaaaaagatatggcgggaaaataacatcaagtccaccatttctcatggcttcgagaagaataagagcattattaccaatgccagaattcacaggaacaagaaattcgtgttgaatattgatctcgaggacttctttagtagttttcactttgggcgtgtcaaagggttttttgagaaggataggaattttaaggtgccacaggaggtggctctggtgatcgcccagttaacttgctataaaggtgtcttgccccaaggagctccgagctcacccatcataaccaaccttatctgtaacattatggacttgcggatcctgaaactggccagaaagtataagctcgattatacgcgctacgccgatgatttgaccttttccactaacgacatcgttttcctgcattttgaaaaggaattcctgatcaaactagaaaaggagatcgttcgggcagggttcaaagtgaatccaaaaaagacccgtattcaattttcgaattcacgacaggaggtgacaggacttgtagtaaataagaagatttccgtcccaaaggagtattataagaagacacgggcaatggcttacaatctgtacaagaacaaagagtacttcattgataacgtaccaggaacaatcaaccaacttgaaggccgctttgcgtttatcaaccagatagataagtggaataacgtgctcgagtacgagacatccttagacaacaataatctggaataccagaaacacctgctgactatcaagagaaaggagaaaaaccactataatatgctcaagcttctgaatcgccgagagagagagtatcagaaattcctgtattacaagtacttctacagtaacgagaaatccacaatcgtcacggaaggcaagacggacatccgttatttgatggcagccctgaaaagcctttataaggattaccctaacttagtggagaaagtgggcgaaaacttcaatttcaaggtttacttcctgaaacgctctaaaaaaaaagacaagagggaagtttcaaggtttaagtacttcttcaatctgcctattgacggtgccgacgcaatgaagaacctttacaatttctttagcgacaaaaacactctctgccccaattatctgaagtatttcagcagctttgagagcagcaaacccgcttctccaaattttttcatctttgacaacgagatctctaataaggacaaacctctgaaaaccttcataaattatgtgtacgccaaatcacagtctgcaaaggcggaagagatgaaggaaaaactgtacctcaaaatagaagagaatctgtacatagtcacacaccaggtgctagacggatgcaaagaaaacgagatcgaggatctatttgatgaaaaaaccaggggccatattataggggggaagaccttctcgcctaaaggtgattccaacaaccattatggcaaagagatcttttccaagtacattctcaagaactacaagtacataaacttcgaaaacttccggcctatgttggataacatcaacaagatcattaccgaatacaagaattga

SEQ ID NO: 8481 - RNA, 1719 nt, synthetic construct
  source 1..1719: mol_type = other RNA
atggactatttttctgacataaaaactagggaggactttttcaacattttgaacatccctttgaagaatatgacctacctgctgtataataaggagaaaaaaggaaccgaaaactcctatcacagctttgaaatcaaaaagcgtaacggcggcgtcagagtgattcatgctcctaacaaggagctaaaatttgtacagcagagattgctgaaggctctttggagaaaccagaccaaggtgtggcacgacaaaaaaataaacccaagtataagccatggatttcagaaaggccggtcgattatgactaacgccgaaattcatcggaataagaagttcgtgctgaacgtcgacctcgaagatttttttaacagctttcacttcgggcgggttaagggatttttcgaaaaggacagggactttaaagtccctcaggctgttgctctcatcatcgcccagctggtgtgttataaaggggcactgccccaaggggccccaacttctcctctgatcactaatcttatatgccgaattatggatctgcggctgctgaaactcgccaagcgttacaagttagattacacacgctatgccgacgatctcacatttagcacaaatgacagctctttttctaggctgagtcaagaattcctgctcaaactcgagtcagaaattaaacgagcgggattcaatctaaatcctgaaaagacgcgtctgcaatataagaacagtagacagtcagtgactggactcgtggtaaacaaaaaacttaacgtgcccaacgagtattataaaaagacccgcgcaatggcgcacaccctttataccaatggttcttttctgatcgatggcgtggagggtacactcgcccaattggaagggaggctgtctttcatcaaccagctggagaagcgcaacaatttaagcattaattccggctccaaggactataagaatctgggacggagagagaaggagtaccagaagttcatttacttcaagtacttctatgcaaacacaaggcccacaattttaacggaggggaagactgattcaaggtacctgaaagccgctctcaagaaattgtacaagaattacccgaatctgattgagtataagaacggcgagttcgtcttcaagatactcttcctgcacagggcagataaggagaaaccaaataaaacgacccggctaaaattcttttttaatattggcccccacggggctgatagccttgcagagctttactacttttcctccaataagaagtcaaaagttcccggttacatcaattaccttgagtacttcaagaaactgaaccagaacatgctgacaaaaccaaccattatcgtcttcgacaacgaactgagctccaatggaaaaccgttgcgcacctttatcaatagtttgaaagatgaacaggagatgcatatttctaacatccgccgcgatctgtccacccaggtgactgacaacctctacatccttaccaataaactagtgggcaccagaacagaggccgaaatcgaagatttgttcgacgacaaaactcgaaataaggagattgacggcagaacgttttcagccacagatataggtgagcaatattacgggaagaatatcttcagtctctacatcctcaagaattataaggaggttgatttctcgaacttcaagccaatgctggacaagttaaacgaaatcatcatcaacttcaagtga

SEQ ID NO: 8482 - RNA, 1797 nt, synthetic construct
  source 1..1797: mol_type = other RNA
atggtttcctattccgatatccagtctagggacgatttcttcaagctgttaaacatttcaaagcagcacatgacatatctactgtataacaaagacaagaagggaaccgaaaattcatactacaccttcgagatagaaaagaaaaacggtggcgtgagggtcatccacagtccaaacgacgaattaaaattcgttcagaaaagactcgcgtctgtgctgtggaacaagcagaaggaaatatggaataagaaagggatccatcccaatattagtcacgcctacgaaaaaaacaaatccatcattaccaacgccaaaattcacaggaataagaagttcattctcaatgtggacctggaggacttcttttcttcatttcattttgggcgtgtcaaaggcttttttgaaaaggacaataacttcaaggtcccctcggaggttgcactgattatcgctcaattgacatgctataaaggggttttgccacaaggagcacctagcagtcccattatcacaaacctcatttgcaagattatggacttccgcatactgaagatagccagaaaatacaggctggattacagccggtatgctgacgatctgacgttttcaacaaatcgaacatcttttttggacgacaaagaggcctttatgaagattttggagaaggagataaacagagccggatttaaacttaacgagaataaaacgaggctccaatataatagttcaagacaggaggtcaccggactgatcgtgaataaaaagctatctgtaccacgcgagtattataaacagacacgggctatggcacatactctgtacaaaactggtgagttctttatcaacaatgagaaaggtacagtgaatcaactggagggccggtttaccttcattaaccaacttgataaatggaacaacaagttggaatacgacaccacccttaacaataacaatttcgaacaccagaagtttctcctgagcctgaaccgaaaaggtgatggcggcgtgcaggagaaactcaaattactgaatacccgggagcgcgagtaccagaagtttctctactacaagtatttttacggcaatactaagcccacgatcgtgaccgaggggaaaactgatatacgatacctgaaggccgcgttgaagaaaatgtatcaggactaccctaaccttattgagaagaagaacaacaagttcatcttcaaggtatatttcctcaagcggatcgggaataaggaaacctcccgtttcaagtatttttttggccttgaaaaggatggcgctgacactatgaaaaacctgtacaactttttcagcgacctgggcaatgaaaaactctacccgaattaccttaagtatttcaacaccttcgataaacaccctctgaatcctacaatctttatcttcgataatgagatcagcaattccaaaaaaccattgggaagcttcatgaactatgccttcaataaaaagaagaaggtgaagcagtctaagatcgattgtctgaaagaaaacctcttcttaaagatcgaagaaaacctatacgtcgtgactaatcagttactgcccgagaaagatgaaactgagatcgaggacctctttgatgagaagaccctgcatcatagcattaacgacaaaactttcagcaaaaagggagatccgaatctgaactatgggaaggagatattttccaagttcattctttccaactacgaagaaattaacttcgagaactttagacctatcctgaataacatcaatcagatcgtgcgcaattttagtaagaatctatga

SEQ ID NO: 8483 - RNA, 1776 nt, synthetic construct
  source 1..1776: mol_type = other RNA
atgcccagcttttctgatataaaaaccagagacgacttctttaaacttctcaatatcccaaagcagcacatgacgtatctgttgtataataaggagaagaaaggcaccgagaatagttactatacattcgagcttgaaaagaagtcaggtggggttagaataatcaacacccccaacgatgaactgaaatttgtgcagaagcaactgacttctctgctgtggaaagcccagaagaatatttggaacaactcgtcattacatccgaatatctctcatgccttccaaaaagagaagtccatcattactaatgctcagatccataggaataaacgctttgtgcttaacattgacctggagaacttttttaactcattccattttggccgggtcaaagggttttttgaaaaggacaagaacttcaaagtgcctccggacgtggctctcatcattgcccagctgacctgctatcagggggtacttccccaaggtgccccctcatctcctatcatcactaacttgatctgtaggatcctggatttgaggatactgaagcttgcgaaaaagtacaagctggattattccaggtacgcggacgatctcactttttccacaaacatcaggtcctttgatgctcaggaaaaagaattcctatccgtactcgaaaccgaaattaaacgagccggatttaagatcaataccaaaaagacgcggcttcagtttaataattcacgtcaggaggttacaggactgatcgtgaataagaagattaacgtgcctaaggaatattatcggaatacacgtgcaatggctaattccctgtacaagaacgagaagttcttcattaacaacgagtggggcactattaatcagctggaggggcggtttgcttttataaaccaactggacaagttcaacaatagtctggagtacaactcgagcctgcgaaaaaactccattgaataccagaagagcctcctcagcactcagctgaaagagaactcaaatcacaatatgctgttattgctgaacgcccgggagaaagaataccagaagtttctcttctacaaatacttctacgcaaatcagaagccaaccattgtcactgaagggaaaacagatattcgctatttaaaggctgcattgaaatctttgtacaaagactatcctgaaatgatagagaagaaaggtaccaaatacatcttcaaggttagcttcttcaaaagaagtaagcgctttagatacttcttcaatttcagcctggatggcgccgatagtatgaagaacctccataactttttctccgacaacaacaataagctctatcccaattattggcaatatttcgatgccctaaacagctccagttctgtcaacccaattttcttcatcttcgataatgaactcagcaataagaacaaacccttaagaaactttgtcaatcacgtgtgcagcgtggagaaggagaacgcagacgcccaactaaagttgctgaaagagaagcttaatctgcagttaaaggataatctctacctgttgacaaatcagctgcttgatggatttaccgagaatgagatggaggacctgtttgatgcaaaaacactgaaacacatcatcaaaggcaagacgttctctaagaatggagacaacaaagaccactacggcaaagaaatcttctctaagtatatcctagacaactacaccaagattaactttgagaatttccgcctcatactcgacaacatgaatgaaataattcacgactacagtccaaactga

SEQ ID NO: 8484 - RNA, 1050 nt, synthetic construct
  source 1..1050: mol_type = other RNA
atgagattgaccgagattgaagataagaacatcttttttgaggagtttgacatatctaagcggagtatgacccatctgctgtatgtcaaagggactgatagcttctatgagagctttgaaatcccaaagaaaaatggaggattccggaatatcgacgcgccaaaaggaaagctgaaatatgtccagaaacgactagcggagattttatgggagacacagattgatgtgtggaagaaatacgccaacacctatgaatataatctctaccagaagaatctcaaagatgggattagataccgcgtcccgatgatctcacatgctttcgaggtaaacaaatccataatgacgaacgccaagatacacaggaataagaagttcatcatcaacgtggacttaaaagactttttcaagtctttccacttcggtagagtgaaagggttttttgagaaaaacaaggacttcaaagtgcctaccgaagtggccgttattatcgcacaactgtcttgttataaaggcgttctgccccagggagccccttcatcccctattatcactaacctcatctgccagattatggattacaggattatgcagctggctaaaagattcaagctaaactacactcggtacgcagatgaccttacgttctccactaataacgtccaaatcgtaaatgaataccagacattcttgaagaaactcgagaagaaaatagtgaaggctggttttgaaatcaatgaagacaagacccgcctgcagttcaataattccaggcagaccgttactggcttgatcgtgaataagaagctgaacgtcccccgagagtattacaaggacacccgtgcaatggccaatacactttataagacaggcagctttgatgtgaacgaacgcacaggctcgatcaatcaacttaatggcaggtttgcctttattaaccaactcgacaagtacaacaacaaactggagaacaatgctagcataatgaagaacaacatcgagtaccagaaatacctgctgagtgtggaaaagaaggagaagaatatttga

SEQ ID NO: 8485 - RNA, 1722 nt, synthetic construct
  source 1..1722: mol_type = other RNA
atgatcttcatcaacaagtttaacgccatcaatagccgaaacgaattgtttgagttcctcaaagtgaagaaggagattatgaactacatattgtacgtgaagaagacagagtgtagctacaattcattcaagattgagaagaagtctggagggtttagagagattaacgctcctgacgatgagctgaaagttatccagaagaaattagcccttagtctctggctttatcagaaggagatctgggacgaaaagggcatcaatcccaatatttcacatgctttcgagaaggacaaatccattatttccaatgcgcgtattcataggaacaagaaatttgtgctgaacctggacctagagaacttctttaagagtttccacttcggtagggtcaagggcttttttgagaaggatagagactttaaagtccctcccgaagtggccgtagtaatcgcacagttaacatgctatgatggctacctgccccagggcgctccatccagtcccatcataacaaatctgatttgccgtattctggacttccgaatccttaagctggccaaaaagttcaaactcgattatacccggtatgccgacgacctgacttttagtactaatcgcaaaggctttctggcagattacatagacttcctggaggagctgtccaaagagattctgagggctgggtttaagataaatgatagcaagaccagaatgcaatattctaacagcaaacagattgtgacgggcctgatcgttaacaagaaaatcaacattgacagcacctattaccggaagaccagggctatagcacacactctctacaaagggaaggaaattgaaataaatggcaagaaagcaacgatcgataatttagaggggcgctttgccttcatcaaccaattggaccggtataataatgctatcaacgctgaaattaccgtgggtaaaaaaaagaagtttgccttcaatggaagagaaatgcagtaccgcaaattcctcttttacaaatacttcttcgcgaacactaaaccactgatcgttacagagggcaaaactgatataaagtatatcaagtccgcactgaagaaactctataaggattacccgaatcttgtctcaaaaacgtctgatggaatctttgaatacaagatttccttcctgaagaagacaaacaggctaagatatttcctcggaatccagaaggatggagccacagctctgactgaaatctataaatactacgcaccatctaatgggcttaacgacccttacatcaattatatggatgagttcaaacggattagcgattctcaggccgaaaagccagtttttctgctcttcgataatgagatgggtaaaaagtctgacaagcctttgaagaaatttgtgggttgtgcgaaaattaacgaggacaaaatctccgaactgaaagataccctcaaattgaagctaatcgacaatttgtacgtgttgaccaacccgctcgtgagtaataaagaagaatgcgaaattgaggacctgttcgacaagaaagtccttgagacagtcataaaagggaagacctttcaacgcaacgaaaaaaagtttaacaaggaaaagcactacgggaaagaaatattcagcacctatattgccgagaattatgagtcgattgacttctcaaactttaagaagatccttgataacatcgagtcaatcagccagaaattcaagttaggatga

SEQ ID NO: 8486 - RNA, 1731 nt, synthetic construct
  source 1..1731: mol_type = other RNA
atgtgcgagatcaataatattaagaccaaaaaggacctggtgaaaattctggacattagcataaagaagctcacatatatcctgtatgtcaagaaagtagacaatatgtacttctctttcgatattcccaagaaaaatggaggtgttcggaaaataaatgctcctgaaaaaacgttacgcttcatccagcgcaatctggccaaagccctgagtaattacaagaaaaacatctgcgagaatgaaaagattagcaatcgtgtgagtcacgggttcgaaaagaacaagagtttcatcacaaatgcaaggattcacagaaataagctttatgtgatcaacttcgatctgaaagacttctttgactgttttcattttggccgagtgaaagggtattttgagaagaacatctacttcaagttgcccaaagagattgccattattatagcgcagttgacttgttaccacggatatcttccacagggtgctccgacctcccctgtaattaccaacctgatctgcaatatttttgacatgcgtatcttaaagctggctaagaaatataagctagattacacacgctacgccgatgaccttactttctcaaccaatgagaaagaattcatcaaagtgtacagcaatttctacaaggatctcgtcaaagagattgacaaaagcgggtttaaaataaatgagaagaagagccggattcaatattcgaattctaggcaggaggtgaccggggtagtggttaacaaaaagctgaacatcaatagagagtattacaagaagaccagagcaatggcagattctctgtataaaactggccgattctttatagatggaaaggaaggaacaatcaaccagttggaaggcagattttcactcatcaatcaggtggtctggtataacaacaaaattctcaaggaaaaggagaagcataataagtacatcaagaagaacgtcgaaatctacaagaagtcttgtactcgggaaagagattatgagcgcttcctcatttacaagtactttgtcattaacaaggagcccctgctgatcactgaaggcaaaacagataaactttacattcaagctgccttgaaatccctctataaagaataccctaaactgatcatcaagaacaaaaatggcaactttgagtataagatcgatttcttcaacaggactaaacggataaactatttcctggatgtgaataagacaggggccgataccctcaagaacatctgcaactactattttgacaaagttaagaacggatacgagaactacattgaggactttttcaagatcataaacatcaagcccaaaaatccagtaattctcctttacgacaatgaatttgacacctccggtaaaaaaaataacaagcctgttgccaaactatttaataatgacaggctctcaaacaagaaagactacatcataaagaacaggtttctgaagatcaaggagaatctgtacgtgatggtgataccattggtgaacgacaagaagaactgtgaaattgaagatctattcaaggatgagttgctgaaacagaaaatcgacgaccggatctttgaccgcaaatccaatgataatgagacaaagattggcaaagatacgttttccaagtatgtcaaggcgaactataaagatatagacttcagcaacttccgactgcttctggacaccatcaagaacatcttaaacgactacaaaaacaacgagtga

SEQ ID NO: 8487 - RNA, 1749 nt, synthetic construct
  source 1..1749: mol_type = other RNA
atgtgcgtgatcgatcacattaaaacccggaaagagctcgcgaatatcttaaatatctccgagaaaaagctcacgtatatcctgtatgtgaagaaaatcgacaacatgtatagaactttctctattcccaagaagaatggcgaaacaagggagattaatgcaccagagaaaatgctgaacttcgtccagaagaacctcgccaaatttctcctgaattaccggaatggcatctacaagaccgaaaacattaataacaaggtatctcacggcttcgagaaagagaaatcctttattaccaatgcggaattgcataagaacaaacgatacgttcttaactttgatctcaaggacttctttgattgtttccattttggtagggtgaagggttatttcgaaaagaacagatacttcaagctgtcaaaagatatagccactatcctagctcagctgacatgttataagaagtgccttccacagggagcaccaacatcacccataattgttaacctgatcttcaatatggtggatattcagattatcaagcttgccaagacctacaagttgaactacactagatatgcagacgatatcacctttagcactaatgacaagtttttcttggaaaagtactctgagtttgagaacaagtttctgtacatcatagagaagtatggcttcgtggtcaataagaataaaacgcgcctccaatataaggattaccggcaaaaagtgacaggcttagtagttaataagaaaatcaacgtgacccgcgagtactataaggagacacgagccatggcccatcagttgtataagaccggatcattttttatcgaagagaacaaatctgggaccataaaccaactggagggacgtttttcctttataaaccagatcgagaagtacaacaacatcatcgacattaagaaaggcggcaaaaaacacaggattgtcacgttgtcgaacaaagagaaagaatacagcaagttcctgttctataagaacttcttcaacatgggtaagcctattatatttaccgaagggaaaactgacgtgatgtacatcaaagctgccctcaagaatctctacaaaaaataccccaatctaatcgaggagactaaaactggcttcgattacaagatcattttcttcagaaagtccaagaagatcaggtatttacttaacatcgaagctaacggagctgacacaatgaagaatattgccaatctgtatagtgggagcgaaagtttccctaattacatcgaatacctcaagtctataagcaaacagaaacccaacaatcctataattctgctgtttgataacgagattgaaagcaagaacaagccgattaaaaatttccttagttgcaaagccgtgaagtccttctataaagatgacatactagagaaacagctgaaggaaaaaaactacgcatgtcttaaggataatctgtatgttcaggtcacaccattgatagggaatatcaaagagggggacattgaaacactgtttaaaaaagaaaccctggcacacaagattaatggaaagtcattcatcaagaaggacaaatacaacaacgaatattactacgggaaagagatcttttccaagtatgtgtatgacaattaccggaatattgacttcagcaactttgtctatctgctggacaatattaacgacatcattaaggactaccaaatccgcaaggctggaaatgatatgcaccctaaatattggacctactga

SEQ ID NO: 8488 - RNA, 1668 nt, synthetic construct
  source 1..1668: mol_type = other RNA
atgtctaactataacaatgccagggaatccctgagtaatttccttaacattagtctgaagtacctgacatacattttgtacgtgaaaaagatcgagaatctgtacacgacttttaaaatcccgaaaaagaatggcggctgcagagaaattaacgcaccccaaaacgagctgaagatgatacagaaaaagctcgttttctttctagaagaaaagatgaaggacaagttcaagactatcaatatttctcatggctttgtaaaggagcggaatattattaccaacgctaagatccacaaaaataaaaagatcgtcctcaacctggacctcaaagatttttttgactcttttcacttcgggcgaattaaaggcttcttcgagaagaacaaggatttcaaatttagccccgagctggcaacccttattgctcaactggcttgttataatgggaagcttccacagggtgccccttcctcaccattgatcaccaacttgatttgtaacatctttgacatccgggtgctgaatctcgccagaaaatacaaacttaattactctcgctacgcagatgacttgactttctccaccaattataaggggtttatcaaaaatctggaggagtttaaggaagacattttgcttgagataaagaagaacgggtttgaagccaacatgaaaaaatatcgcctgacttttcagaacagccgacaggaggttactggtctaaccgtgaataagaagataaacgtcagcaagatttactacaaaaacactcgcgcaatggcctattccctgtacaagaatggcgaatttaaaatcgacggaattaaggacggaacaattaatcaactggagggaagattctccttcatcaaccagttggatatctacaataatttcgagaagaaccggacaaaaaaagaaaagggaaaaaaggacggtatcaaatcctggaatatttataactcgcgtgagaaagaataccagaaattcctattctacaagtacttcttcatgaatcagaaaccactcatagtgacggaaggcaaaaccgacatcttatatatcaaggcagcgctgaaaaatctgtataatgattatccctcactcatcattaaggaggagaacaaattcatcttcaaggttagctttctcaaaaggaccaaactcctgaagtattacctaaatttagccttagacggagccgataccattatgaacatatataaccacttcgtcgatgcttatagctcgttctataactacaacgattacttcaagaagctgacaaaaaaacaggcgtttaacccagtggtgttaatatttgataacgagatcgagacagaaaaacccctgaaaaagtttctggcccatgcttttcctaagtctagggagatcaatgagaagaaggacataatcaagaagaattgcaagctcaatatcatcgataatctgtatctgctcacaataaacctcgtagatgatatgaaagagtgcgagatagaagacttgttcattaaggacattcatgaaaggtttagcttcaataaagacaaccctgacaagaacaaattttcaaagaacatcctgaagaactacaagaacatcgatttcagtaatttcaagccttttctgaacaatcttgccagtattcttaaagaatacaactga

SEQ ID NO: 8489 - RNA, 1680 nt, synthetic construct
  source 1..1680: mol_type = other RNA
atgtttaattttaagaatgcccgagagatcttgagtaagatcctcaacattcatctaaactatctgagctatatcctttacgtgaaaaagatcgagaatctctacacaactttcaaaattcctaagaagaacggcggctatcgggagattaatgcaccccagaacgagctcaaaatgattcagaaaaaattcgtctccttcctggaagaaaagatgaaggagaagttcaagacaattaataccagtcatggtttcgttaaagagaggtcaatcatcaccaatgcgaaaattcacaagaacaaaaagatcgtgttgaatctggatttgaaagactttttcgactctttccactttggtagagtaaagggattctttgagaagaacaaagacttcaaatccttttttcctgaactgaccagcgagctaagcactctgatagctcagctagtttgcttcaatggcaaactaccacaaggtgccccatctagtccactgctgacgaatctcatatgtaatatcttcgatgtgagagttctgaagcttgccaaaaaatacaaacttacttactcccggtatgccgatgatctcaccttttcaacaaactacaaagggtttattaggaatcttgagaagtttgaggaagacattttactcgaaatcaagaagaatggattcgaggcgaacatggaaaaatatcggctcacatttcagtcttcacggcaggaggtcacagggttaacagtgaataaaaagatcaacgtaagcaggaagtactataagtacacgcgcgccatggcctatagtctgtataaaaacggagagtttaacatcgatggcattgatgggactattaatcagctggaggggagattcagcttcatcaaccaattggacaagtataacaattctgaatcggaaaagcgaaaaaaattcatcgcacgtaatgtgctgaacagccgcgaaaagcaatatcagaacttccttttctacaagtacttcttcatgaacgaaaaaccgctgattgtgactgagggcaaaaccgacatactgtatatcaaagctgccttgaaaaacctctataatgaatatcccaacctgatcacgaaagaggagaacgagtttatctttaaaatctcctttctcaagcgcaccaagctgcttaaatacttctttaatctctctcctgatggagctgactctatgaagaacatttacaactactttggggacaagaatagcaaattctacgacttctacaactatttcaagaaactgacaaacctggaagctttaaatcccgtgattttagtctttgacaacgaggcaactgagaattccaaaaaaccccttaagaagtttctcaatcacattttctccgataaaaacgacaacgacaaaaagaacctcatatcatatgtcaggaccaagtttaagctgaagatcatcaataacctgtacttgttgaccataaatctggtggatggcctggaggaatgcgaaatagaagatctgttttttgaggatacctacaagaagtttagcttcgacaagattaatccaaacaaggacaagttttcaaagaacatcctgaagaactacaagaatatagacttctccaaattcaagcctttcctgaataaccttgaatcgattttgaaggagtacaataagaaggattga

SEQ ID NO: 8490 - RNA, 1701 nt, synthetic construct
  source 1..1701: mol_type = other RNA
atgaaactgagcgaaatccggtgcagagaggacctcgcttgcctcctgaagattaaaaccagcagtctgacatacgttctctatcgtgccaaagtcaactccttctataaaacctttgatatcccgaaaaagaacggcggcgtcagacaaataaacgcccctaccgacatcctgaagatcatacaagagcgcctggcaagcgccatttactcgtacatgaaaaatctgaggacagagaaaaatatcaacgtgaatatagcccacgcctttgagaagaaaaagtccattattaccaacgctcaaattcacaagaacaagtatatcgtactgaccttcgacctagagcactttttcgatagttttcatttcgggcgggttgccggtttttttgagaaaaacagagactttcaccttccccataatatggcaattatattagcccagttgacgtgttataacgggcatttaccccagggggcacctacgtctcccataatcacaaatctgatattccagatttgcgatatgcgcatcctgaagttagcaaagaagtacaagctggactacactcgatatgctgacgatctgaccttctctactaacaatcatagcttcatcgacgaaaaagaatcctttcagcgagaacttgaacgagaaatcggcaaagctgggttttcaattaaccaaactaagactaggatgtcactccgcaattctagacaggaagtgacaggactagtggtgaacaagaagatcaatgtgaatgcggggttttacaggaaaacgcgtgcgatggctcatcagctttatcagaatggatctttcaccatagatggtaaggagggtagcatccagcagctggagggacgctttgcctttattgatcagctggatcactataataacaaaattgacggcaagatccactcattccgggatcggaacggcagggaaaagcagtacagcaagttccttttctacaagttcttttacgcaaatgagaagcctctcatcgttacagaaggaaaaacagacatcagatacctgaaagccgctcttaagtcgctgtatctggattatccagagcttatatccagaaacaagaacggctcctacacattcaaagtgcaattcttgcacaggactaagcggttgtcttattttctagatatcgcggtagacggcgcaaaaccgctctacaacatttacaagtacttcatcaaagggcgcgacagtgcctaccccaactattataagtttttcagtaaggacggagagaagaaaccacgcaatcctgtcgtcattctgctggacaacgagatgaagcccaacaagccactaaaaggcttcttagaccagatcaagtcaactgaatccgagaaaaatgatctgcagcagaagttgtcactccggctgcttgctagtggcaacttatatctgctcactaatcctttggtggataataaagatgagtgtgagatcgagctccttttcaccgaggaaaccaggggaattaaactggagggtaagtctctctgtttggaagaagaaagctttgagaaatcaaattcctacgggaagaacatctttagcaattacatcctccagcactacaatgagattgacttctctaggttcattccactgctcaacgccttgagttccattatcaaaaactatagcgctgaaatgagaaattga

SEQ ID NO: 8491 - RNA, 1707 nt, synthetic construct
  source 1..1707: mol_type = other RNA
atgaaaactttcgccaatataaaaacactggatgacctatcaatcattctgaaaatcccaaagaagaaacttacctacattctctacataaagaagcctaacaacagttacaaatctttcaagatcccaaaaaagtctggtggtgagcggactatcaatactccatcaacagatctgaaagatattcagagaagtatactgaagatcctttggaagcagcagaagatcttatgggaagaacacaaaatcaaatcgaatatcagccacgcctttgtgaaaaagaaaggcatcctcactaacgcacgggtgcacaagaataagaggtatgtcttcaatatggatttggaagacttcttcgacagtttccactttggaagggtccgcggcttcttcgagaagaacagagattttttattcccgcagaatattgcgaccatccttgcacagttaacttgttataatgggtgtctcccacaaggggctcccaccagccctattattactaacctgatctgcaacatcttggatatgcgactgctgacagtggccaaagaatttaaactcgactatactcggtacgctgacgatctcaccttctccacgaatgatgagaaatttgtagagaatttggaggatttcaagactaaagccaaggaaattatcaaccatagcggatttaagatcaacgagaagaaaacaaggctgcagtataaaaatagccgtcaggttgttacaggtctggtggttaacaaaaaagtcaatgtgaaccgcgatttctataaggagacaagagcgatggcaaattctctctacaagaatggggagataaaaattaatgagaagagtgccaccatcaatcaactagaaggaaggctctcctttataaatcaaattgaccgagacaacaacaaggtcaacaagaaaagcaataagaagttccattctcatctgtcaaccctgaacggaaaagagaagcagtaccagatgtttctgttctataagtacttcatggccaacaataacccttgcatcattacagagggcaaaacagacataatttacatcaagtatgccctgaagaaaatgcaccgtgactaccccaaactgataaaaaagaattatgacggcacctttcagtacaaaattagttttctcaaccgcaccaaacggctcaaatatttctttaacttggagcttgatggggctgacacgatgaacaagatctacgaattttactcaaacaggaacaatgattcctttcctaattacaacgaaaagttcgagaaattcggcgtgagcccggagaaccccattatttttatacttgacaatgagctgtcgtccaaggagaataagcccctaaaaaaactgatttcacaagtggctctggataagaccaaaatcgcttctttcaaggaaaacaacttcatcaacattacctccaacctgtatcttacaacccatcagctggtgaaggacttgaaggaatgcgaaatagaggacttgtttgataatgatacgctgaacgtcaagttaaataacaagtccttcgaacgcgattctaaaaagtttaacgacaagatccactatggcaaggcaatttttgccgaccatgtgtccaagaattacaagaacattgacttcagcgaatttagacccctccttgacaacttgaataacatcatcaccaattacagcgtaaattga

SEQ ID NO: 8492 - RNA, 1704 nt, synthetic construct
  source 1..1704: mol_type = other RNA
atgcaaacgtttgaaaatataaagacgctggacgacttatctatcatcctgaagattcctaacaaaaagctaacatacatcctgtacattgttaagcctgacaacagttacaaatcattcaagattccaaagaagagcggaggcgagagaacaatcaacactccatctaccgatctgaaggatatccaaaggagcattgtcaaaatcctctggaaacagcagaagatattgtgggaggaacacaaaatcaagtccaatatctctcatgccttcgttaaaaaaaagggcattctgaccaatgccagagtccacaagaataaaagatatgtcttcaacatggacctggaaggattttttgattcttttcacttcggtcgtgttagagggttctttgagaaaaatcgggatttcctgttcccaaagaatattgcaaccatcctcgcccagctgacgtgttacaatggctgccttcctcagggggcacctactagtcccattatcacaaatctgatctgcaacatcctcgatatgaggctactgaccgtggccaaggaattcaaactcgactacacaaggtatgccgatgatcttaccttcagtacgaatgacgagaagtttgtggagaatttggaagacttcaagaccaaagctaaagagatcattaatcacagcggcttcaagataaatgagaaaaagacacgactccaatacaagaactcgcgacaagtagttactggcttagtggtaaacaaaaaagtgaatgtgaaccgggaattctataaggagacaagatccatggcgaatactctctataagaaagggaaattcgagattaatggaaagactgctacaattaaccagttagaaggacggttcgcttttattaaccagattgaacggtacaacaacgggatctataagaacaacaatgcaccactgaaactgtgtgacttgaacggtaaggaacgccagtaccagatgttcttattctacaagtacttcttcgggaactccaagccttgcatcattactgagggtaaaaccgacattgtctatatccagagcgccctaaagaatctctatgagtcctatcccaaactggtgaaaaaaaaagctgatggcacttaccagtttaaaattacatttctcaggcgttcgaagaggttgcggtattttcttgatttccaacttgacggagcagatacaatgaccaaactgcacaatttttactgcaacaccaataacaactcctatcccaattatccggaaaagtttcgcaagctaggtactacccccaaaaatcccgtgatcttcgtgctggataacgagctgcataataatgagaaaccattgcgcaagctgatcaaaaacgtcaaacttgacaagaatctcagcgaatttgactcatccaaggagaagtaccatatcaacataacctctaacttgtaccttagtactcatcagcttgtgaaaggcctgcaggaatgtgagatagaggacctctttgatgataataccctgaacaccaagatatatgataagacctttgaacgcgatagcaaaaagtattcagacaagaagaactatggaaaggcggcctttgctgactacatctcaaagaactacaaggacatagactttgagaatttcaaaccgctgctgaacaacattaacgagataatcacaacatacagcttgtcttga

SEQ ID NO: 8493 - RNA, 1707 nt, synthetic construct
  source 1..1707: mol_type = other RNA
atgtatactttcaagaacatttccacgataaccgatctggccaagattcttaagattccaaagaagaagcttacctacgtgctgtacattaagaagaccgacaattcctataagtttttcaagttgcccaaaaaatccggtggagagaggacaatttacaatccaagtgacgacttgaaggatatccagaggtcaatagtgaatttgctgtggacacagcagctaatcatttggaaggagaataacattaagcccaacatttctcacgcattcatcaaagaaaagtccatcataaccaatgctcgagtccataagaataagcgatatgtctataacatggatctggaagacttctttgattcatttcacttcggccgcgtcagagggttcttcgagaaaaacaaagacttcttattccctcaaaacatagccacggttttggctcaactcacctgttataatgggtgcttgcctcagggagcccctactagccctattataactaatctcatctgcaacatcctggacatgaaactgctgcagattgcgaagaagtttaagctggattacactcgctatgctgacgatctgaccttttctactaatgatggacactttcttgagaacatagaggaattcaagattcagaccgagcgtatcataaaatacagcggcttcaagatcaataaaaaaaaaacacggctccagtatcaaaattcaagacaggtcgttaccggacttgtggtgaataagaaggtgaacgtgaatcgtaaattctataaagagacgcggtctatggccaacaagctttatgtaaacggagaatttaagatcaacggcaaaaaagcaagcattaatcagctggagggtcgctttgccttcatcaaccaaatagacaggtacaataactccatcaagatcaacaacaacaaaatccaaagcaagacaagaaatctgaacggcaaagaaaaacagtaccagatgttccttttttacaagtacttcttcgccaacaataatccctgtatcgtgacggaagggaagaccgatattttatacatcaaatccgctctgaagaatctgtatgaagagtaccccaatctgattcagagaaattctgatggtaccttcaactacaaaatcagttttctgaatcgcacaaaaaggctgaggtactttttcaattttgagttagatggggccgacactatgaatcagatttacaacttcttctccaacaagaataacgacaaatatccaaactaccaggagaaatttcggaagcttggctcttcgccaaataatccggttatctttattctcgacaatgagttgtctaaccgggataaacccctcaagaagctaatcaaaccgctggaactcgaaaataactcactcaagtttaaccacttcaaagacaacaactttgtaaacctcactagtaacctgtatctcctgacccatcagctcgtgaaaaacctaactgagtgcgaaatcgaggatctatttgacgaaagcatcctgaacaccacactgcacaataaaacatttgagaaagacagcaagaagtttgatgacaaactgaattatggcaaagcagcattcgcggattacatcagtaagaactacaacaaaatcgactttacagagttcaagttactgctcgacaacttgaatgaaattatcacaagccatagttcaaagtga

SEQ ID NO: 8494 - RNA, 1707 nt, synthetic construct
  source 1..1707: mol_type = other RNA
atgaatacatttgagaacatcaccacactcgatgatcttagccggacgttaagaattcagaaaaagaagctgacctatatactgtatgtcagaaggatagagaactcctatacttacttcactataccgaagaagagtggtggagaacggaccataaattcccccagcactgacttgaaagaaattcagaagtcaatagaccgcctgttacgcaaacagcagattatcttttgggaggagaacaatatcaagcctaatatatctcacgccttcaataagaagaagtcaatcatgactaacgcaaaggtccataaaaataagcgttacgtctttaacatcgacctcgaggatttctttgatagctttcattttggccgggtgcgagggttcttcgagaaaaataaaaacttcctgttccctcagaatattgctactattctggcacagctcacctgctataacggctctttaccacagggggccccaactagtcccatcattaccaatctcatatgcaatgtgctggatatgaagctgctgaaaattgcaaagaagttcaagcttgattacactagatatgcagacgatttgacattttccacaaataacaccaactttttggaaaacttcgaagagttcaaagaccgcgtcgaggctgtgatcaagtacagcgggtttaagattaatgagaagaagaccaggcttcaatataaggactcgcgccaagtagtgacaggcctcgttgttaacaagaagatcaacataaacagggatttttacaaggagacacggtccatggccaacaccctctataagcacggagaattcaaaattaatggcgagcaggcaaccctgaatcaactggaaggcaggtttgcctttatcaatcaaatcgatcgtttcaacaacgatatctacatcaagaacaacaccgtgaaacccaaactgtgtgacctgaacggaaaagagaagcagtaccagatgtttctattctataagtacttcttcggaaacaacaagccgtgtatcattacggaagggaaaaccgatagtatctacattaagtcagccctcaaaaaactgtataacctgtatcccactctaattaagaaaaatcaggacggttcttacaatttcaaagtgtcttttctgagaaggactaaacgattgcggtacttttttgactttcccctggacggtgccgacagtatgaagaagttgtacaacttctactgtaatacaaacaacgattcattcccattctacgctgaaaagttcaaagaacttaatgttgtccccaaaaatcctgtgatctttattctcgacaacgagcttgagaacaattccaaacctatctccaaactgattaaagcgacaaaactggaaagcgataaacagaagcttgccttcttcaaatctaaatattacgcgaacatctcatctaatctctatctgagcacccaccagctagtgaaagaaaagaaagagtgcgagatcgaagacttatttgatgttaatacgttggagacaatcatcaacaacaaaacgtttgagagaaatagcacaaagtacaaggaccaaaataattatggcaaagctgtatttgccaattacgtgagtaagaactacaagaagattgacttcaacaatttcaagccactgctcgacgctatcaacgaaattgtgtccaattataccacaacctga

SEQ ID NO: 8495 - RNA, 1716 nt, synthetic construct
  source 1..1716: mol_type = other RNA
atgaaaacttttgaaaatatcagcacccttgacgagctgagtcaaattctgaaagtgccaaagaagaagctaacttatatcctgtatgttaagcgtatcgaaaacctctacacttcttttgagatccccaaaaagactggtggagaaagaacaatttcttcacctagcaccgatctcaaggaaattcaaaaaaacatagctgagctcttgcgcaagcagcagaatatatttctagaggagaacaacatcaagccaaacgtggctcatgccttcaacaagaagcggagcattatgacaaatgccaacctccataaacacaagaggtacgtgctgaatattgacttggagaacttctttgactcttttcattttgggagggtgcggggatacttcgagaagaataagaactttctgtttcctcagaacgttgctactattttggcccagctgacctgctataacggcaagcttcctcagggggcacccacgtcccctatcataactaacctgatctgtaatgttctggacatgaaactgctcaagattgccaagaaatttcgattagtgtactcccgatatgcagatgacttaacctttagcaccaatgatcgcaatatattagaaaatctggaggaattcctggcgcaactggagttcattgtaaataagtctggcttcacaatcaataagaagaagacacggcttcagtataaagattccaagcaagtcgtgaccggtttagtggtgaatgaaaaagtcaacgtcaatcgtttgttctataaagagacacgctccatggccgacaccctctataagaccggcgaattcaggataggagacgataaaggtaatctcaatagactggaggggaggttcagtttcatcaaccagatcgacagattcaataataaaatcgggaagggcaaaaatatcggcaacaaggagtcaaaaaaactgaacggtagagagagacagtatcagatgtttctattctacaagtacttctactgcaataccaaaccatgccttattactgagggaaaaacggacattatctacattaaatcagccctgaaaaagatgtatctttcatacccaaacctgatcgagaaaaactctgatgggacatttcactttaaattcctcttcctgcgccgatccaaacggatgcggtacttttttgaactcaagctggacggcgctgatacgatgagtaagatatacaacttctactgtgacacaaacaatcacaactatcccaattacgtaaaaaagttcaccgagaagtcggtgagtccgattaacccgacaatcctcatatatgacaacgaattgaagaacaaggataaacctttatcgaaggtcacaaatactacgaaaattaggcaggatgaggaaaaatataactttctcaagaccaaccactatgtaaatgttacaagcaacctatacgtccttacccaccagcttgtgaagggactgcccgaatgtgagatcgaagatctgttcgacagcaatactctctccgtgacaatcaacgacaagaccttcgaacgcgatctgaaaaagtttgacgagaacaaaaactatgggaaagcgatcttcgcaggctacatttctaagaactacctgaatatcaacttcgatgagtttaagcccctgttggataatcttaatactattgtcacctcctacaatttgaaaagccagacctga

SEQ ID NO: 8496 - RNA, 1695 nt, synthetic construct
  source 1..1695: mol_type = other RNA
atgaagaccttcgataacatcaagaatttagagcagttgtcccaggttctgaaggtgccaaagagaaagctaacttatgtactgtatgtgaaacgcattgagaatctgtacatggactttgaaataccaaagaaaacaggaggcaccaggaaaatctcgtctccatccaaggatctcaaggaaatacagaagaatattgccaagctccttgagcgtcagcaggaaatcttcctgaaagagaacaatatcaagtcaaacatcagtcacgcgttcactaaggaccgctccataatgaccaatgctctcattcataagcggaaaaagtatgtcttgaacattgacctggaaaacttttttgatagcttccattttggcagggtcgccggatacttcgagaagaacgagaatttccttttccccaagaaaacagctgtgattctggcacagttgacttgttataatggcaaactcccccaaggttcccctagctctccgatcattactaacttaatctgcaacattctcgacatgaaactgctcaagatctcaaagaaattcaaggtggactatagtagatatgccgatgatttgaccttctcaacgaacaataacaaattcattgaggagctggacatttttttgagccagctggaaaaaatcatcaacaagagtggctttgaaatcaataaaaagaagacacgcatccaatacagagattccaagcaaatggtcacgggacttgtggtgaacaacaaagtgaacatcaaccgaaaattttacagggagactcgggcaatggccatcagtcaataccacacaggaactttcaaaattgataatgaggaagggaacttgaaacgtctggaaggaagattttcatttataaaccagatcgaccggttcaacaagaagattacctctaaaaataccgtggttggcaaaaaaaccaatatactgaatggcaaggagaagcagtaccagatgttccttttctacaaatacttctactgcaactcaaaaccatgtatcgttaccgaggggaagacagacataatgtatatcaaagctgcactcaaaaacctatacaaattttaccccaagctcatagagaagaaaagcgatggtactttccactaccgaatttcttttcttaagagatccaaacgcattcggtatttttttgacctgagcctcgacggggccgacacaatgatcaagatctacaattgttactgcgatgtgaataacgtcaactttcctaactatgccaaattctttgaaaacaaaggtgtcctctatacaaaccctacagttctgatatacgacaatgagcggtccaatacagaaaagcccctgtacaaggctcttaaagccaccaagattaacgaaaacaaggaaaaattggagagcctgaagagcaattactatacgaacattactagcaatctgtatatcctgacccatcagctagtgaatgggctggccgagtgcgagatagaagacttattcgactctaagatcttagagatgaagattgatgggaaatcttttgagaggaaccttaaggattttaatgataccgagcactatggcaaagcaatcttcgctgattacattctgaagaattatcacgcgatcaatttcgacaattttaggcctttcctggactgtctgaataagattgtagaaagttga

SEQ ID NO: 8497 - RNA, 1728 nt, synthetic construct
  source 1..1728: mol_type = other RNA
atggacacatttgaagatatcaattccctggaggagctggccaagattctcaaaattcccaagaagttcttaacgtatatcctgtataagaagaaggtggagaactcttatactaatttgctgatccctaagaagagtggcggtcagcgaaacatttcaatccctatgaaagagcttaaagacgtgcagaggaatatcgtcaaggtgatgcttacacagcagaacatatttcagtttgagaacaacatcaagtctaatatctcccatgcttttaccaaggacaaatccatcattactaatgccgagattcacaaaaacaaacgcttcgtcctgaatattgacttggaagacttcttcaagtcatttcattttggtcgcgtccaaggatactttgaaaaaaacaagagcttcctgtttcctaaaaatattgccacagttctagctcaacttacctgttacaatggtagcctgccccagggagcccctagttcgccaataatcaccaatctgatctgcaacattctcgatatgaagctgttaaagattgctaagaagtacaagcttgactatagtcggtacgccgacgatttgacctttagtactaacaacaagaacttcgaagaaaaaagcgaggagttcttttaccagctcgaaatcatcataaagcagtctggctttaaaatcaatccaaagaagactagactgcaatacaagacaagccggcagatcgtaactggcctggtagtcaacaagaaagtgaatgtgacacgagaattctacaaaaacacccgtgctatggctaattccttatataaaaccggagcctttaccattaacgatactaaaggcacattaagacaactggagggccgctttagcttcatcaatcacattaataaggtgaacaacaagaagagacagatcaatgataaagaaagtactctgaacttcaggtgcttgaacggacaagagaaggagttccagaagttcttgttctacaagtatttcttcaacaacgagaaaccatgcatacttaccgaaggccccaccgacatactgtatctaaaaagcgcgctgaagtctctgtatgaagactaccccaaactcataaaaaaagtgaatggcgagttcatcttcaagattttttttctggagaggtctaagaagaaaaaaacacagaaggtatccaaaatggagtattttttcgggctcaaagagaatggggcagacacgatgatccagatatataattactacgtcagcaacaaacagaagaagcattgcccgaattattcagaactcttcaagaagatgaacgtgactagcaaaaacccctgtattctcatactggataatgaactgtcagtgaaggagaaaccccttaaaaacctccttaattacatggggattatcgatgggtgcaagatcgcggaactcaaagagaagtgttacctgaattctacatccaacctatatgttgccacgaacccgttggttaatgaactcaaggaatgtgagatcgaggatctatttgaggaggccgtgctgaagaccgaactcaatgggaaaacatttgagaaatccgaaaaagcattcaacgatacccggaattacggaaaaagagcactgtcaaagtacgtgtggaataactacgacaacattaatttcgagaacttcaggccattattggatgcaattgaccagatcgttacgaaatataaccactga

SEQ ID NO: 8498 - RNA, 1752 nt, synthetic construct
  source 1..1752: mol_type = other RNA
atgaatacgttcgaagatataaccagtattgataacctctcaaacattctgagaactcctaaaaaaaagctgacctatatcctctacatcaagaagatccagaattcttacaccacgtttcaaatatcaaagaaaagcggaggacagaggattattaacgtgccatcaaaagatctgaaggacatccagcggaatatagtaaatatgttgctgaaccagcagaaaaagttctactatgagaacaagattcggttgaacatcgcccatgcgtttacaaaagagaagtctattatcaccaacgcaaagatccacaaaaacaagcgatttgtgctcaatatagacctggagaattttttcgagtcctttcactttggacgagtccagggatatttcgagaagaacaagaactacttgtttcccaagaatattgccactgttctggcccagctgacctgttataatggatctctgccccagggcgcaccttctagccctattattaccaacctgatctgtaacatcttggacatgaagatcttgaagatcgccaagaaatacaagttagattacacccgttatgcagacgacctcacttttagtacaaataataagggtttcgacgaaaaatcagaggagtttatctcgcagctagaaatgattatcaagcaaagtgggtttaagatcaataggaagaaaactcggttacagtacaaacaatccagacaagtggtaactggcttagtggtcaacaagaaagtgaatatgccccgtaatttctataagaatacacgcgctatggctaattccctctacaaaaatggctccttcacaattaatggggttgaaggcagcctcaagcaattggagggcagattctccttcatcaatcacatcaataaggagaacaacaaagagaagaaaaagattgacaagaactccaaactcggttttaggaatctgaatggtcaagaaaaggaataccagaagttcttgttctacaagtacttcttcaacaatgagaaaccatgcatccttaccgagggccccacagacataatctacctcaaaagcgctcttaaaaacctttatacggactatcctaaactgatcaaaaaggtcaatgacgacttcattttcaagatctcttttctgaagcgcggggaagatcctaaggcttcaaaagcgcataagaaaattaaagggcagaaaaccagcaaactgcagtacttttttggtctggagaaggatggggccgacacaatgaaacagatttacaacttttacgtgtctgataaacagaagaaagattgcccgaactatagtgagatcttcaagaacatgaatgtcaacagtaagaatccatgcatattcatcctagataacgagttaaacaacaaggacaaaccgattaaaacccttactaactatatggatctgaagccagataaacttgacgaactgtgcgataagaactatctgaagataatcagcaacctgtacattgttacaaatccacttgtgaatgagctaaacgaatgtgagattgaagatctgtttgagctcgacactctgaagaccgaactgaatggcaaaacattcgaacgctgtgaaaaaaaatacaacccctccgagaattatgggaagagggcctttagcaagtatgtgtggaaaaactacgaggatataaacttcgaaaacttcagaccccttctcgacaacataaatcagatcgtcacgaactataatgactga

SEQ ID NO: 8499 - RNA, 1701 nt, synthetic construct
  source 1..1701: mol_type = other RNA
atggatacatacaaggacattacatcacttgatgatttgtcacggattctcaagacacccaagaaaaagctgaccttcgtattatacatcaagaaagcagagaattcctataccagcttcaagattcctaagaaatccggaggtgagcgagtgattaatgcaccatctaatgacttgaaagatatccagcgaaacatagtaaaaatgcttcttaagcagcagagagttttcttgtttgagaacaacatcaagtccaatattgctcatgccttcactgaagacaaatctatcatcacaaatgccaaagtccataaaaataagcgttttgtcctgaacctggaccttgagaatttttttgagtcctttcacttcggcagagtgaaaggctatttcgaaaagaacaagaactacctattccctgagaatatcgctactgtgttggctcagctgacctgctacaatggttctcttccacaaggggccccgtcctctcccataatcaccaacctgatttgtaacatcttagacatgaaactgctgaagactgccaaaaagtacaaactggattacacccgctacgcagatgacttaaccttctcaacaaacaacaagaatttcgcggaccagctcgaggaatttaccaagcagctggaggtaatcataaaacagagcggctttaagatcaacgagaagaagactaggctgcagtacaaacaaagtcggcaggtcgtgacaggattagtggtgaataagaaggtgaacgtcaagaaagatttttacaaagacacaagggccatggttaattcactgtataagaatggctccttcaccatcaatgatagcgaaggatcgcttaaccaattggaggggaggtttagcttcattaaccacataaacaaagagagcaacaaagagcggaagaaaattgacaagaacctaaagctcaatttcagaaatctgaacgggaaagagaaggaatatcagaagtttctcttctacaagtacttcctgagtaataaaaacccctgcattcttaccgagggtccaacagacataacatatctgaaaagtgctctgaagaatttgtataccgattatcccaaccttatcgaaaaagttgacgagaacttccactttaaaataagctttctcaagcgcacgaagaaaatgaagtattttttcgacctggaagaagaaggagccgataccatgaagaagatttacaacttctacactgtcaacaaagaaaagaatgattgtcccaactacagtgaaatctttaagaacatcaacgtgctaccaaagaatcctctcatttttattctcgacaacgaactagctaatgacaacaaaccgctgaagaatctcgttaattatatggcgctcaaaaaggagaagattcatgagctgcagacgaagaattatattaatgtgacgagcaacctctatatcgtgactaaccaactggcagataacgtgaaagaatgtgagatagaggacctgtttgacgcagaaactttggacgctaaactgaatggcaaaacgtttgaacgcgacaagactaaatataccgatgccgccaattacgggaagaaggccttcgcctcttacatttggaaaaactacaaggacatcaatttcgagaatttcaggcctctgctcgattgcatcaacctgatcgcgaaagattatatcgattga

SEQ ID NO: 8500 - RNA, 1698 nt, synthetic construct
  source 1..1698: mol_type = other RNA
atgggaagctttgagaacattaaaaccagaggggaccttgccgggctgctcaatattccttcttccaagctctcttacatactgtacatcaaaaagatcgagaacctctatagctcctttaagctccccaagaagtcgggcggacacagggtcattaactctcccgaagaagatttaaaagatatccagaagagcttggctaaatttctgtctcgtcaacagaagatcatatgggatgcaagaggcattaaccagaatattagccacgcctttattgaagggaagaacattatcagcaatgctgaaaatcacatgaataagcggttcatcctaaatgttgacctcgaagacttcttcgattcattccactttggccgggtacgcggttttttcgctcagaatagggactttagatttccgattgacatagccacaataatagctcaaatctcatgctacaatagaaccctgccacagggcgctcccagttccccaatcattactaacctcatttgcaacatcttagacatccgccttctgaagattagtaagaaatatcgggttaactacacgcgctacgccgacgacttaacattttcaacgaacgacaggtccttcagtgacaaatacatgaaattcttagtggagatctcattggaaatcaaacatgccggcttcatgatcaacaataaaaagaccagattgcagctcaaggatagccggcaggaggtgactgggctgatcgtcaataaaaaggttaacgtcaagaaggagtattacaagaaaaccagggcaatggctgataatctatacaggcataaaacctttgacatcgatgggaagcctggcacaattaacaaactggagggccgcttcagctttatcaatcagctagatcgacgaaataacgagataaaccggaaaagggtggaactgactcaaaagtccaacagcaggcattgtctgaacacacgtgaaaaaggataccagtacttcctgttctataagtatttctttgcatgccctaagcctacaatcatcaccgaaggtaagactgatattcgctatctgaaagcggcactgaagaacctgtatcttgaatttccaaagttgatcgaaagaaaagccgacggaacattcgagtttaaggtgtctttccttcgtaaaaccaaacggttgaagtattttatggagttgcagctggatggtgcggatacactgaaaaacatctacaacttctacaacgaaaagggacgccagcccaatctgagcaaatacttcgaaatgaagtccaagactaagccggacaacccagtaataatggtgttcgacaatgagatctcaaataaaaacaagcccctatatactttcaccaattacgccagtacccaacccgagtccaaacaaatgttgatgaagaacctgtccataaatattaccaacaatctgtttctcctgactcaccagctcgtgggtcagcgaacagagtgtgagattgaggatctctttaataagaaggccctggacaccaaacttgacggaaaatctttctcaaaaaaccctgatacgaaacaagagtacggcaaggagtatttttctagttatgtgctgaagaactaccagaatattgagttcgataatttcagaccaatgcttcaggcacttaattcgatcattgagtcctatagtaaagggtga

SEQ ID NO: 8501 - RNA, 1692 nt, synthetic construct
  source 1..1692: mol_type = other RNA
atgaatcagcgaggctctgggatacaagataagagagacttatgcaggaagctaaggattcagtacagactgctgacatacatattgtacaagaaaggaatcgactcattttacgagcagttcaagatttcgaaaaagtcgggcggcatccgcattatttctgcacccaagcggccactcaaatttgtacagaaaagactggcccagatgctccaaacattttatgatgggtcaactacgaaaaagaataacatcgctcacggttttctcaagtcacgaagcatcattacaaatgccaggaatcacagaaacaaacggtatgtgatcaacatcgacttggaaaatttctttgacagctttcactttggcagggtgtgtggcttcttcgaaaaaaacaagaacttcctcttccctaaggaagtggccgtgacgctggcgcagcttacatgctacgaagggagtcttccacaaggagcgccttgtagtcctatcataaccaacctcatttgccagatactcgattatcgcgtcctgcggatcgccaaaaagtttaaacttaactacaccaggtacgccgatgatctgactttttcaaccaatgaccgcaaatttgtaaacgagtatgacgagttcatcaagcaggtggaagctgagattatccgagctggattccgcatgaataccaaaaagacccggttcatgtataaggatagcaggcaagtggtgacgggcctggtcgttaataagaagttaaacatcccacatgagtatattagacggactcgggccatggcacactccttgtacacaaagggagaatttaacatcgatggggtgctgggctccattgagcagttggaggggcgtcttagctttataaactacatcgacaagtacgccagcacatacgctgagtataaacgatataaccgtttcactcctaaggaaatgtccggaagggagaggttgttccaacagttccttttctacaagtacttctatcataacgagctgcccgttattattactgagggtaagaccgacaaacgctacattaaagccgcacttaagtccttatgccaccattaccccgctttagtgactgccgttggcaacggacggttcaaattccatattagctttctacgcaggagtaaaagactggaaagattcctggggattcagcacgatggggcagattctatgaaggtgatctctaactattatggtagtcccaattctgagggtctgccagactattactcttacttctcaaaatactcctgtgaggctaccaatccggtatttctgctctacgacaacgagattagtaacaaaaacaagcccatcagaaagatgctgaatttttggaagcaaaaagtcgaagatatcgtcaatatcgtcgagaaacagcagtactgttgcctgcagggcaatctgtatatattgaccttccctaccctcaatggaatggcagagaatgaaattgaggatctcatcctgaaagataacccactgatacagatcggcgggcgtaatttctccagagaggaacgatatgacataagcaagttctttggtaagaatgagttttcccagtatgttctggacaactacgacaaactccgcttcgacagctttcggccgctactagacacactgaattccatcatcaaggaatataaggaatga

SEQ ID NO: 8502 - RNA, 1704 nt, synthetic construct
  source 1..1704: mol_type = other RNA
atgaagaagttttgtgacattcagtcaaggaatgagctggcggattatctcggcatctctcacaaaaagcttacccacatactctatattaagaagccggacaactactatactacgtttgagatccccaaacgcaatggagaaagccggaccatctgcgcccctagcgggcatttgaaagctttacaagtgaagctggccaatatgctatggtgctatcaaaagagtatttgggaggaaaaaggcgtgaagccgaacattagtcatgcattcgagaaagaaaagtccatcatcacaaatgcgaagattcacaggaacaaaagatttgttttgaacctggatctggagaatttctttgacagctttcatttcgggcgcgtgcaaggctacttcgagaagaataacaacttcaaactgccttatgacgtgtctgtcatcttagcacagcttacttgctaccaaggacgactcccacagggagctccttcaagcccaattatcacaaacttaatttgccagaccatggatatctatctcctaagagttgccaaaaaatataagctggactacacacgctatgctgatgacctgaccttctcaacaaacgatagacattttgtggaaaatcaagagaagttcctggccgaagcaatagccgctatcaagagagctggtttttccattaatgagaagaaaactcggctgcagtttcgagacagtcggcaggaggtaacgggcttgattgtcaacaaaaagctgaacgttaatcacgcctatgtcaggaaaactagagcaatggcgcaccagctgtattccaccggggagtacctgatagatggagttcctggtacgatcaaacagctcgaggggaggttttcctttatcgaccatctggatcaccataataatatcctggacccacaggagattaagcacgatgcgtttcacctcaacggacgtgagcgacagtaccaggcttttatattctacaagtatttgtacgcccacaccgtcccagtgatcgtaacagaaggtaaaacagatatccggtatattaaggccgcactgaagtctctgtacaccaaatatccacggctcatacagaaggacgctgaagggaatttcatctacaactttagcttcttcaagcgcaccaagcggtggaaatacttcttcggcatttccctcgacggcgccgatgccatgaaaattttgtaccattatcatgctggcaatgggaagaagatcccagcttatcactcctactttcgtcagctgtctgggctggagcagcacaaccctgtgatccttttgtacgacaacgagtctaaaagcgaaaggcccctgaaaaagtttctcggagaaggagtgcacgcaactgccgaacagaaagcaactctcaagtcggacctccatataaggttaattcccgatagcaaactattccttgtaacaccccctctggtcggtagcaaagaggaatgtgaaatcgaagacttgttcagtgacgagctgctgagtcttaatctagatggcaaaaccttctgtcgcaaggacaagtttgatgattctaagtacttcggcaaggagatcttctcccagtacgtgtacgagaactaccaaactatcgacttttcaagattcattccccttcttgatgtgatagacaccattatcgccgaagccgagtcacccaagaaatga

SEQ ID NO: 8503 - RNA, 1701 nt, synthetic construct
  source 1..1701: mol_type = other RNA
atgaagaagttctgcgatattcaatcaaggaatgatcttgcagactgcctgggaatccctcacagaaaactgacccatatactctacggaaaaaagccagactcatattatactacgtttgagatccctaaacgcaatggcgatcctcggacgatttgcgctccctccggagacttgaagactctacaggtgaagctgacaaacctgctctggtcgtatcagaagtcaatttgggaggagaaagggatcaaaccaaatatctcccatgccttcgagaaggagaaaagtataatcactaacgcgaagattcatcggaacaagagatttgtcctgaaccttgacttagaaaatttcttcgactcctttcacttcggcagggttcagggttacttcgagaaaaactgtaacttcaaactgccacatgaagtggcagtgatccttgctcaacttacttgttaccagggaaggcttccccaaggcgctccgtccagtcccatcattaccaatctaatttgtcaggccatggatatctatctgttgcgcgttgcaaagaagtataaactggactacacccggtacgcggatgacctgacgttttctaccaaagaccgacatttcgtggagaagcaggaaaaatttctggccgaagccatcgctgccattaagcgcgccggcttttctattaacgagaagaagacccgacttcagtttcgggatagtcgccaggaagtcaccggcttgatcgtaaataagaagttgaacgtaaaccacgcatatgtgaggaaaacacgcgcgatggctcaccagctgtactctactggcgagtatctaatcgatggagtgccaggcaccattagacagttagagggtaggtttagctttattgatcacctggaccattacaataacatcctggaccctcaggaaatcaaacacgacgccttccacttgaatgggcgtgagagacagtaccaagccttcatcttttacaagtacttgttcgccaatgataagcctttaatcgtaacagaaggcaaaaccgatatccgctacataaaggctgcccttaaaagcttatatgctcgataccccaggctcgtgcagattggagccgatgggaacttcacttacaatttcagtttctttcggaggacaaaacgttggaaatacttctttggtataagcctggatggggctgacgctatgaagttcctgtacagataccatgttggcaagaatcacgttccagaatatctcaaatatttcagacagctatcaggttgcgagcagcacaacccggtgatattgctctatgataacgaactggaacacaaaaaacctctcaagcagtttctcgccgaagaagtccatgcaaccgaagagcagaagacagagctgaagtctcacctccaactccacctgatacccgatagcaagttatacgtcgtcacaaaccccctcgtggactccaaggacgagtgtgaaattgaggatctgtttgcagaggaggtgcagaacattaatctggacgggaagactttttgcagaaaagactccttcgataatagcaagtttttcgggaaagacatcttcagcaagtatattctcgagaactataagcaaatcgactttagccggttcatacccctgctgaatgcaattgactctatcatcgcccagacacaaccaaccgagaaatga

SEQ ID NO: 8504 - RNA, 1701 nt, synthetic construct
  source 1..1701: mol_type = other RNA
atgaaaaagttctgtgacatccagtcacggaacgaactcgctgactatctcagcgttccaagaaacaagctgacccacatactgtacgtgaaaaagcccgattcttattatacgacctttgagatccctaaacgcaatggagagactagaaccatttgcgcgcctagcggggatttgaaaacactgcaggaaaagttgtcaaatatgctctggttataccaaaagtctatctgggaagagaaaggcatcaagccaaacattagtcacgcattcgagaaaggaaagagcatcataacaaacgcaaagatccatcgcaataagaggtttgttctgaatctggacctggagaactttttcgacagattccactttggtcgtgtccaaggctacttcgagaagaacaataacttcaaactacctcatgatgtagcagtcgtgctggcccagctaacgtgttatcagggcaggttaccacagggagccccatctagtcccatcatcaccaaccttatctgccagccccttgacacctatctcctcaaaattgccaagaagtataaacttgactacacaaggtatgctgatgacctcactttttcgaccaacgatcgacatttcgtcgagaatcaggagaattttctcgctgaagccaatgccgccatcaaacgtgcctccttctccatcaatgagaagaaaacccgattacaatttaaggatagccggcaggaagtgactgggctgattgtgaacaagaagcttaatgtgaatcacgcatatgtgcgcaagactcgcgctatggctcaccagctttattccacaggagaatatctgatagacggcgagcccgggaccattaagcagctggaaggcagattttcctttatcgaccagttggaccggtacaataacgtgctggaccctcaggaaattaaacatgatgcgttccacctgaatggaagggagcggcagtatcaagcattcatattctataagtacctctttgcccataacgctcctgtaatagtgacagaagggaagacagacattaggtacataaaagccgctctgaaaagtctgtacgccaagtacccacgcctgattcagaaagacgcggagggaaactttatctacaagttcagcttctttaggagaacaaaacggtggaaatatctgtttggaatttccctggatggcgcagacgcgatgaagatcctgtaccgttaccacgtcggcaacggtaaaaaaattccggcttacttaggctacttccggcagctcagtgggggggaacagcataagcccgttatcttattgtacgataacgagcctaactcggaccgcccccttaaaaaatttctaggcgaagatgtacaccccaccgccgaccaaaaggccgcactcaaagaaaatctccacatgagacttataccagacagcaaactgttcgtggtcacgccgcctctggttggtgataaggaggagtgtgagattgaggatttgtttgctgatgaactactgaagctgtcattggaaggtaagactttctgccgaaaggacaagtttgacaattcaaagtacttcgagaaagagatcttcagccagtacgtgtacgagaactatcagaagattgatttttccgggttcatccccctgttggatgtgatcgattctattattgcccaaactgagtctgcagaatga

SEQ ID NO: 8505 - RNA, 1704 nt, synthetic construct
  source 1..1704: mol_type = other RNA
atgaaaaagttttgtgacatccagtcccggaacgaactcgctgactacttgggaattccaaggagcaaactcacgcacattctatacgtcaaaaaaccggatagctattacacaacatttgaaatcccaaagcgcaacggcgacactagggcgatctgcgctccatctggcgatctcaaagtgctacaaaagaagctgtctaatatcttatgcctgttccagcgaaacatctgggatgaaaatgggatcaaacctaatatttctcacggttttgagaaggagaagagtatcattacgaatgccaaaattcaccgtaataaacgctacgtactgaatcttgatctggccagctttttcgatagctttcactttggtagaatccagggatacttcgagaagaacaaccacttcaaactacctcatgacgtagctgtgattcttgctcagctgacctgttatcaaggaagactgccccagggagctccttcctcacctataatcaccaacctgatatgtcagagcctggacgcacatctgctcaaagcagccaagaagtacaagctcgactacacacgttatgcagacgatctcaccttttcgaccaacgataggcactttgtcgagaaccagaagaagttcctcgccgaagcgattgtggccattacaaaggcaggcttttccattaacgagaagaagactagattgcagtttcgcgattcacgccaagaggtgactggcttgatcgtgaataagaagctgaatgtcaaccatagttatgtgaggaaaaccagagccatggctcaccagctgtattcaacgggtgaatatttgatagacggcgttcccgggagtattaaacaactggaaggcagattctcctttattgatcagctggaccattacaacaatattttggacccccaggaaattaagcatgacgcctttaacctgaatgggcgcgagaaacaataccaggccttcatcttctataagtaccttttcgccaatgacacacctgtaatagtgacagaggggaagaccgatatccgctatatcaaggctgctttgaaaaatctgtataacaagtatccacggctcatacagaaggatgccgaaggaaagttcgtttacaccttcagctttttccggcgaaccaagagatggaaatacttttttggcatctctttagacggagccgatgcgatgcggattctctacaggtatcatattggctctaacaaacggattccgccatatctctcctacttccagaaactttcagatcacgagcagcacaatcctgttatcctgttatacgataacgagagcaagagtgagcggcccctgaagaagttcttaggtgaggacgtgcatgcgaccgttgaccagaaagcagagctgaaagccaaacttcacatgaggctgataacttcgtccaagctgttcgtggtcactccccccctgatcggcgataaagaagagtgcgaaatcgaagatctattctccgacgaactgttgagcctcaatttagaggggaaaacattttgcagaaaggacaagttcgacagtaacaagtatttcgggaaagagatcttctctcagtatgtctacgagaattacaggactatcgatttctcccgatttataccacttcttgacgtgatcgacatgataatcgcacaagcagaatcacataaacagtga

SEQ ID NO: 8506 - RNA, 1692 nt, synthetic construct
  source 1..1692: mol_type = other RNA
atggagaagttctgcgatattcagacacgcaatgagttagcagactttctgaagatcccaaggtctaagctcacccatctcctctatatcgagaaacctgagaatgattataagaccttcgaaatcccaaagaaatccggaggcacccgtgaaatctgtgctccctcgggttccctcaagagtatacagagcaaactggcagaggccctttgggaataccagaaaagcatttgggccgaccgaaaaatccacccgaatatttcccatgcgttcgagaagggcaaatctataattacaaatgctcgcatccacagaaataagcggtttatcctaaatcttgatctagagaacttcttcaacacatttcactttgggcgggtacagggcttcttcgagaaaaattataacttcatgctgccacataaggcggcagtggccattgcccaaatcgcttgctacaaaggcgtattgcctcagggggctcctagctcccccattattactaatctgatctgccaaatactggacacccggctgttgaaaatcgctaaaaaatacaagctggactacacaaggtacgccgacgacctcacctttagtaccaacaatagatttttcatggacaatcacgagaaatttctaactgaggttgccctggagattcgaaaggctggtttcaccatcaaccacaaaaagacaagactgatttttagagactctaagcaggaagtgacaggtctgattgtgaacaaaaaaatctctgtggaccgcaactattataaggagactaaggcaatggcccataggctctatacccagggagagttcgagattaataagcaatcagccactatgcagcagttggaggggcgtttttcgtttattgaccagttggtccactataacaacaagctcgacggcggcacacataatcctcatacgctgaacgggcgcgaaaaggaatatcaagcattcctttactacaagtacttctttgcaaacgatcggcctcttatcgtcactgaaggcaaaacagatatttgttacctcaagtctgcactgaagaatctgcatgccaaataccccaatctcattgaaaaagattcaaagggaaagtacgtgttcaaaatatccttcttcaaacgctcagaaaggtggaggtacttttttggaataggacttgacggggccgataccatgaagaacctgtaccacttttttaccagcaaaaacgatgctcctgattatttaactcgcttcaggaagctgtgtaagtgcagtccgcgtaaaccagtgatcttgctgttcgataatgaaacggagagcagtcggcccttaaaaaagttcctctgcgaaaacaagataaacgatgaagacaaaaagcaacttgaacagaacctacacatcagattgatccccgagtccaaattgttcctcgccacgacccccctggtttctgacaagctggagtgtgagatcgaggatttatttccagacgaagttctgaaacacaaagtggatgggagaacttttacccggaaggataattatgacaagaagaagtactacggtaaggagatcttcagcacatatattgcggccaactatgaaaaaatagactttagccgattcgaagagctgctgaacactctttcaatgatcgtcaagtccgaagaggctccacaggattga

SEQ ID NO: 8507 - RNA, 1716 nt, synthetic construct
  source 1..1716: mol_type = other RNA
atgaagaatatcaacgaccttaaaactagatccgagcttgccgactacctagggatttcccgtagacgactcacatatattctcttcattaaaacacccgactcatactaccaaacctttgatattcctaaagccagtggtggtgttcgaaatatttgcgcccccacaggcatccttaagagactgcaaacaatcctggcgaaaagactgtggctgaaatatgtgtcagataaagtcaggaacaagatagaaaacaccaacattagccacgcctttgaaaaacgcaagtccattattacgaatgcccgaatccatcggaacaaacgctacgttattaacttggacttagagaacttctttgactcgttccattttggaagggtactcggatatttcgagaagaacaaaaacttcatgcttccccacgaagttgctgtggcgctcactcaactggtctgttatcagaaacacctgccacaaggcgctccgacctctccgatcatcactaatcttatctgccagatactggactttcgtcttctgaagattgccaagaaatacaagctcaattttacacgctatgcggatgatctgactttcagcaccaatgataagaagtttctggacctgaaagaacacttctttaaggaaataaccacagatatcctgagagctggctttagtgtgaataacaggaagacccggattgagtttaaggactcccgccaggaagtgacgggcctgacagtcaataagaaggtgtcaattaaacgcgagtatgtacagaatacccgggcaatggctcatcatctatatacccagggccacttcagtatcgatgggcaagacggtgacatcagccagctcgagggacgtttcagcttcataaaccagttggatgtgtacaataacaggctgttgctgcagttcctgaagatcgacaagaacaacgatctgaagctcaataaacgggaaaaggaataccagaaattcctcttctataagtacttttacgcaaacgaaaagcccttgattgtgactgagggtaagactgatgtgttgtatctcaaagctgccctgcagaatctctatgcacggtatcctgagttaatcgagaagaatgataaagggcatttttcctacaagatcgcctttttcaatcggtctgacaagtgggagcgcttgtttaaattcgttaaagatggggcagacagtatcaagaatctgtacttttgtttctcagaaaagaacaacagctccttccccaactacttcaaatactttctcaaactgtccaatgagaagcagaagaattctgtcatccttctgttcgacaacgagatcgactcagagaataaacctcttaagaaattcctaggcgtgattaaagccagtaatgacgctaaagataccctgagaaccagctatactttgcagttaatcccagatggaaaactgtttctagttactaacccattagcagtggataagaaggagtctgagatagaagatttatttccagtggaggtcttgaacataaagatcgaaggaaaggtcttttgcagggacgacaagtttgacaaaacgaagtactatggcaaacacattttctctaagtacgtatacaagaactacaagatgatcaacttcacagggttcatccctctgctggacgtcattaggagcataaccgtgaatctctctgatcagaaatga

SEQ ID NO: 8508 - RNA, 1755 nt, synthetic construct
  source 1..1755: mol_type = other RNA
atgaaagagttcagcgacgtgaattctcgcgaggaactcgcattggcactcagggtgccactgtcaaaactgacctacatactttatgttgctacagtggatagttgctacaggaccttcgagatccctaagaagaacggcggcacaagggttattaacgcgccacaacgggacttgatggacattcaaaaaaaccttgccaagttactgtatgaacatcggagtaacattaagaacttcaacaatgtgaagtgcaatattgctcacgccttcgagaaagaaaagggtataattaccaatgggagcgtccaccgaaacaagcgaatcgttctcaattatgacttggagaactttttcgattcttttcactttgggagagtcaggggatacttctggaaaaatcggtatttcaggatgaatctggatgtcgctacgatcatcgcccagttgacatgttatcagggcaaacttccgcagggagcccccacctcacctatcatcaccaatatgatctgtgagatattcgactttaagctcttacgccttgccaagaagtacaagctggactacacacggtacgctgatgatttaacgttttcaactaacaatgcagagttcgagaacagaattgacgaatttactgaagagctcagtaaagaaatcgacaatgcgggctttaaaatcaatcgcgacaagacaagactgcagttaagaaagtccaggcagactgtaaccggcctggtcgttaatgagaaagtgagcgtggatcaccgctattataaagctacacgcgccatggcccataacctctaccgggaaggaggttttgatatttgcggagaagagggcagcctggaacagctggagggccgattctccttcgtgaaccagattgacaagtacaataacaaactggagatgtctggtcgtatcggccgaagtggacgcgcttcaggaagggccggagcaggagctggcggtaatgaaaaaaagaaacacgatttccgtcatctgaacgggagagagagagagtatagaaagttcctgttctacaagtactttgtggctggggaacggccaatgattgtaacagaggggaaaaccgatattctgtacatcaaagcagctctcaagtccttttataaagaatatcccgagctaattgagaagaggaaggacgggactttcgattttaagatcgattttctgcgccgatccgaaaagctcaaatatttttttggactcaccgcagacggcgccgattccatgaaaaatctgtacaactacttctccgatatgaataacaacagcttcccgaactacgccgaatatttcggcgagaagatgaagtgtgcaccccttcatcctaccatactcatcttcgataacgaactggaggggaaggataaacctctaaagaagtttactgaccacattaagatgcaggaccgtaaagagtctctgaaaagggacctagccatgcacatcagcgggtcgctgtttattgcaactttgaaattgccagagggtaagaaagaagccgaagccgaagacatgttcgcccccagcgtcctggagcatgagatacgggggaagagattttcccgctctgacgagtacgacaaatctaagttctacggcaaaaatgatttcgcgcaatatgtgttctttaactacaaggagatcgatttttcaggttttcggcccatgctggacagtatccttatgataaagcggaagtatagatacatgtga

SEQ ID NO: 8509 - RNA, 1710 nt, synthetic construct
  source 1..1710: mol_type = other RNA
atgggaaactttaaggacatcgcaaccaggaatgagcttgcagactttctggggtttcctagacggaaactgagctacatcctttatgttaagagcactgatgcgtactaccagagttttactataccgaagaagagcggcggagaacgctgcatcaatgcccccaccggggacttgaaggacatacagaaaaagttggccatggccctgtggaagcatcaactcgatattcggactagtaggaatattagaacgaacatatcccatgctttcgagaaggggaagggcataatttccaacgctcaaattcatcgaaataagcggtatgtgttaaaccttgaccttaagaactttttctcatcatttcacttcgggcgggtgaaggggtatttcgagaaaaatcgcgattttgaacttccaaatcaagtggcaacagtaattgcccagctcacctgctttcagggctgtctgccccagggtgctccaacaagcccaatcatcacaaacatgatctgtcagattcttgacatgaaacttctgcggatcgccaagcgctataagttagattacagccgttacgccgacgatctgactttctccacaaataatagggcttttctgggcatgcagagtgaattctatgaagacgtggcaaaggaggtcaccagcgctggatttaccattaacgaaaagaaaaccagactgcagtacaaggattccaaacaggtcgttaccgggctgatcgtgaacaaaaaactcaacgttgaccgaatctacgcccggaaaaccaaagccatggcacacacactctatacaaatggcgagtacaccattgacggtaaaataggaactctgaagcaattggaaggtcgttttgcctttatcaaccagctggacaagtataacaacaaacgtgatggcaaaggtgagcataagggatggaacctcaattcaagggagaaacagtaccaaaaattcctgttctacaagtacttcttcagcaattcgaaaccaatcatcgtgaccgagggaaagacagatgtcgtgtacatgaaagcagcgctacggaagttacacgccgaatatccttgcttgattgagcgcaaacccgacggaacttttgagtaccatgtgtccttcttgaagagatcgaagcgcttgtcttactttctccacatttctcaggatggcgctgatacaatgaagaacctcttcaatttcttctcacctactagtgataacaaaagggtctatcctgactatctaacttatttcatgaaggctgggaactgctccgcgcagaacccggttatactggtgtttgataatgagctgagtagcaagaataagcccatcaaaaagttctctgaccacgtaaaactggacgatgtgaggagagagacgctcaaacgaattctccacctcaagctgattgataagggtaatctatatctgctgaccaaccccttagtggacggcaaggacgaatgtgaaatcgaggatctgttcgacgaaaacacgctgtctcaggtcatcgatggcagaacattctctagggacatcaagaaaggagatacgcagcactacggcaaagaaaccttttcaatgtttgtatcccgcaatcatatgaatattgacttctctcgattcagagagatgttgaatatcctaaacgagattatcgggctgtaccacaaacctgaggtctga

SEQ ID NO: 8510 - RNA, 1719 nt, synthetic construct
  source 1..1719: mol_type = other RNA
atgtcctttttccagcacatcgagacaaggaacgaactcgccgacttcctgggcataccaaggaaaaaactgacacacctgttgtatgtgcagcggatcgagaattgttaccacatgttcgaggtgcctaagagagctggtggcactagagtcatctgtgcaccaactggcgatcttaagtccttgcagagatcactggccaggaggctgcaggagcattgtctccgttgtcgggaagaacggggattgtccgtaaatatagcacatgcctttcagccccgacggggaatcataaccaatgcttacatacatcgaaacaagcgatatgtgttcaacaccgatttggaggacttctttggtagcatccatttcgggaggattagaggttatttccagaagaacgagtatttccagatgcctgccgaggtggccaccatccttgcccagctgtgctgctaccagggtaagttacctcaaggagcgccaacaagccctgtgctttcaaacttaatttgcgagattctcgattttcggattttgaagattgccaagcactacaagctagactatacccgttacgcggacgatttgacatttagcacgaatgataaaaccttctgctcacgctatgacgctttctatcagcaactgcagaaggagatcagacgtgccggtttcgccgtgaacgaaaagaaaacaaggcttgagtatcgtgacgcaaggcagactgtgaccgggctcgtggtcaatcgcaagttatccgttgaccgctgttactgccgcgaaacccgggccatggctcacaccttgtataaaaccggagaatacaggatccaaggcgcagcagggacaatggcgcaactggaaggccggtttgctttcatcaatcagctggacagatacgaaaataagcacagtctctctaaacctagagactttaagaccctcaacgggagggagaggcagtaccagaaatttctgttttaccggtatttctacgctaatactcaccccttgattgtgacagagggcaagactgatatactctatctgaaagccgccctgatgaatttacatagaagatacccggaactcgttgtccgccaaccagacggcacgttcgccttccaggtcaggtttcttcatcgcagcaagcgactgcggtattttttcgatctgagcctggatggggccgatgcaatgaaaaacctgtacgagctgtatactggcaaaggagcacactggaagacggcttactatccttactttctcgcactttctggcaagaaaccacagtggccggtaattctagtctacgacaacgaaatcaacgacaaaactagacccatctcgaagctgctacattcaattgggatgggggaggaaggcaaagaacgcctgaagaagagtttaaaagaacagctggttgcaggaggcaacctatacctcgtcacacaccccctcgcggaagggaaatctgtgagcgagatcgaggatctgtttgctgaacgaacccgagctgtggttatcgatggccgcgggctgagtcttcgggacgactacgacccccaggtaagttacggaaaagatgccttttctaagtacgtgctctcccactatcaaactattgatttcgtgcggtttattcccctgctggatagaatccgcgacgccgttgctgagacacaagcggctgagcaggagccagagggagtctga

SEQ ID NO: 8511 - RNA, 1863 nt, synthetic construct
  source 1..1863: mol_type = other RNA
atgaccgcatttaagaatattaaatcccggtctgaccttgccgattacctcaacatccctcctagcaagatcacttacattctcttcaagcgaggcgtagactcatattacaccgagtttgagatacccaaaaagtcgggcgatccacggagaatctgtgctccgactggcgatctgaagggagttcagagacagctagctgacgccctatgggagcatcagaagtccatatacgaggagctgtggatcaaacccaacatctcacacgctttcgaggagggtaagagtatcatcactaacgcaaagatacatcgaaataaaagggttgttgtgaatgttgacctcaaggactttttcgattccattcacatcgggagagtgtgcgggttctttgagaaaaacaagtatttcaacctgccacacgaagtcgccgtaaccatagctcaactggcctgctatcagggaaagttattgcagggagcacctaccagtcccatcatcactaatttgatctgccaggtgcttgacatgcatctgctctctctcgcgaagcgttacaaactctactacactagatatgctgacgatatgacattctccaccaacgatcggagcatcttagagcggtgggattcattctacgaggagctggataagaaagtgaaaaaagccggctttagcattaatgaaaagaaaacccgcattacctatagagattcaaaacagatagtcacgggacttgtagtgaataaaaagatatctgtcgatcacagttactgtcgcaaagtccgtgccatggcccactccctgtataccaacgggtcttaccaagccgatggtgtggaaggcacagccagacagttagaaggcaggttcgctttcattgaccagatcgaaaagtacaacaacacttgtgacagcaccgggaagcacgatgcatttgttttgaatgggagagaaaagcagtatcagcagtttctgttttaccgctatttcttcgatgtcgacaaaccactgattgtgacagaggggaagacggacgtgcgctatatcaaagccgcgttgaggaatttatacacagagtacccagagctaattgaaaaggacgcaaaggggaagttcatctacaaggtgaatctgtttaagaggtccaagcgattcaagtatcttttcgtgctagcgctggatggggccgactcactgacatacctgtataatcactttgtcagtacaggcaaagataataggattaactacttggactacttcctcaaaatcacacaaagggtgcctcaacacccggtgatcttcgtatatgataacgagatcaccaacagcaaaaaaccactctataagtttgccaaccatgccaagcttgataacaatcagcgagctctcctgggtacggaactgtttttgcggttaaccccccgtggtaacttgtttctcttgactaaccctctggtggaaggaaagaatgagagtgagattgaacacatgttcaccgaagagacacggggagtcgaactgggcggaaaaaaactttccctggaaagcaagtttgacaacgctaagttctttggaaaggaccatttctctaactatgtgctggagaattatgcaaaaattgacttttccggctttcgcccctttctgaatactatcagaacggtgctccaggaatacgaacgctctattgctaaagagcaaacaacacctatgcgcacaaagattctcataggtgtttgcttcagctgccagcccctgccacattcgaaacaaaggaaagacagcgcagaaaattgtgacgagaagactaaaaacgcagagattgcgggcttcctgcggaggaatctgctttga

SEQ ID NO: 8512 - RNA, 1698 nt, synthetic construct
  source 1..1698: mol_type = other RNA
atgaccttcgaatacgtttgtactagaaatgaccttgccgacctcctggaaattccccacggaaagctgacacatgtgctgtatgtcgccaaggtagacagcttctacaaaatcttcgagatccctaagaaaagtggggggacacggaaaatctgcgcccccaccggtgacctcaagcagatccaggagaaattgtatagtatcctgctgcaccaccaacaattcctgcgtaaacagaataacatcaggacaaacatatctcatgcatttgagaagggaaagagtattatcactaacggtgaggtgcacagaaacaagcgcatagttgtaaacattgatctgcaggactttttcgactctttccattttgggagggtgtgcggattctttgagaaaaatagagacttcgccctcccgcatgagctggctatcgtcatggcgcagttaacttgttatcagggaaaactgccacagggcgctccaacaagtccaattatcactaactatatctgtcagacctttgatatgaggattattcgcatcgccaaaaagtaccacctggactatactagatatgccgatgatttgagcttttctaccaacgacaaaaagtttatagagcagtgggagcctttctataatgaacttacacacgaagtagagagggccggtttcaaggtgaataccaagaagacctcagttcagtatcgggattcccgtcagactgtgaccggactggtgataaataaaaaactctctgtggatcacagatactataaacaagttcgggccatggcagatagcctttacaagacggggtgttttgacaataacggggtggagggcaccgtgtctcagctcgaaggcaaatttgcttttattgaccagctggacaaatacaataatatcaaggacgtttcccaacagcactcggtgttttgcctaaatggccgagaaaaacagtaccagaaattcttgttctaccgctatttctttgctcatgagaagcctgtgatcgtcaccgaagggaagactgacataaagtacataaaggcggctctgaaaaacttatataccgaataccccgaacttatcgagaagacacctgaaggccactttgaattcaaggttagctttctgaaacggtcaaaacggtttaagtactttttccatatgtcacaggacggggccgacgccatgaagaatctctacaatttcttctccgataaaaaccccaaatacacgaactacttcaaggtcttttcaggctgcagtgataagaacctatgtaacccagtcattctgattttcgataacgaactttccaacaagtgtaagcccctgcattccttcgtgtcccacataggactatcttccagcgataaagatcgcctcaaggaggacttgtgcatgaaaatcattgacgagggcaatttgttccttgtcacaaatcaactggtcgatggcaaggctgagtgcgaaatcgaggatttattcgacgataccactaggaatcatgtgattgctggtaaaacgttcagctcaaacgataaggcagataaggagaagcactatggcaaagaaatctttgcaaatttcatccaaagcaactacaagagcattaactttgacaactttcgaccgatgctcaataacattgtaaaggtgattgcagagtttgcaggaacagagggctga

SEQ ID NO: 8513 - RNA, 1563 nt, synthetic construct
  source 1..1563: mol_type = other RNA
atgctcaagaaagacggcaacattcggaccataaaagctccctctagtgagttgaagagcatacagaagaaactggccagcaaactggagtcatgccaaaggaatatttggaccggaataggagttaactcaaatatagcacacggattcaagaaaggcaaatccattgttacaaatgctcagattcatcggaacaagaagtatatccttaatatcgatctgcaagacttctttgattcatttcactttgggcgtgtgcgcggttttttcgaaaaaaatcgcaactttgccctgcctatcgaagtggctactgtagtggcccaattgacatgtttcgagggatgcctgccacagggagcaccaacttctcccatcataaccaatcttatctgccagattctagacaaccgactgctaaagttggccaaacggtataagctcgattacactaggtacgccgacgatctgacatttagtactaatgataaggcctttgtggaacgcaaagacgagtttctttgcgccattcagaaggaaatcgaacgagccggcttcaagatcaacgagaaaaaaaccagactcgtttataaggactctcagcagaaggtaacaggtttggtggtcaatcagaaagtgaatgtcgcgcaggattactatagaaaaaccaaggctatggcacatagcctgtataaaaagggtgaattcacgattgatggccaggcgggcactatcgaacaactagaagggaggttctccttcatcaaccagctcaactgttacaataatcaacacgatggagagaaacatgaatttggtctgctcagcggaagagagcgcgagtttaagcgcttcttgttctacaaattcttctatggcaacgacatccccatcctggtgactgagggcaaaacagatgtgagatatttaaaagcggctctgaagagcttatacaatgagtaccctaatctgatcaccaagtctaaagacggcaagttcagatttaagttttcgttcatgaagcggaccaagcgtcttaggtactttcttggcgtgcaggctgacggggcagatacgattcagaacatttacaagtactttgtcggcggcaaagggagagaatccaagaattatcctaactacttcgcctattttctccgtatggggacgcagccaaaggcaccagtaatccttctcttcgataatgaactggaatccaagaggccgctccggaaattcctgaacgaacagaagttctcagagacacagatcgaccagctgaggaacgagctgtgtctcaaagtctttaatagtgggaagttatacctgctcaccaaccctctcgttctggagaaaactgaatgcgagattgaggatttattttctgaggagacactgaacttgttgataggggggaaaaacttatgtcttaaggacaaatacgacaccgagaagtattacggtaaggagatcttcagtcaatatgtcctgaaccactttgagcaaattgacttcagcggattccgacccctgctagacaagctgtccctgattgtgcggcagtga

SEQ ID NO: 8514 - RNA, 1686 nt, synthetic construct
  source 1..1686: mol_type = other RNA
atggctcagttttgtgacattgcctctcgcaatgaactggctgatttccttggtataccccggcagagaatgacctatgtgctgtatgtgaagaaggttgagagttattacaccagtttcgagatcccaaaaaagaatggagaaactcggactatcaaggcgccaacaggtgaactcaagttcatccaaaagaaactcgtctctaagctagttcaataccagcgggaaatatggcggtctaaagggatgaaacctaacatatcacacggctttgaaaaaggaaagtccatcgtgaccaatgcaaaaattcacaagaataagcgttacctgctgaacatagatctacaggacttttttgacagctttcatttcgggagagtccggggcttctttgagaagaacagagatttcgccctgcccttggaggtggccaccgtgttagcgcagctcacatgctttgaaggctgcttgcctcaaggcgcccccacaagcccgattctcaccaatctcatatgtcgcatcctagacaataggctgttaaagattgctaagcgctacaagctcgactacacccggtatgcagacgatctgactttcagtacaaatgataagactttcgctgggctcaaggatgaattcctttgtacaatccagaaggagattgaaagggctgggttcaagattaatgagaagaaaacgaggctcgcatgcaagaatagtcagcagaaagtcacaggtctaattgtaaaccagaaggtgaacgttgcccaagattactacagaaaaacgaagtccatggcccactcattatatacgaaaggcgagtttacaatcgatggccagacgggaaccctggagcagttggagggaagattttcctttatcaatcagctggactggtacaacaacaaactggataacgaaacccatgaattcggagtgctggcagggcgtgagcgggagtttaagaggttcttgttctacaaatacttctacggaaattccaccccgatcattgtcaccgagggaaaaactgatgtccgttatcttaaatctgccttgaagagcctgagcaaagagtatccaaacttgattaccaaatctaaagacgggaagtttgagttccgagttactttcctgaagcgaacaaagcgattgcagtacttcctgggtattaggctcgacggcgccgatacaatccagaacatctataggtatttcatgggtggcaaagggagagaaagcaagcgctatcctaattacttctcgtattttctgcgaatgggcgccaaacctaagaaacccgtgatcttactgtttgataacgaactggagtccaaaaggcctctcagaaagtttctgaccgagcagaagttatcagaagcacagatcgaggatcttcgctcaaagctttaccttaaaattctcgacaatggcaaactgtatcttcttactaaccccctgatttctggagagaaagaatgcgagatcgagtacctcttcagcgaagaaacaaggaacctgaagattgaggggaaatccctctgtctgaaggacaagttcgacactgagaagtactatggcaaagagatctttagccagtacgtgtcggctaactttgaacaaatcgacttttccggtttccgcccactgctggacaaattggacctgatagtacagcaatga

SEQ ID NO: 8515 - RNA, 1686 nt, synthetic construct
  source 1..1686: mol_type = other RNA
atggcgaagttttgtgacattaccagtcggaatgatctcgccgactttctggaaataccacgcaaggttctaacctacgtcctttacgttaaaaagaccgagaatttctacgctagcttcgaaatcccgaagaagaacgggggcacccgaacaattattgcccctagtggcgagctgaagtctatccagaaaaaactggcccgagagttagagagatatcagcaagacatatgggcctcaaagggcatcaagcctaatttatctcacggcttccagaaaaagaagtccatcgtgacaaatgctagaatccaccggaataaaaagtacgtcctgaacattgacctgcaagattttttcgattcctttcatttcggacgggttagaggattcttccataagaataaagactttgctctccccattgaagtggcaaccgtgctcgcgcagctgacctgctttgaaggacggctcccacagggtgcaccaacgagccctgtcgtcaccaacctgttgtgccagatcctcgataaccgtctgctggggatcgctaaaaagtacaagctggattacacccgctacgcagacgatctgacatttagcactaatgacaagatgttcgtggaacacaaagacgagttcttgaggacaattcagaaagagatcgagcacgccggattcaaagtgaatgaaaacaaaacccggctagcctataaggatagccagcaaaaggtgacaggactggtagtgaacgagaaagttaacgtagcccaagaatattatcgccgtacaaaatccatggcccattccctgtacaaaactggggagtttacaattgacggggaggtgggcactcttcagcagcttgagggacgattctcgtttatcaaccagcttacgtggcataacaacagacaggatggcaaggaacactcttttgggactttgagcgggagagagcgcgagtttaagaggttcctgttctacaaattcttctacggaaatgacatacctatcattgtgactgaagggaaaaccgatgtaagatatctaaaggcagctttaaaggccctgcacaaagattatccagacctcattgaaaagaataaggacggcaagtttgaattcaagatcgtcttcttcaagaggacagaaaggttacgttattttttggggattcagttggatggcgctgacgcaatgcaatctgtgtacaaatattttgtcggcggcaaaggtagagagtccaaaaactaccctaactatttcgcgtattttcagaggatgggagcccagcccaagaagtctactatcctgctttttgacaatgagacaaaaagtaagcgcccgctcggcaaactcctgactgagcagaagttcactgaggaacaaataaggaaactgaaacaggaactacatttgaaagtgctcgacaaggggaatctgtacttgcttacgaaccccctggtgcccggcgaagaggagtgtgagattgaatacctgtttagcgaggagacaaggtcaactctgatcgacggtaagagtctgtgcctcaaggataagtatgataccgagaaatactatggtaaggaaatcttctcacaacacatcaccgatcactttgagcagatagatttctccggttttcggcccttacttgacgctctcacgtcaattgttcgccagtga

SEQ ID NO: 8516 - RNA, 1683 nt, synthetic construct
  source 1..1683: mol_type = other RNA
atgaacaggttctataatattaagaatcgccgggagctggcttcttttctaggaatacctttgaaaaagctcacttacatcttgtacaagaaaggcgtggactattactatgagacattcgaagtgcccaagcgcaattcaggcgcccggataatcaacgcccccagtggagatctgaaaacgttgcagaagaaactgtccaagattctctacgaacatcagattatccacatacagaatcacaagatcaagaacaagatttcacatggctttgaaaaagagaaggggattattactaacgccgagattcatcggaataaacgctttgtcatgaatgtggacatcaaagacttctttgaatcatttcacttcggccgtgtcaaaggttttttcaacaagtcgaaagcgtttaacatgagcgaggaggtggcaattatcattgcacagatcacctgcttcaatggaaaattgccacagggggcacctaccagccctataatcaccaacctgatttgcaatatcctcgatatgaggatactgtccatctgcaaggaatataaactggattacagtagatacgccgacgacctgactttttctaccaatgacaagcacttcattaagaataagaacggtttttacgacaacctgaagagagagatccaagggtttggtcttctgataaatgagaagaagactcggatagagtataaagactctaggcaagtcgtgaccggactgaccgtaaacaaaaagatctctgtcaagagagagtattacaagaatactcgtgctatggctgataaactttatcgaacgggagaattcacaatcggggagaaagccggtacaattaggcaattggaaggcattttctccttcatcaaccagattgactatttcaataacaagaaggacaacaacaagaaacacaacgtgaacaatcttaattctagggaaagagaataccagaaatttctattctaccggtattttctctccaatagcaaaccacttatcgtgacagaaggcaagaccgatgttatgtatattaaagcggctctgaaaaagcactataaagagtaccccaacttaattgaaaagcatcgagatgagtttgagtttaagatcagtttcctgaatcgaaccaaacgcttaagattcctcatgggcatccagatcgatggagctgacacattccttaacatctataacttctacacagggaagaacaacttcaataactacttcaagtacttcaacgacaagtataagataacgccaagtaatcctgtgattctcatctttgacaatgagcagaaagaaaagaataagcccctgtacaaattcaagaaagccgttaaaatgaacactatcgatctcagcagcgagataatcgcaaatctgtttctgctgacagttccgctgtgtaataacaaagaggaatgtgaaattgaggacctgtttgatgagaaagccttgaaccataaaattggcgggaaaaagtttagccgcaaaaacgaaaacaataagaagtattacggcaaagcagacttcgccaagtatatctacaagaactacaaggatatcgatttttccaatttcaagctcatgctcgatgagttaaaccttgtcgtgaataaccacaataataactcaagcctatccaccgtaggagtttga

SEQ ID NO: 8517 - RNA, 1689 nt, synthetic construct
  source 1..1689: mol_type = other RNA
atgaagaatctgagtgaggttagcacaaggaatgaactcgctgactttttggggatacccatcaaaaagctgactcacattctctatgtgaaaaagccagacacgttttataagcagtttgagattcccaaaaagagtggagagccacgcattataaacgcccctacgggcgccctgaaaagcatccagaagagactattattcgctattgagaaaaccatttgcgatgggtcatctaacaaatcaaacatttctcacgcatttgagaagaacaagagtatcatcactaatgcgaagatacatcggaataagaaaattgtgatcaacttcgacctgaatgacttctttggaagtttccatttcggtagggtatgcggattcttccaaaagaaccgatgttttaacctgccatatgaagtagcggtggccatcacccagcttgtctgctttaatggcaccctgccgcaaggtgcacccacgtctccaatcatcaccaatctgatctcacagattatggatgtcaacctgctgaagctggccaaaaagtataaactcgactttactcgctacgccgatgatttgaccttttcaactaacgacaagaagtttctggagaagtacgacgaattttacgatcagctgtccagaaccatatccttcctgggattcgaaatcaatgagacaaaaacacggctacagttctgtgattctcaccagaccgtcacggggcttactgtgaataaaaagatccaggttccaagaaactactataaaaagactcgcgctatggcacactctctctacaagtccgggagctatacaattgacggcgaagagggcacaattaatcagctcgagggcagattctcctttattgaccaactgaccaagcataacaacaaaattgatggacagaagcaccgactcggaacattttgcgcccgggagacagactatcagaagttcctgttttacaagtatttctttgccgcggagaagcctttgctggtcactgaaggtcagactgatatcacttaccttaaagcagccttaaagaatctgtatctcgaatacccttcactgatttccaaaaaagaggatggcacctttgagttcaaaatcagcttcttgaatcgtaccgacaggttaagctactttctgggattttctaaggacggcgctgatgctatggggtgtctctataacttcttcatcaaaagtaagtccaaggaacacccgaattattacgagtacttcctcaagacaagcgggtccaaagctcactatcctgctatattcgtgtttgacaatgagctggaaagcaaagggaaacccttgaaaaagtttttcgacaactacgtcaaggacgaagaaaccaaaaaagagatcaagacacaattgtacgttcacctgataaagagcgcaaacatctatcttgtgaccaaccccattcttgagtcgagcagtaaggaggccgaaattgagcatcttttctcaaaggaagtgctagaaacaaaaatagatggcaagcctttaagcctttctggtgactacgataaatccaagtactacggcaaagtggccttctccaaatacatcatgaacaactacaagtctatcgatttctcgaatttcaggatcatcttggataacattgacaaaatcctcaaggagtataatgaacattga

SEQ ID NO: 8518 - RNA, 1701 nt, synthetic construct
  source 1..1701: mol_type = other RNA
atgatttcatttagcgagattaaaagccgcaacgactttgccgatgcactgcagatccctcgaagtgtactcactcacgtactgtatatcgctaaaccagagtcattctatgagtctttcaccatacccaaaaagaacggtgaagataggatcatcatggctcccaagggcacactgaagtccattcagaccaagttaagtaagcagttagtcgaatacagagcctcgatctcacaaaaggggcaggagaagagcaacataagtcatggattcgaacgtgaaaagtctattattacgaacgcccagatccacaggaacaaacggtatgtgataaattacgacctgaaggacttcttcgattcttttcactttggccgggttgtgggattttttgagaagaacaagcatttcctgttgccgtatgaagtggccgttattatcgcgcagctgacatgctataatgggagactcccacaaggagctcctacctctccagtgattaccaacttaatttgcgagattcttgattaccgtgttctcaaaatagcgaagaggtataaacttgattacactagatacgcagacgatctcaccttctcaactaattacagccgatttctcgaagttttcgactcttttgccaaggagctgctccaggagatatctaattccggttttaccatcaatcagtccaaaaccaggctcttgtatcgagactcaaggcaggaggtgacgggtctagtggtcaataaaaaaattggcgtcaatcgggagtacgtgaagagtacacgcgctatggcccaggctctgtatagcacaggggaatttactatcaacgggatcccaggtactatcaagcaactggaagggagatttggctttattgaccagctcgatcactataataacgtcatcgacgacgccaaacatgatgcctacagtcttaatgggcgcgagaagcaattccaggaatttttgttcttcaagacgttcttcttcaatgagtaccctctggtaatcaccgaaggaaagacagatatccgttaccttaaggcagcgctgaaaagcctgcaccagaagtacccagaacttatatgtaaagaagacgatggcacattccggttcaaaatcagcttctttagaagatctaagcgctggaagtatttcttcggcatttcaaaggatggagccgatgcaatgaaattgctctacaggttctttaccgggcagaaaggtgtgaagaattattaccggctgttcgctgagaagtataaagcagtgcaacggaaccccgtgattatgctgtttgacaacgagatggagagtaaacgccctctgaacaagtttatcagcgaggaggtcaaaattccctcctcggaacagcagttgtttaaggagcaactgtactatcacctaatacccggcagcaagacttacctgatgactcatcctcttccgcccggcaaaacagaggccgaaatcgaagacctattcccaaccgaagttctgggcgtcaaactggacgggaaatccttttccactaaggataaatttgacacatccaagttctacggaaaggatattttctcttcctacgtgtatgagcattggaaatccatcgactttagcggcttcatccctttgctggacaaaatcaacatgttagtgcagaatgagaagaaacccggactcaacacctga

SEQ ID NO: 8519 - RNA, 1695 nt, synthetic construct
  source 1..1695: mol_type = other RNA
atgataaagtttaccaacatccaagacaaaaaccagctggccaatgtgctcaacatcaagcccaaatatctgaactatattctgtacgtcaagaaagtggacaattattacaccgagtttgaaattcctaagaaaaatggagagatgcgcaaaatccacgccccaacgggaatactgaaatctatacagaagaatctcagtattctgttgtctgaataccagtcatacccgtattccaagaattacaaggggaataaaatcagccatgcatttgagaaaaacaagtccatcattacgaacgctaaaatccaccggaacaagaaatatatactgaacatcgacttggaatgttttttcgactcttttcactttggtagagtgaaaggcttttttgagaaaaacaacttcttcaagctcccttctgaaattgcacttatcttggcgcagatgtgctgttataaaggctgcctgccacaaggagctcccacgtcacccattatcaccaatctcatttgtaagatcttggatattcggctgcttaaaatcagcaaaagcttcaaactggattatacacgatacgccgacgatctgaccttctctacaaatgataatgcctttctcgaaaacaagacaaagttcatgaaactgctgacaaaggagattgagcacgccggctttaaattaaatacaactaagactcgcctgcagtataataccagtcgtcaggaagtaacggggctggtggtcaataagaagatcaacgttaagaagagctattacaagacaacccgagctatggcgaatactctatataggaccgggcagttcactatcgacaataacagtggcacaattaatcagttagaagggcggttttcctttattaaccagatcgacaagtacaataactccctcatcaaaaagaaggatttctttaacctgaactctcgcgaaaaagagtaccaaaagttcctattctacaagtacttcttctcaaacgaaaaacctctcatcgtgacagagggcaagaccgatatcgtttacataaagtcagctctcaaaaacttgtacaccgagtatcctaatctgatccttaaaaaagatgacggtagctttgagtttaagatttccttccttaagagaactaagaggctcaactacttctttaattttgcacaagatggtgccgatagtatgaaaaacctgtataacttcttcgacaagaataagtccaataatagctatccgcattatagcaactacttcagcaaaatatcgaataggaaacccaatttcccaatcatattcatcttcgacaacgagttaaacactaagaacaaacccttacataagttcatcaactatatcaacctctgcgagtcaaaatccctaaaattccaggagtactacaaagtcaatctggtggacaatctttacctgcttacaaatcagttgattcagcacaagagtgaatgcgaaattgaggacttatttgataatcaaaccctcactcatatcatttcgggcaagacttttaatagaaacctgaagaagcttgatggaaccaatcactattccaaagagattttcagcaagtacatttctgagaattacaagaccataaacttcgacaactttaagccactgctgaacaacttgaacgaaattctaaaggactacatatccgatatctga

SEQ ID NO: 8520 - RNA, 1719 nt, synthetic construct
  source 1..1719: mol_type = other RNA
atgttatttaagaaggaagattgcattctctcagctgaactgcagaaatttgcgaacttctttaacatcaaggcaaacattatcagctatgttctctatgtgaagagaacggagaattgttatacagcctttgaaattctgaagaagtacaagaaggaaacaaggataatacacgcccctaataaaactctgaagaatatccaacgcaatatcgccaaaaaattgcacgaattacagcaagacatagactctaagaacaacattaagaccaatatcagccacggtttcgagaagaacaaaaatattgccactaacgctatgattcacaaaaacaagagatacatcctcaatatcgacctggagaattttttcaactcctttcattttgggcgagtaatggggtatttcaacaaaaaccggtatttcaacttcgacaagaagatgtctattataatcgctcagctgtgttgcctgaatggcgctctaccccagggagcaccaactagtcctatcatcagcaatctcatatgcaggatcttcgactacagaattctgaaaatcaccaagaaatacaagctgaattacacacggtatgcagacgaccttacttttagcacaaacgacaactttttcttacaccactacgataacttcttaaaggatattagctccgagattcagaaatcgggctttaaaatcaataagaacaagacacgactccaatacaaaaattcaaaacaagtcgtcaccggcttggtggtgaacaaattcattaacaccgaaaagatgtactacaaaaccacccgcgctatggcctataatctgtataagtctgggtcctttaccattaatgacaaggaaggagaacttaatcagttgcagggcagatttaacttcatcctgaacatcaagagttattcacctgtaatccagaaagataccaagaacaatatactgcatagcaaagagaaggagtatcagaagtttctcttctacatcttcttctacattaacaccaaacctctgctcatcaccgaaggtaagacggatattttgtacattaaagcagcccttaagaatatgtacaaaaattatccccggttcataatcaaaagtgacaacaaattcgactacaaaatcgccttctttaaacgtagttctaaaaacatcgaggagtacttgaacattaagaaagatgggggccatgaactcgtgaagatcatcatttactacttcaacaagaagtacttcgacttcttttacaacctgaacaagaacataacgccaaataaccccgttattatacttgtggataatgagaaagcgaaggataaaccactggagactctgaaaaagaatataccgcaggcttaccggaatgatctaaactttaaagagaagccctggtttcgcattggagacactaatctgtatatcctgacctacaggtcaaatccaaatctgaaagatatagaagtcgaggacctcctcgaggagtctttcattaaagagctaaagatccagaatagggtgtttgacaaaacagcaaataaggattccgagctttacttttccaagaatacattggccaattatgtgtacaagaattacctgaagatcaacttcaacaacttcaagtttatcttcgatgacatccaagatattatcaacgatcacaacaaccattatccgattaatcagacactgcatactctttga

SEQ ID NO: 8521 - RNA, 1647 nt, synthetic construct
  source 1..1647: mol_type = other RNA
atgtctcttggcaaaatcaaaaatcgtaatgaactggcgaggctgctggaggtgccgactaagttcctcacttacatcctctacattaagaaaacagacaacctctactcccggattaacattctgaagaaaaatggggatgagcgaataatatatgcccccgagaaggagctgaagagcatccaaaaaaagttagcctctattctgtatcaggagcggaaggcttatttcgaaggtcgggggatcactcctaatatatcacatggctttgagcagaaaaagagcataatttccaatgcaagaatccactgtaataagcacgtaattttcaatttggacctggaagatttctttggttcattccattttggaagggtgaagggctactttgaaaaaaacaaccagttcaagttggattcccagatagctattttaattgcccaaatcgcatgttacaaaggatttcttccacagggggcccctacgagccccatcattacaaacatgatctgcagcatcctcgactatcgcctcctgaaactggccaagcagttcaaactggactataccaggtatgcagacgatctgacattttctaccaacgacaaaaaattcctggacaataaggacgtgttctacaaaaagataaaccgtgagattgagaaagcgggttttaaaatcaactgcaagaaaaccagactccaatttaaggactcccatcaagaagttacggggctaaccgtcaataagaaggtgaatgtaaagaggttctactacagacagactcgagctatggcccaccgcctgtataaaaccggcgagtttgaaatcgatgggaagcgaggtactgtggaccagctcgagggacgcttcagctttatgtatgaagtcgcatcatacggatctactaagaagaactattgctacaaggaatacaagaagtttatcttctacaagtacctttacatgaacgataagccagtggtgatcaccgaaggaaaaaccgatattatttacctaaaggctgcactcaaaaatttgtatgaggattatccttccttgattagcaagcagacagacggaacgttcaagttcaaaatcacattcttgaaccggaaaagtgagaggctaaagaaacttcttaatttgcagaaggacggcgctgatggcatccggaccttcattaacgagcactttctgtgtaagaatcccactgccaagtattttaagaacatagatgggccactgtctaagaatgctgtgatttgcatctttgacaatgagatcgaagatcaggataaacctctgagacacgtctggaacggctttaaaaaagattcaaagcgcaaagaggccctgaaaaataatcagaatacccattgggttgacaacgtttacattcttacaaaccccctcgtctcgggcaagaaaatctgcgaaatcgaagacctctttgatgaacagacattaaaccagcaaattatgggcaagaaattcgatagaagtgaggagaaccacaaacatttcttctccatgttcatcaacaagaactacaacgacatagattttacccaattcaaaccaatgctggacaatctggacaagatcatctatgactatgggaacagtatggataagtgtcagtga

SEQ ID NO: 8522 - RNA, 1707 nt, synthetic construct
  source 1..1707: mol_type = other RNA
atgggaaaactcaatgagataaataatcggtctgactttgccaatctcattaatgtgccaattcagaaactcaccttcattctgtacaaaaagaaggtggagaatctctattcgtcatttagcatcccaaaaaagtctggggggtatcggcgcatctattccccacacgaggacctgctcgatatccagaagaaaatcgcacgactgcttgcgacccagaaaaacgtcttccaggaggaaaacaggattaaattgaacatctcccatggtttcgaaaagaacaagagcattatcactaatgccaaaattcaccgcaacaagaggtttgtctttaatgttgacctggaaaacttttttgagagctttcactttggcagagttaaaggctacttcgaaaagaacaaaaacttccagttgcctaccgaggtggctgtgattctcgcacagctttgctgttatcaaggcgtcctcccacagggtgctcctacttctccaataattacgaacttgatctgtaacatcctggacctacgccttttaaaacttgccaagaaatataggctggattacacccgatacgctgatgatctcacattttccaccaatgatcgccattttctagacctaaagtcagcattttactacgagttgaacggagaaataaaaaaagccggattcaagctcaacgagaagaaatcaaactttcagtacaaagactctcggcaaatggtgactggcctggtcgtgaataagatgatcaacgtggacagaaacttctataaggaaacacgtgctatggctcaccgcctttaccaaacaggaagcttcacaatcgataacgaagaagctgatattaaacagttggagggccggttcgccttcatcaatcagattcagtggtataataaccgaatcgataacgagaagcataatttcaggtcactgaatacaaaggagaagcaataccaggccttacttttctataagtacttcttcgccaataacaagcccttaatcattaccgagggcaagacagacattaaatacctgaaatccgccttgaagaagtactataacgaatatcctgagctggttactaaagacgaaaagaataactacgacttcaagatcagttttctgcgtagaagcaaaaggctgcggtatttttttgacctgagtctggatggggccgacactctgaccgacttctacaagagatttatgtctaacagttaccccgagaagggggcaatcaactacctgatgcacttcaaaaaaatgagcgagaataaacccaagaatcccgtcatttggatttttgataacgaaatagcgaacaaggataagcctatctgtaaattcatcaatggagtaaagctaacagaatataagaaggaatgcctcaagtcttcccagcaaaccctgctgcatgacaacttatttctcttgactaatcctctgagtaacggcgcagaggagtgcgagatagaggatcttttttcggaagacgtgctgaaaaaggaaataaatgggaagacgttctgcagagataaaaaggtagacccggagaaatactatggtaaggagatcttcagcaatttcattgtgaatgagtatgaacggatcgatttcgagaatttcaagccgatgctggacaacctgacgctgatagttaggaattacagatccgattccgtgatcccctga

SEQ ID NO: 8523 - RNA, 1683 nt, synthetic construct
  source 1..1683: mol_type = other RNA
atgattaaactgaaaaacgtgaagaacaggaaagaatttgctgaattcatcggtgttccactccaaaagcttacctatgtcttatacatcgccaagatcgacaatctgtatacctcattccagattcccaagaggtctggcggcgtgagaactatcaacgccccacagaaagacctcctagatatgcagaagaaactggccaaactgttagctacccacaaatcaattgtacaggaagagaaccacattaagttgaatattagtcacggcttcgaaaagaatcgaagcattatcaccaacgccaagattcatcgaaacaagagattcgtgttcaatgtcgacatcgagaactttttcgattcctttcattttggcagggttaaggggtacttcgagaagaacaacaattttgagttaccttcagaagtagctacgataatagcccaattatgttgctataaaggagtgctgccgcagggagcacccactagcccaattattacgaacctgatctgcaatatactagacatccggcttcttaagctaggtaagaaacataacctggattattctcggtatgctgacgatctgactttttcaacgaatgacaggttgtttcttatcagcgagtctctcttctacgacgagctcactaaggagatcgaatctgcaggctttaaactgaatgagcagaagtcccgcctgcagttcaaagactcgcgtcaaaccgtgacaggactcgtcgtcaacgagaaaattaacgtcgatcgaaggtactataaggagactagagctatggccaacaaactgtacaagacaggtatctttgagatcaataatcaaagcgccaccatcaagcagttggagggccggctgaccttcataaacaacattcagcgttacaacaattctattgatgggaagaaacacgatccttggagtctgaatagtaaagaaaaacagtacagggcgtttttgttctataagtactttttcgcgaacgagaaacctttaatcgtgacagaagggaagaccgacgtgaagtaccttaaggctgccctgaaaaaatattgggagctgtatcccaatctgatcagtaaagattccaaaggagacttctcgttcaaagtttcctttctcaatcggaccaagagactgagttacttctttggtattaaccgcgacggagcggatgccttgaagaatctgtacaacttcttcacaagcagcagccaaaacaatccacctaattacctgtactacttcaagaagatatccaatcgcaatcccgcaaacccagtgattatgatttttgacaatgagctcgtgaacaagaaaaagcctttgtccaagtttgcaaatcactgcaaacttaatgaggattcccgcaacaatctacagacacagctctatatacggctgcaggataacctgtttctcatgacaaacccgctcgttgaagggaaggaagagtgtgaaatagaggatctgtttggggaggacgtactcaacactaagatctcaggaaaaatcttctctcgcgaaaaaaaagcagatcccaaggaacattatggcaaagagattttcagcaacttcatcacaaatgaatacgaaaagatcgacttcgagaattttaagcccatgttggacaatctttccagaatcgtggaaaactataagtga

SEQ ID NO: 8524 - RNA, 1683 nt, synthetic construct
  source 1..1683: mol_type = other RNA
atggagaatctgaaaaaggctaagaaccggaaagattttgctgaattgatcaatgtgcctttgcacaaactgacttatgtcctttataaggccaaagtcgagaacttatacacctcctttcaaatacctaagaggtctggaggggtgagaaccatacacgccccccaccaggatttaagagatatccagaaaaaactggccgacctcttggtcaagtacaaaaatataatccaggccaccaataacatgaaactgaacatctcgcatggcttcgagaagaacaagtcaatcattactaatgcacgaatccatcggaataaaaggtttgtctttaatgtggacctggaaaattttttcgagagcttccacttcggccgcgtgaaaggtttctttgaaaagaacgagcattttatgctcccaagcgaaatcgctgtgattatcgctcagatttgctgctataaccgaaaattgccccagggggcgccgacatctccagttattaccaacctgatttgtaacatcctggacatcaggatcctgaagctcgcaaaaaaatacaagctggattactctcgttatgcagacgacttgtccttctccactaatgacaaaaacttcctgaatagcaaggatgatttttataacgagctggtgaaggagattataaaggctggattccgggttaatgacaaaaagagtcggctgctttttaaagatagtcgccaagttgtgaccggacttgttgtgaacgagaagatcaacgtaaataggatgtactacaaggagacacgggccatggtgaactccctctacaccacgggctcttttgagattaactcaaagattgccaacatcaagcagctggaaggtagactgtcttttatcaaccatatcgagagatacaacaataacatcgacaagaacaatcacgacttcaggaaactgtcatcaaaggagaaacaatatcgcagcttcatcttctataaatacttcttcgcgaatgaaacaccagttgtgattactgaggggaagacagatatcaagtacctaaaggctgccctgaagaaacattataaggagtaccctgccctcgtattgaaggagtctgacggtacattttcctacaaggtcaccttcctcaggagaactaaacgattacagtacctcttcggactttttcgcgatggcgcacccgcacttaaaaacctctataacttcttcagtcctattagcaataaggatttccccaactatctggactatttcaagaagatttccaactccaatcccaaaaatccggtaatcatgatctttgacaatgaattagccaataagaccaagcccctggcaaatttcgccaaccactgcaagcttgatgaagggactcgtagtatactaaaagagaaataccaggtcaagctgcaggacaatctcttccttatgacaaatccactagtggaaaataaagccgagtgtgaaatagaagatctgtttcacgatgctgtcctcaaaacgattattgggggcaaaatatttagccgggaaaagaacgcggaccctaataagtactatggcaaagagattttcagcaactatattatgcgcaactacagcaacatcgacttttcaaactttaagccaatgctggaaaatttgaatgagattgtgggaagatacaagtga

SEQ ID NO: 8525 - RNA, 1689 nt, synthetic construct
  source 1..1689: mol_type = other RNA
atggtgaaaatcaatgaggtgaccaatcgcgatgagatcgcctacgccctgggaataccaaagaagaaactgacctatatcctgtacgtcaagcgtactgagaacctctattactcattcgagattcccaaaaaaaacgggggatttagacggatcaatgcacccgacaaagacctcagagatatccagaagagcttagctgatatcttggttaaataccagaaagccatttgggatcgcaagaatataaaaccatatatctcgcacgggtatgaaaaggataagggaatcatgaccaatgcagaagttcataagaataagcgctttgtgttcaacgtggacttgaaggacttcttcgattgttttcatttcggtagggtacggggcttttttgagaagaacaaagacttttgccttcctatcgaggtcgctacgattattgctcagttgacatgttataatggcgtgcttcctcaaggagctccgacttcacctgtgattaccaatctcatctgcaacattttcgacatgagggtcatgaaggttgccaagaaatacaaactgaattacacccgatacgtcgacgacctgacgtttagcactaatgataagaacttctttctcaacaaggagttattctttgagaatctaatcatcgaagtggaaaacgcaggattcaaaataaacgataagaaaactcgcctccagtttaaagattcacggcaaacagtgactgggttggtcgtgaacaaaaaaattaatgtggacagacgattctacaaggatacaagggccatgctggacagcctgtttagaaatggctcctttgaaattgacgggtatttaggcgacataaaacaactggagggccggttgtcttttattaatcagatcgagtggcacaacaatcttaaggataattccaagcacaacgtatataacctatcctctaaggagaaacagtaccaggccttcctgttctacaaatatttcttcagcaacaagaagccaatcctggtaacagagggtaagaccgacattaagtatattaaggcggcacttaagaagtattacctggattatcctgacctgattatcaagaatgagaagcaggagttcgaatttaaaatcacctttctgaagaggactaaacggctgcagtacttctttaacctatataaagacggcgctgatgccatgcttcacatatacaactacttctatgacgttaacaacgacaaattcaccaactacgtaaacttctttacagcccgatgcaaaaggaaacctgccaaccccacgatattcatattcgacaatgaaatcaacgtgaaaggtaaaccattgaaaaagttcgtcgacaatgtcagtcttaatgcgctgaaagtgtctaaactcctcgaagacaattatgttgacatcgctggctccgcatatattctcgttaatccgatcattgatcgttccaagaacgaaagtgaaatagaagatctgtttacacccgagctgctgagtcataagatcaacgggaagacattttgtagagataagtcattcaacagcaataagcattacagcaaagagattttcgcgaaccacgtggtgaagaattaccgctctatcgattttaccaactttaagcccatgttagataacctcgacaagattatcaagaactacaataagtga

SEQ ID NO: 8526 - RNA, 1683 nt, synthetic construct
  source 1..1683: mol_type = other RNA
atggagatcaacgaaattaagaatagaactgaactggcctggaaactgggcattcccaaaaagaaattgacctatgtgctctacattaagggaaccgatcagctgtacactaccttcgaaattccaaagaagagcggaggggttagaaaaatccatgcgccggagaaggatctcaaagagatccagaaaaacctggctaacatcctggttgactaccaaagtgagatgtggaaaaaaaggaagataaagccgaatatttcccatgggtttgagaagaataagggaatcatgacaaatgccgaggtgcacaaaaacaaacgctttgtcttcaatatcgatctggaaaactttttcgagtctttccactttggcagagtgcgggggttcttcgagaaaaacaagtactttgaattgcctctggaggttgctaccattattgcccagctaacctgttataagggcacattacctcagggttcaccatgctctcccataataaccaatctgatatgcaacatcttcgatatgagaatcatgaagctagccaaaaggtataggttaaattatagccggtacgtagatgatctcacattctccacaaatgacaagagatttatcgacgacaaagaatatttcttcgaagagctatctggcgaagttgagaaagcaggcttcaagattaatgagaacaagacaaacctgaggtataaggatagtaagcaaattgtcaccggacttgtcgtgaataaaaaaattaacgtggaccgttgctactataaaaaaactcgcgcaatgctgaattctctgtataagacggacacctttgaaatcgagggatccactgggactgtgaaacagatcgaaggtcgattaagttttatcaatcagatagactggcacaacaaccagattgatagcaacaagcacgggttcaggaaccttagcgcccgcgagaaacagtaccaggcttttctcttctacaagtacttcttcatcaacgacaagcccattgtgattactgagggcaagaccgatatcaagtatatacaagcagcattgaagaaatactaccttaactatcctgacctgatcgtgaagaatgacgagcataagttcgaatacaagatcatgttcttgaaacggaccaagcgtctgaattacttctttgggcttaatcaagatggcgcggacgccatgcagaacctgtatcactacttttacgactacaacaacaacataacggccaactatatgaagtactttaaggacatctcaaagaagctgccccgcaatccaactatctttcttttcgacaatgaattggcaggcggtgagaaaccagtacggaaatttgtgaaacatatctccctggataaagcccagtatacaaaactcgagaaagaggaatacgctcgattgcacgagtcagcttatctgctggtcaatcccctggtggattcaaaaaaggagtgtgagattgaagatctttttctccccgaaacgctcgaacacaagataaataataagaccttctgtcgggacaaaagcttcaagtctgacgtccattatggtaaggagattttttccaactacatcatgaagaactacaagaccatcaactttaagaactttcagcctatgctcaataatctcagtggaattatctcgagctataagaaatga

SEQ ID NO: 8527 - RNA, 1257 nt, synthetic construct
  source 1..1257: mol_type = other RNA
atgaaaacactgaaaaatatcgaagacaggaaggatttggccgattacctcaatatccctattaagagactgacgtatatcctctatataaagaggaccgagaacctgtactattcttttgaaattcccaagaagagcgggggcgtacgaaatattgatgcgcctaagagcgaactgaaagcccttcaaaaaaaactggcagctagcctgactaagtatcaggagattctccagaaaagcaaacggaaagcccccaacatcagtcatgggtttgagaaaggcaagtctattatatccaacgccaaaatccacaggaacaagaagatagtgtacaacctggacttggagaattttttcgaatcattccatttcggacgggttagaggcttcttcgaaaaaaacaaagactttgaactgagtactgaagtcgctactattatagcccagttgtcctgctttaacggcgcattgccccaaggagcaccaagttctccaatcatcacaaatttcatctgccgtataatggacatgagaatcctgaagcttgctaagaattacaagcttgactatacgagatatgccgatgacctgacattctctacgaatgacaagaaattcattgaccaaatcgactacttcctccacaagctgacaaaagagattgagaaagctggtttcaagctgaacaagaacaagaccaatctaaacttcaaagattcacggcagcttgtgaccgggttagtggtcaacaaaaagatcaacgttgatcgtcgatactataaagagacaagagcgatggcacaccgcttgtataagactggggagtttcagattgatgataagaatggaactctgaaccagctcgaaggccggttttccttcatcaatcaggtgcaaaggtataacaatgtcatcgattcatcgaagcacgactttaataacctaaatgcctttgagaagcagtaccaggcgtttctattctataagtacttctacgccaacaataagcctcatatcgtaaccgagggtaagaccgatataaactacattaaagctgccctcaaaaaacaccatctggagtttccaaacttaattgtgaaaaaagaggacggagaatttgatttccgcgtggcttttcttaaaaggaccaatcgcctcgcatacttcttaaatatcaagaaggacggtgccgacaccatgaagaacatctgtaagtactttctcattctgaagattatgcgctccccgatcatctga

SEQ ID NO: 8528 - RNA, 1701 nt, synthetic construct
  source 1..1701: mol_type = other RNA
atgcgtaaattctgcgacgccgagacacgtaatgagtttgccgactttctgaagatttctcgctctcaactgagctatgtgctgtttgtgaagcaccctcattcctactataaaactttcgagattccgaagaaatctggcggtacaagagtcatcaacgccccttatggggaattgaaatttatccaggagcagctgaacaaacggctggctgagtaccagaagtacatctgggaggtcaaaggtgtgcggcctgctattagtcacgggtttgaaaaggggaaaagcattatcactaatgctaagatccacaggaataagaggtacgtggtaaacttagatattgagaacttcttcgggaccttccatttcggcagaattgtgggctttttcgagaagaatcggtacttcaggctgccccacgaggtcgccatcacgatcgctcagataacctgctacaacggtaccctcccgcaaggtgcacccagttcccccattatcaccaattatatctgtcaagttctcgacagacgacttttgctcctggccagagaatatcggctagattacactagatacgccgacgatattacgttcagtactaacgacattcactttacagacaagtatagggcttttctggacgccgtcgacaccgagatacaacgagcgggctttcgaataaattccaaaaagacccgcctgctttttgagtcaagccgacaggaagttacaggcctcaccgtgaacaaaaagattaacagcaacaagcagtttcgcaaagaaaccagagcgatggcccaccacatgtatgctaatggcgaattctcgattgcaggcgactccggcactctggagcagctggagggaagatttagcttcattgatcagatcgagcattacaacaattcactgtcaggaaacaagaagaactaccataatctgagtgggtgcgaacgcgaataccagaaattcttgttctacaagtacttcttcgctaatcagcggccattaatcctaactgagggaaagaccgatgtgaggtatctaaaagcagcccttcggaatctttataacgaatatcccacacttatcaagaaaaatgaagacggctccttccaattcgaagtgtcattcttcaaaagatcgcggcgctgggagtactttttcgggttatctagcgacggggcagatacattgggtaacatctgccagtgttacttctccaaacgcaacactggactcccacaggtgtttgactatatgaagaacatatccggacgtcagccacagcacccagtcatatttctcctcgataatgaaatgaagagcgataagcctctcaagaaattcctgcagaagcagcggattacagacgagaaaaggcgccagcttgtagcacgactttacatccaaatcatggacggaaccaacctctttttggttacaaatcccctcgcgaatggggatgaagagagtgctatcgaaatactgttccctgaagaggtgctgttacatgaaatcgatggaaagaagttttctctggagaacgattatgacacggcaacctattatggaaaagagttgttttccaagtacatcgaggccaattacgaaagcctggatttttctggctttaggccactgctgaatgctctggcagccgccgttgagacatataggttgtcatgtaacacttga

SEQ ID NO: 8529 - RNA, 1143 nt, synthetic construct
  source 1..1143: mol_type = other RNA
atgaacccgtttagcttcgtgagatccagggccgacgtggcggatgcaataggtattcagctgaaatccttaacgtacatcctcttcgtcaaaaggatagaaaactgttactcaacgttcctcatcccaaaaaagtcaggaggcaaccgcactatctgtagtccttgcgatgagctgaagctgatccagaaaaaacttgctgatgcgctgtgggaacagcagcaggacatttggaagaaggccaacatccacccaaacctgtcccacggctttgaaaagggcaagtctatttttagtaacgccaagaaccatgtcaacaggagatttgtgctgaatattgaccttgagaatttcttcgacacattccactttgggcgtgtttgcggattctttgagaaaaatcggtacttcatgcttccccacgaggcagcagttacaatagcccagattgcctgttataatggaaaactaccccaaggttctccctgcagccctattattaccaacatgatatgtcaagcactagatattcggttgttgcaggtagctaaaaagtacaaactcgattatacccggtatgccgatgatctgaccttttcaaccaacaataggcatttcttagactgctatgaacgcttttacaaaagtttactgcgagagatccaacatatgggatttagcgtgaatgaaacaaagacccgcctgctgtatcggaactctagacaaacagtcaccggcctgactgtaaaccagaagatcaacatcaattgcgactactataaggctaccagggctatggctcactcgctctaccagaaaaatgagttccaaatcaatgggagccctgccacaatcaaccagctcgaggggagatttgccttcatcgaccagatcgaccactttaataataggaaggatactttcccacataatgctcggaatctcaatcgtcgagaacgagagtatcaggcattcctctactataagtacttcttcactaacgacagagtgctgatttttaccgaggggaaaactgatgtgctttatttgaaggctgccctgatggcgctttacacagagtaccccaatttggtgcagcgcgacgaagccggcaagttcctgtttaacgtttcctttttctga

SEQ ID NO: 8530 - RNA, 1647 nt, synthetic construct
  source 1..1647: mol_type = other RNA
atggagaactttaatgacctgaaaacaattaaggagttcgctaagttcatagataccccactgcaaaaaataacctatatcatccacaggcagaaaatcgaaaacttatacaatagcttcgagattcccaaaaaaaacggcggcattagaactatcgacgcaccacatgacgacttgaagcagatccagattaagatcaagaatatgctgtggaagcatcagaaaaagatctgggaaaagtacaatcagaacaagatacctaacataagccacggatttgaaagcggtaaaacctttataacgaatgccaccgtacacaagaacaaaagattcgttctgaatatcgatctcctggatttcttctattttttccatttcggccgggtcaagggcttctttgagaaaaacaagtactttaaggtgccctctgagattgcgattaccatcgccagactggcgtgttatcagcaaaggctgccccaagggtcaccatgctcacccattatcacaaacctcatctgtaatatcttggatatccgactgctcaaactgggcaagaaatacaaacttgattatacgcgctatgccgatgacttgactttcagcaccaataacaagatatttccaaagcattacgacgagtttctatttgaaatcacatccgtcattgagaaagccggattcaaaatcaatgacaagaaaacacggctgctgtataagaactcaaagcaggaggttactggactagtagtgaataagaaactgaatgtgtctaacgattactacaaaactacaagggctatggctaatacgctgtacaaggatggttcctttaccataaacggcgcagacgggacaatcaatcaattagagggtcgctttgcttttattgaccgtctttcaaagcacaataataaactcgacactaacaaacacgatttctggcatctgtcgggccgggagaaagagtaccagaagttcttatttttcaagtacttcctacagaacacaaagcctctgattatcaccgaggggaaaactgacatcgtgtatattaaatccgcactcaagaacttatacaagaattatcctcgactgattatcaaggaaggtaacaacttcaagttccatatttcctttctcaacaaaaccaagaggcttagttactttctgaatatcaacattgacgggggatctgttatgtccaatatctacaagaacatgtacaacaatgagaattctcttgccaagctcttcaaagacaagtataagaccgaggccaaaaataatgtgatcctgttagtcgataacgaacaaaaaaacgaaaacaaaccgttgagacagctcctcaatagtgccaagattaatctgaaccagaacatctctagccacattacacacaatctgtaccttctaactcatcagcttgtggacaataaaaaagaatgcgaaattgagaacctgtttaccaatgagactctcgggacaaagttgaacaataaaagtctcaacctgaaggaaaaagatttcaacaaggagatacactatggaaaggaaatattttcccagtatgtgcgcaagaattataagcacattgacttcagcaacttcaagcctctcttggatgaactgaacaacttgctttga

SEQ ID NO: 8531 - RNA, 1707 nt, synthetic construct
  source 1..1707: mol_type = other RNA
atgctatctcttaaagacgtgaaaacccggaaagatttcgcagtttttttgggcattgagctgaaactcttaacctatatattgtaccacatcaaggttgagaacttgtacacgactttcgaaattcccaaaaaaaatggtggaacccggattattaacgcaccagacaaaaagattctgaagaagatacagaaccgacttatgaataagctctacaactatcagaacaaaatcaagaaggacgagaatatcaaaatcaatatctctcacggattcgaaaaggggaaatctattataacgaatgcccgtattcatagaaataagcggttcgtgctgaatatcgacctgaaggacttttttgcctcctttcatttcgggcgggtggtgggtttcttcgaaaagaacatcaattttcgcattcctaaagacattgccattattatagcacagctgtgctgttataaggggtcactgccacaaggcgcacccacctcaccaatcatctccaacattatctgtaacatcttcgatatgcgaatactgaaactggcgaagaagtacaagctggattatactaggtacgctgatgatctgactttttccacaaataacaaggatttcctcaacatctacaatgagtttttgctttgcatatccaaggaagtggaaaaagccggcttttgcatcaatcaaaaaaagacacgcctgttctataaggatagtaggcaggaggtaaccgggcttgtggttaacaaaaagattagcatcaaccacagctattgcaagtatacacgcgccatggctaattccctatacaagaacaaatcgttcaatatcgacgggaaagacgcgacaatgaatcagctcgagggcagatttgcatttatcaatcaaatcgacaggtacaacaacatcatcaatatcaacgacaataagcacaatgatggcaaaaagagtaacgacaagaagttaaactgtagggaaaaagagtaccagaagttcattttctacaagtacttctttgctaaccagaagccgttaattatcacagagggtaaaactgatatcctgtatttgaagtctgccataaaatctctctatgcctattttcctgacctcatcaagaaaaactcaaacgatgaatttgagttcaaggtcagttttctcaggcggactaagcgtctcgaatattttcttaacttcgtgaaggatggagctgacagcatacaaaatatttaccgcttttttgtcggaagagaagtcgtgaactatagcgagtacttcaagaagataacaaaggatattgccgctaatcctgtgattctgattttcgacaacgaaattcccaataacaaaaaacccgtccgaaaattcatcaacttcacgaacaaaaaggaattcgagaacattctagagaaaaagctgtacgccaacattgtcgacaatctgtttatcataaccaatcagctcgtgagagataaaaaagaatgcgagatagaggatctgtttaatgacaagacccttaaccataagatcgatggcaaggttttttgtagagattccgctatctttgataagcagaagcactatagcaaagagattttctcgaagtacatcagcaaaaattacaaagacaaggacatcgacttcatcaatttcaaacctatgctgaaaaacatcgtagagattatcaccaattacaaatga

SEQ ID NO: 8532 - RNA, 1509 nt, synthetic construct
  source 1..1509: mol_type = other RNA
atgcaaaagtccatcgtcttcaagattctggaccatataagagagactgaaaaggacaagtacatcaagaccaatataagtcatgcctttgaaaagggtaagtcaatcattactaacgcgaaaatacaccggaataagaaattcatcctgaacatcgaccttaaggacttttttgactcatttcatttcggaagggtggcaggctattttgaaaagaatcgggagctcaaattttctagagaaacaagcatactcctggccaaaatcttttgttgtgatgggaaattaccacagggagcaccatctagtcctattatttccaacctcatctgcaacatctttgatatgaggatcctgaagttggctaagaaatttaagctggattatacccgttatgccgatgacctgtcgttcagcacaaacgataagaacttcataaagttctacgacgattttatgacgaagcttaacaatgaagtcaaaagagccggttttaacattaatgacaagaaaacccgcctcctctataaggactctagacaggaagtgacagggctcatcgtgaataaaaagatctctatcaagcgagaatacgtgaagtctactcgcgcaatggccaatacactgtacaataatggctcctttcacattaatgaaaaggaggcgaatctaaatcaattggagggaaggttcaattttattgatcagatcgatcggtataacaacaagatccaaaaaaccaacaagaatcaccggatgttaaactcacgtgagaaagagtaccagaaattcttgttctataagtacttctacgccaataacaaaccgctgatcctaaccgaggggaaaaccgacattctgtatataaaagccgctctcaaaaacctgtattccgagtatcccaaattgattgagaaggtaaacaacaagttcaacttcaaaatctccttcctggaaaggtcttcacgcctcgagtatttttttggcattaccaaagatggcgctgatagcctgattaatatctacaactactacagcggcgaggatgtgaaactgaacctgctgaattttttcgagaaaaaagagacgaagagttgcaaacctgccatccttctgtacgacaatgaacttcacaaaatcaatggtattgagaagcccctgagcaaatttattcgaaagagtgttaaggagaaccaggacaatttcaagaagattatacagaagaacctctacaacaaactccttgggaacttgtatttggcaactatccccattgtcgacacaaataaacaggaagctgaaatcgaggatttacttaataaggaggttctagaacacaagattaataaccgctcgttcagcaaggaccctaaaaatggaaacgagtatggcaagaacgaactgtccaaatacgtgttcaagaattacagcaacattaacttccagaatttcaaaaagctgctggacactttacagaacatcattgaagagtacgagataaaaatctga

SEQ ID NO: 8533 - RNA, 1671 nt, synthetic construct
  source 1..1671: mol_type = other RNA
atgattagtatcgatcaggtcgagacaagagatgaactcgctgatcttctgcatatccgtcataacctgttaacttacgtcttgtatattgccaaacctgattcctactaccagacattctatataccaaagaagaacggagaaagtagggaaatccaggctccgagaagggagctgaagcgcattcaaaagcgcctcgctcttgagctgtcagtctaccagcaatctatgtacaagactttcgacattaacactaacattgcgcacgcctttcggaagggtagaagcataattaccaacgccaagattcacaaaaataagcgctacattgtaaacatcgaccttaaggactttttccatagcatccatttcggaagggtgaagggcttcttcgaaaagaatacattttaccagctgccctctaccatcgcgaccatcatcgcccaactaacctgctacaatgggcgcttgccccagggagcaccatctagcccagtgattacaaatttaatctgtcaggtgcttgactatcacgtgctgagaatagccaagaaatataggctagattacacccgatacgccgacgatatgaccttctccaccaacatgacagagttctggaatgagcgagagacattcctgtcagatctcactcgggagatcgatcgcaacggttttcgcattaatgatgctaagaccaggtttattaagagggaatcaaaacagaccgtgacagggctaactgttaacaagaagattaatgcagacaggatctattacaaggagacaagagcaatggccgatcggctctacaaaaccggcagttttaatatcaatggcaaaccggggactatatcaatgttagaagggcgtttctctttcatcgaccagatcacgaagtttaataacaaaaaggacggtaaaacccacgacatcagaacactgtgtgcccgggagagggactatcagaagttcctcttctacaagtatttttacgctaacgaaagacccctgatcattacggaaggaaaaactgatatcatctacatcaagagcgccctgaagaaactgtacgatgtgtatccccagttgattaagaaaaactctgatggcagcttctgctataaaatcagcttttttcaccgaacgcctcggatgaagtatttctttaatatctccatggacggcgcagacactatcaccaaaatccatctcttttattccggcaataataaaatgcccaactattaccaggagctgagtacgaatcagaagatgaagaatgcagtgatttttctgttcgacaacgagacaaagtcggaccgaccattgaaaaagttcatcggatattgcaaactggacgacgcacagaaagaggagctgcaagagcaatgtttcactcggctgattgatggctccgagctctatcttgccacagttcctcttgttgaaggggatgacgaaagcgaaattgaggatttgtttcctaaggctgtaaaagacatacggatagaaggcaaaatgttttaccgtaagaacgactttaacccaaaaatacactatggaaaagaggtgttctccaagtacatctataataactacgatgccattgacttttcggggttcatacctctcctggacgcgattgtcaaagctataaaaaccaaatga

SEQ ID NO: 8534 - RNA, 1665 nt, synthetic construct
  source 1..1665: mol_type = other RNA
atgaagctcattaatgacatttcgacaaggtatgagctggcagatctcttgcatatccgtctgcgccccttggcctatgtgctgtatatctccaagcctaattcttactacagaaccttttacatcccaaagaagaacggcgatttgagggaaattcaggcaccatgtgggaaactcaagtacatacaacagagacttatggctgaacttaacaactatcaggactacttgtccaagacccagggaataaagactaacatcgctcacgccttcataaagaagaagagcatcatttccaatgcgagtatccataagaacaagcggatcgtaatcaatgtcgatcttaaagacttctttcataccatccacttcggccgcataaagggcttctttgagaaaaatcatttctatcagctgcctagcgatattgcaaccatgattgcacaaatcacctgttataatgggcacttaccccagggagctcccagtagccccgtcattactaacttaatttgccaggttctggactataatatcctcagaatagctaaaaagcaccggttagattatacaaggtacgccgacgatctaaccttttccacaaataagggagattttatggacaattaccagtcctttatgacagagcttagtaaggaaattgaacgtaatgggttcattatcaatgagaacaagacacggctcgtgcgccgagaatctaaacagacagtgactgggctcaccgtaaacaagaagatcaacgtcgaccggtccttttataaactgactagggccatggccgactgcctgtataagaccggaagctttgacatcgacggtgaacctgggaccattaatatgctggaaggtcgattctctttcatagaccaaattgtgcactacaataacattaacgatggcaagaaacatgactacaggagtctgtgtgccagagagcgcgaataccagaagttcctgttctacaaatacttctatgcaaacgagcgcccactgatcataacagaaggaaaaaccgacgtgctgcacctcaaagctgctttgagaaaactttatctgcagtaccccgatttaatccagaaaaaacaagatggcagcttcgagtataaaattagcttttttcggaggacaaagcgcatgaaatatttcttcaacattagcccagacggtgcggacacgatgaaaagcatataccagttctacacgggcagaaataacgtgccgaactatttccagaccctctcagcccgtaatatggagaatgccgtgatcttcctgtttgataacgagacttgctcagaacgaccacttaagaagttcatggactgggccaaactgcagaccgcacagcgaactgagctgaaatccaagctgtacgcccaactaatcgatgacagtaagctctacctggccacgactcctctgttggctgagaaaaaagagactgagatcgaagacctgtatccggagtctgtccagaacattaaactctcaggtaaggagttttgcagagcatctgtttttgattctgagaggtactacggcaaagacatcttttccaagtatgtttacaaccactacgattcaatcgatttttcagggtttgtgcctctactagatgcgatccggaacgctattcaatcgtga

SEQ ID NO: 8535 - RNA, 1662 nt, synthetic construct
  source 1..1662: mol_type = other RNA
atgattgatattgtggaaactagagacgacctggcagatctgctcaatattaggcattcacttctcacatacatcctgtatgtcgccaaacctgactcctattacgagacattctctattcccaagaaaaatggggaccttcgggaaatcgaggcaccccagagggagctgaaacgcttacagaagagactcgcgaacgagctgactgcctatcagcattacatgtacaagcagtttgagattaagaccaatattgcccacgcttttatcaaaggccgaagcattatcacaaacgctcgcatacacaagaataagaagtacatcatcaacatcgatcttaaagacttcttccacacaatccacttcggaagagtaaagggtttttttgagaagaacgagtactataagctacctagtgatgtggccacaattatcgcacagctgacatgctatcaagggcgccttccccaaggcgctcctacaagcccagtgatatctaacctgatatgccagatcttcgactatcgggtactgggtattgctaagaaataccggttggattatactagatatgcagacgacctaacatttagcactaatagaagcgaattctggaatgaataccaggcctttctgagcgaactcgccaaggagataaagaagaacggattcgctattaacgatgccaagacccgtatagtgaaacaggagtctaagcaaactgtcactgggcttactgttaataagaagattaatgtggaccgaaccttctaccgcaatactaaagcaatgaccaactgtttgtacaaaatcggatcattcactatcgatggacagcccgggacactcaacatgctggaggggaggtattcatttatcgaccagatcacgaggtataataacaagattgaaggcaaaaagccagagagtcggaagctaaatgctagagaaaaagattaccagaagttcctcttttacaagtactttttcgcaaacgagaggccgctgattgtgacggagggcaaaaccgatatcctgtatatcaaagccgcattgaagaaattgtatcgcaaatacccacagctggttatacgtaatgccaatggaaacttcgagtaccgtgtgagctttttccgcaggacttcgcggatcagatatttctttcagataagtcaagacggagccgacgctatcaccaccatctatcagctgtacgctggtaaagacgatgagcgaaactactataaaaaaattgccaaccagaccatgagaaatgccgtcatatttctgtttgacaatgaaacgcagaacaagaaaccactcaaaaagttcatagatgttgccaagttgaacgatacccaaaaagacaaccttaggacgaagttgtacaccaggctcttagataattccaaactcttcctggcgacaacccctctgcctgcgggcaatcgaaaatccgagattgaagacttattcacagaagcaacccggaacaccattattggcggcaagcggttttcagccaacgatcagcatgataccgcgcaattctatgggaagaagattttttccgaattcatctacgaccactacgacgccatcgatttttccggctttatccccctgatcgacgctattaataacgctatccagtctaaatga

SEQ ID NO: 8536 - RNA, 1269 nt, synthetic construct
  source 1..1269: mol_type = other RNA
atggaaatccaaggcctccagtcacgacggcagatcgctgaactcctgggtgtacctttgaaagaactgacttacatcctgtacgtccaaaagccagagactttctaccgtttgtttgagatacccaagaaaaatggcgggttcaggaagattgacgcccctgaggggcctctgatttatatacagcggatgcttgctcgaagattaacagcatggatcctcgagaaaaaattaaatacctcagtcagccacgccttcaagaaggggcgcagcattattacaaacgctcgggcacaccggaatcggcgcttcgtgctgtccgtcgactttcgcgacttctttaacaacattcatttcggaaggatcgaagggtttttccgcaaaaacaagtatttcggcttttcccgagaggcggccattgtgattgcccaactgacctgctaccacgggagccttccccaggatgcccctacttctcgggtgttgtctaacttgatctgtcagattatggatagaagaatactagaactggcatcgaaatatagagtgcattacagcaggtatgccgatgatctaacctttagtaccaactgggctaattttggaaacgagtccaaaaatttcctctcagagctcaccgttgttataggacagtcgggattccaaattaatgagagcaagactagactgcagtacaaggatagcaggcaggaggttacggaacttatcgtgaacgacaaggtcggtgtgccaaagcggtttgttaaaaacacacgagccatggcgaatacactctacaagaccggtcagtttgagattaacggcaaacagggctctataaaccagctggagggccgctttacctttatcaatcagatcgattggtataatcacagggtaatcgacggcgtggaaccaacacattccagcacaagagcaaggctcatgaagctcaatagtcgtgaacgccagtacagacagttcctggtgtataagtattttatttccaactcccagccacttatcgtgactgagggaaaaaccgatatcccctatatcaagagtgctctgagatcactgaaccagcaatttcccgatcttgtcacgttcaatgacgagggcgaatacagtctaaaaatttctttcttcgagcaagggatcaggctggaccatggaaggtctggtaacaagaagaatcagcgtttgccgtacttcttaggcctgaaaatggacggggccgacgaactgcagcacatctacgactattga

SEQ ID NO: 8537 - RNA, 1755 nt, synthetic construct
  source 1..1755: mol_type = other RNA
atggagaagtttagcgacatcatcacgagaaagcaactcgcacaattcctggaagtgaaattatcccagctgacctatattttgtataaacaggggatagacagcaactatcactctttctccattctaaaaagggatggcggcttccgacggatcgatgcccccaagaatgtactcttgaagattcaaatgagtctagttaacaggttatgggaagtccaggagtctatttgggagaataaaggctaccgctctaagacagcacacgctttcatcaaaggcaggggaattatcactaatgccaagatacatcggaaaaagaggttcgtcattaatctcgatctggagaatttttttggttcgattcacttcggacgagtgaagggcttctttcagaagaacaagtacttcaatatgctgccagagattgcgaccatcattgctcaactgacctgctataaaggatgccttccccaaggggcaccttccagcccaatcatttctaatctgatatgtcagatcctcgatttgagactgcggaaaatcgctaaaaagtacaggcttgattacaccagatatgccgatgacctcacatttagtacaaacgccgattttatcagcgtagagaaggactttttcagcgagattaaggtggaaatagaacgggccggatttcatatgaatgacagaaaaaccaggattcaggattatcatcatcggcagaatgtcactggactcgttgttaacgaaaaactgaacgtgaattcagactactgtcgccagacaagggccatggcacacaatctatacaccaagggtacttttaccatcggttcaattgagggtacgatggaccagatcgaaggccgctttagttttattaaccagcttgactggtataacaaccaggccaataacaaggctaacaagaagaaaaacaactttctgggtcgtgtagacgcctttaacaaacgcgagaaagagtatatgaagttccttttctacaagtacttctggcagaataagaaacctttaatcataactgagggcaaaactgatgtccgataccttaaatctgctttaaaatctctgagcctggagtatcctgaacttgtgaacgtggaggacgatgggggggtgaaatttctggtgtcattcttgaacaaaactaggagactggagtacttcctcgggatcaaccgggacgggggagatacgctcacaaatctgtactccaactacttcgacattaagagaaacgaacgcgaagcaggcacaaatgggcgaaacaacaagagtaagttcgggtacatcgagtacttcaagaaatatagctcaaccgagcggaaggcccccatcatactctttttcgataatgagctgagcattcgtaacaaaccactcaacaagttctccgtgaagctgaattcagaagagaagaatcggttgaagactaatggctacatccagttgaattctgacatgaagctgtttgtgatgaccatgaaactggctgaaaatcaaaccagttgcgagatagaagacctgttcgatgagagaacactgtgccacgaggacgcgaaaggaagatccttttcccgtgaggaccgcccggatctaaacgaattttacggcaaggactatttctcgaagtatgtctgttccaactataaacagatcaacttcgagaagttcaaggaagtttttaatacaatccgcagcatcatggatgaatgtaattaccaggaagaatga

SEQ ID NO: 8538 - RNA, 3030 nt, synthetic construct
  source 1..3030: mol_type = other RNA
atgaataagttttgtgagattggcactcgcaaggagtttgccgagtttattggagtatccctgaagaagctgacttacctgttatacgtgaaacacgtggataactattaccactctttcgaaatccctaagagatctggtgggagtcgacagatagacgctccaattggagacttgaaaaaaatccaatactccttagctgacaagttatgggaacaccagaagatagtgtggagggagaataacatttacccgaaagtgtctcacgcatttattaaaggaaagtcgatcatcacgaatgccaaagtccacaggaacaggaggttcgtgatcaatctggacctggaggatttcttcggaggattccatttcgggcgcgtgaggggtttctttcagaagaatcggtatttcagcctgccgatagagatagccacaattattagccaactcacatgctataaggggcacctgcctcaaggagcccccacttctccaattatcaccaattttctctgtcaaacacttgattatcggctcataaagctgagcaaaaagtacggcttgaactacaccagatatgccgatgacctgaccttctctacaaataggaactttgtggatattcagggaaacgtgctactggaaattgaacaggaggttggaaagtttggatttcacctgaatcgtaaaaaaactcgcatccagttcaatgacagtcgacaagtcgtcacgggcttggtggtgaataagaagattaacgtggatcgcaattactatagagaaacacgcgccatggccgacaagctgtataaaacgggttgcttttcgataaacgacagttacggggacatcaagcagctggagggacgtttcagttacatcaatcagctaaactggtacaataaccagttggacgatgaaaaacataacctatacagccttaaagggagggaaaaacagtaccagaagttcctgttctacaagtatttttgggggaacgaaaaaccactaatcattacagagggcaagacggacattatctaccttaaaagcgcgttgaagaagctttacaagcagtaccccaacctggtgaataaaaaggatgacgtctttcagttcaacctctctttcttgaatagaaccaagcgcctcaaatatttcttcggaattgagaaggatggcgctgataccatggccggcgtatacaataagttttggtcctcagacaaaaacaagaacaccatcgattacatcaattactttcggacctatgcgaagcagaagactaataaacccataattctgctcttcgacaacgagttcaaaaagggaaagccactgtataaattcgccgagagtactggtctgaaaaatcggatccaaggtatgctcaaagataaaaagcgacggctgttgtacataaagttgagagaagactacaacctgtttctgctgaccatgaagctgcctgaggggaaagaagagtgcgagatcgaggatctcttcgacgagaagaccttaggtcacgaggacaagaatggcaaaaacttctcacggggttcaaagttcgataattccaaatactatggcaaggcctgcttttcccagtatatcctccagaactaccagaacatcaatttcgacaagtttcaaaacatgctggagtctatccagcaaatcgtgtccggctatagagtggctatcagggatctgggcgtccacggggaggggataggttcagtggatggctttacaatctttgttccgggcgctttaccaggcgaaaccgtgactgcagaaattactctgctgaagaaaagctacgccctgggggaactcttatccatagaatgggagagccctttccgcgtggtccctaaatgtccagtctatgagaactgtggcggctgccagctcagccacttgacctatgaaggccagttagacatgaagtaccggagagtgaaggatgtgatcgaaagaattgcaggagagagcggggatttggtgcgccccgtactgccagcagcacatccattcgcctacagaaataagatggcagtgcctgccggccttgtgaaaggcaaggctgccctcggctgctatagacaaggcagtcatgacatcataccagtttcctcttgtgctatccagaaagaggagaacaataggcttctgcagtttgcgagacgatttattgaaaagtaccgcatctcagtgtataacgagaaaacacggaaaggtaatctgagacatgtcatgggccgtgtcggggacgacggcaaagtgatggcggtcttggttactgcctccgaaactcttcccgaagaaaagaggtggatcgaggagattaaaaaggaactcccggaagtagtatccctgtggcacaacatccaaccaaagcctgggaatacgattctcggagccaagattaggcatctctggggtcgcgagacactcacagcctcactttgcggcctgcggtttgaagtttccccctacagctttttccaggtgcataaagagcaggctgaggtgctctatgagaaggcactggagtacgcagacctcaaaggaggagagactgttatcgatgcatattgtgggacaggcacaatcagtctttgcttggcgaaaaaagcaaaacgagtaatcgggatcgaaatcgtgaaacctgctattgaagatgctaagaagaacgctaaaaagaaccacatggagaacaccgaattctatgctgctgacgccggaaagctaatgcctcagctgtatcgaaaagggcttgtgcccgatgttattgttatggatcccgttcgggcgggttgcagcggagaggtacttaaggccgccgccggtatgaagcccaaaaggattgtttatgtctcttgtaaccccgcaaccttcgcacgggacgctaagattctaaaaagcgaggggtatgagataaagaaagttcagcccgtcgacatgtttcctcagaccatgcatgtcgaaaccgtcgccctgatgatccgtgggaagtcaaagtga

SEQ ID NO: 8539 - RNA, 1701 nt, synthetic construct
  source 1..1701: mol_type = other RNA
atggaatacactaagatcaagaaccggagagatctctcactagcccttggtgtcccgccatctgaactgacctacgtgctttacaaaaagggggtggaccaatattactcttctttcctgatccctaaaaagagcgggggtaatagggaaattgatgcctccaaaggggccctcaaatacattcagagaagactggtggggctgctgtgggaaaggcagaatactgtatggtcagaggagacaatcttacccaatattgcccacgcgttccagaaaaagaagagcattatgaccaacgccaatgtgcacaagaacaagaggtacgtcgtcaacttagatcttgaaaacttttttggcagcatacacttcggcagagtgaaagggtttttcgctaagaatcgctatttttgtgttggtgaagaagtggcgacggtgattgcgcagcttgtgtgttacaagggccggcttttacagggagcacccagtagcccaatcattaccaacttaatatgtggcatcctggatatccgactgctgaaactagcaaagaagtataggctggattatactcggtatgccgacgacatgactttttctacgaacagtgttacagccgaggactaccttaacgattttattgccgatttggctatagaggtagagcacgccggttttaagatcaacgagcgcaaaaccagagtgatctatcgcaactcccgacaggaggtgaccggactggtggttaataaacgaatcagcgttaagagagattattacaagctgacccgcgccatggcagcaaacctgtataaggagaatgagtttaccatcggagggacacgcggtaccataacacaactcgagggcaggtttgctttcataaaccagatcgataagtggaatcggaagatgggcgtcctcagcaaggaactgacttcacgggaggagcagtacaagaaatttctcgtctacaagtacttcttcgctacagaaaggccggtcattatcactgagggaaagacggacgttcagtacttgaaagccgctttgaaagctaacgcagaaaaatatcccgacctcgtgtctaaaaccgacaacgacaagttcaagttcaagatatcctttttcaaccgcaccaagcgtattaagcacttctttggatcggccgaagacggagcggacgcaattaaaccttttgtgctgatgtatggcagtagtaaagatgctatgatcgagtggtttaaacaattcacaggcaataatccatgcaaaccagtaatcctaatctttgacaatgaggactcaaaagaaaagcctttgtccaagatgattgggacactcctgaatgacaaagtgttgcgtaataaacggaaggcaaatgatatgagatgcgagctcaacgagcatgggaaaatgcatgtgaaagacaatctgttcttcgctaccacacctaagaacgccaacaaagactgcgaaattgaaaatctgttcaacaaaaacgagctcgatggaattaggattaatggccgtacttatcatgagggcttcgagaaatccgcaggctgggatcccgctaaacacttctcgaagaatgtactgagcctgtacgttctcaaggactacaagaacatcaacttcgaaggatttatccccttgctggatgccataaattccatcgtcaagaatgacgatcattattga

SEQ ID NO: 8540 - RNA, 1680 nt, synthetic construct
  source 1..1680: mol_type = other RNA
atgaatctcaataaaatcaatgacctgaaggacctggcttcatatatcggggttaaaccatcttatctggcataccatatctatcataacccgcgcattaaacttaaccagcactataccgaattcgagatctctaagtcctctgggggttctaggattattgcaactcctaacaagaacctgaaaatcatacagaagaaactagcctttaagctcaatcaacacctaaagagcttgggcttttatcgcaataacaagatactgcacgcgtttataaaagagaataagccgtaccaaaggggctttataagcaactcgaaaattcatcgcaagaagaactacatacttaatgtggaccttgaaaatttcttcgagtcaatacactttggccgggttagaggttacttccagaaagatgataagttcaacttcaacaaagacgtagccactatcatcgctcagatttgcacatataaaggttctctgccccagggagctccaacctcccccatcattagcaatcttattggaaatctgctggattccaaaatcctgaagctctcaaagaagtacaaattgcactacactcgatatgccgatgacatgacctttagcacgaatgattacaaattcgtgcgaaacatcaatcagttcaacaaggagctggaaaacatcattagcagcgccggctttaagattaatactagtaagactcggttgcaatataggacaagccgtcagcaggtcaccggcattgtggttaatgaaaagctgaatatcccccgtgagtactataagaaaacaagagctatggcccataacctttataaaaacgacgagtttgagattaacggcgaaaaatctacgctcaatcaactggaggggcggttcagttttatcaaccagctggaatggtacaacaacaagaacaacaagaacaagaagaaaccctatctgaaattatcctcaaaagaaaccgaatatcagaggttcatcttctacaagtacttcataaagaacgatttggcgacaatcatcacagaaggcaaaaccgacgtcctctacatcaaggccgcactgaaaaaaacatggaaagagtaccctaagttgattactaaggataacaatgggaacttcctgtttaagattaagttcctcaataagaccaagcggctcaattactttttggggattggcattgatggaggtgattccttaataaatgtgtacaaccactacaaggggaaagataatgtcaatgacctgcgcaagtactttaacaagttcaactgtaactactccaatcctattatcatgctcctagataatgagattgatgtgaaaggaaaacctctgaacaagatgatcaatatcatcaagtttgagaaggacgaattagaaagaaatttgtatgtcaacctggtagagaatctttatctctcgacaatcccaaagactaaagaaaagaacgagagtgaaattgaggacttatttaatgaagagacgctgaataaaggaatagagggcagacccttcaccaagaaagacaattacaacaaaaaggagtactgcggaaaggacgagttctccaaatacgtgtataacaactataccaacatcgacttcaagaaatttcatccacttctgaaggcactcagtgagatcgtgaataaaaaatga

SEQ ID NO: 8541 - RNA, 1677 nt, synthetic construct
  source 1..1677: mol_type = other RNA
atgaatttcaatcaaataaacgacaggaaggacttagccaaatttctaggggtgaagccatcattccttacgtatcacatatatcacaatccacagatcaagctgaatcagcattacacagaattcgaaatccctaagagatcaggtgggattagagtgattgccgccccgaacaagaagctgaagatcatccagaaaaaattggctttccagctcaacgagcatcttataagtctgggattttatcgtaagaacaaatctatacacgccttcattaaggagaataagagtaacaaaagggggataatatcgaatagcaaaatccaccgcaataaaaaatacgtcttcaacatcgacttggagaattttttcgagtctatccattttggccgcgttaaagggtattttcagaacgacgataagttcaacctgagcaaggatatagcaattattctagcacaaatctgcacctataagggctccttaccccagggagcaccaacttcccccatcatctcaaatctgatcggaaatatccttgacagcaaaattctgaagctcactaagaaatacaagcttcactatacgagatatgcagatgatatgacattttccaccaatgactacaaattcctggaaaatatggccggttttaaccgtgaactggagaatatcatcgaactgagtggctttaagattaatacctccaagacccggctccagtaccgaacaagccgacagcaggtcacaggactcgtagtgaatgacaaggtgaacatccccagagattattacaaaaaaactagggcgatggcgaataatctgtataagaacggaaaattcgagatcgaaggaaaagaggctactctgaatcagctcgaaggtaggttttcgtttattaatcagttggaatggtacaacaacaagaaattcaagaacaagaagaagcctcacatgaagctgagcggcaaagaaatcgaatatcagcgcttcatcttttacaagtacttcatcaagaacgagttcttggtaattattaccgaggggaagactgatcctctgtacatcaaagccgctctcaaaaaatattggaaatcctatccccagtttattatgaaagactctgatggccattttctgtttaagatcaagttcctcaacaaaaccaaacggttgaactacttcttcggtataaataaggatggcgccgattctctcattaacctttacaaccattacaaaggaagcaatggggtcaataatctcagtgactacttcaagaagtttaactgcaaatactctaaccccttgattatgctgttcgacaatgagctgaatattaaggggaagcctctcaagaaattccacaatcacattcagtttaacgaacctgagctgcaaaacaatttgtatgtgaatctagtggagaacctgtatatcgttacaaccccattaatcgacaaaaagaaagagtcagagattgaggatctgcttccccaaaaaattcttgatgagggcattgagggccggagctttacaaaccaagaaaactacaacaagaacaagcattgcggcaaagacgaattctccaagtatatctacaacaactacaacgagataaactttgagaacttcattccgttactggacgctctgtgtaagatctgtaatgattga

SEQ ID NO: 8542 - RNA, 1677 nt, synthetic construct
  source 1..1677: mol_type = other RNA
atgactaactttaaagacattaagactcggaatgaattggcagaatttattgggattccaataaggcacttgactaatgtgctctacaagataaatgtcgacaacatgtattcttcctttaagatcccaaaaaagtcaggcggtgaaagggtaatccagagtccaaataaggacctgaaaaacatccaggtgaagatcgctcagagtcttgacgtgcacatcaccaagcagcagaaatacgacaataatatttcacacgcgtttaagaagaacaaagggatcattacgaattctaaagtgcaccgaaataaacggattgttgtgaatatggacctggagaattttttcgaatctatacactttggacgcgtccggggctacttcaacaagaatgatatgtttaagctgccaattgaggtggccaccatactggctcagttaacatgctacaaaggcagcctacctcagggcgggtcaaccagcccgattataagcaatctgatatgtgaggtcctggactatcgaatcttgtcccttgccaaaaagtacaaactgaagtacactcgctacgcggatgaccttaccttctcaacgaataacaatgaattcgtgaacctatatagccagtttagcgatgaaatttcaaaggtgattctgaagtcgggattcagaatcaaccagaaaaagactagactgcaattttggaatagccgtcaaacagttacagggctcgtcgtgaataaaaagatcaacgttcctcgggagtattataagaatactcgcgcaatggctaaccagctctataagaccggagagtatgtaattgatggtgatctgggcacaattggcaggcttgagggccgattcacatttattgatcagctgaccaagtacaacaattctttggatgatgacatcaaacataacaggtttcatctctctggaagggaagtcgagtaccaaaagtttctgttctacaagtacttcttcagtaacagtaaaccgttacttatcactgagggcaagacagacgttagatatctgaaagctgcccttaaaaagcattccctggagtatcccgaactggttgagaaagacaccaacgacaactttaatttcaagataaccttcctcaagaagaccaaaagaatgaaatacttcttcggtatcgtgcccgatggagcctccgccctcaataacgtatacaatttctataaaggggtcaacttagatcccaaccattacgagcacttcatgaagatcagcgaaaatagacctacaaaccctgtggtgttactgttcgataatgagattaccaaggaaaaacctctgaacaagttcatcaaccacgcaaagatcaacaacaagaagtctatcatcaaacaaaacctgaccctcaatgtgatcgggaacctgcacttacttacaactcccttgatggataatcgtctggaaggcgatattgaggatttgttcaagacaagtgagctcgcaatcgtaatcaaaggtcgcaaattcgacaagacggaaaaactagataaatccctctattacggaaaagaccagttttcgaagtatgtcctgctaaactacgaggagattgactttgacaactttaaacccctcttggacaagctctccgacctgatccggaaccattccgtggccagcaagtga

SEQ ID NO: 8543 - RNA, 1674 nt, synthetic construct
  source 1..1674: mol_type = other RNA
atgaaaaagttcaacgagattcagtcccgaaatgattttgcggatctgctgaaaataccattgagcagtctcacctacctgctgtatgtcctcaagccagataactgctacaacgtatttagcatacctaaaagatctggtggcgagcgcgagatttcagcgccaaataagcggcttaagagcgtccagacagccgtcgcaatggaactttggcgctatatcaagaatatacccgattttaaccgatccgcagtgtctcatgcctttactaaaaagaaaggcattatcaccaacgctgcaattcaccggaacaagagaatagtggtcagtttcgacctgaatgactttttccccagtatacactttggaagagtggtagggttcttcgaaaaaaatagacacttcaaactgccgcatgctgtctccttgattattgctcagattgcgtgccataacggatccctgccccagggttcaccttgtagtccaatcatctccaatctgatctgtcaaatccttgattaccggattttgagactggcaaagaagtataaattggactacaccaggtacgcagacgacttaacatttagcactaactggaaggggtttgttgacgctgagacgtgcttctattccgatctctctgtgttaatatctaaagccggcttcacaattaatgaagctaaaacacgaaccgtgtttaggaattcccgtcaaactgttactgggattgtggtgaacaagaagctcaacatcaatcgggaatactacaaggaaactaaagccatggcgcataacctatatagcaaagggtcgtttgtgattaacggtaaggagggtaccatcaatcagctggagggcaggtttgcctttatagatcaaatcgagctctacaataacagaattgacgggaatcgccacaattatcgcaatctgtgcgggcgggaattagaataccgtaaattcctcttctacaagtatttttacgctgctgacaaaccgacactgatcactgagggcaaaagcgatgagttgtatatcaaggccgccctaaggaagatgttcctgatgtacccttcccttatcaacaagaaggcagatggaagatttgagtataaggttaggttccttaaacgttcgaaaaggcttcagtatttctttggattctctcctacaggcgctgacgccatgaccgaactcaggaagtgtttcatcgacgagtcaaactctacaagcctgttctcattcttcaaccgcatttgtgcctcaggacagatccaccccgtgattttcatctttgataatgagactgagcgggacaagccactcaagaagtttttaaatcagaaacctgccaccagtgaagttgacaaagagttcctccagaataacctatacctgaacataattaagggctcaaagctcttcattatcaccaacaagctggtgagtggaaaaagcgaggccgaaatcgaagatctgttttcagaaaataccctgagcaccgaaatcgggggcaaatctttctgccgcaaggacaattttgatgagagcaagttttatggcaaggccttcttctccaaatacatctacaaaaactacgagtccatcgacttttctaatttcatccccatgttggacgcactgaacaacatcattacgacgtattga

SEQ ID NO: 8544 - RNA, 1683 nt, synthetic construct
  source 1..1683: mol_type = other RNA
atggagcagggctttaataccatctcaaatcgaaacgagttagcggattacctggggattagtagatcatccttgacgtatgtgctgtatgtcaaggggattgacagtttttacgtttcctttgatgtgcccaaaaaaagcggtggcacacggactatccatgctccgcagggcacactgaaaggcatccagaagatcctgctcatcaagctctataattaccggtataccatcaacgaaaatgagaacattaagctgaacatttcccatgcctttgagaacaagaagtctataataacgaacgcccgtatccacaaaaacaagcgcttcattattaacttcgacctaaaagacttcttcgaatcgttccattttggaagggtgaaggggtacttcgaaaagaataagtatttctgcatgccggaagacgtggctagaattattgcccaactgacctgttattccggcacactgccacaaggagctcctacctcgcctatcatcaccaatttgatctgtcagtctctggattacaagatacttagtttagccaaaaagcaccacctggactacactagatatgctgacgacctgacattttccactaacgacaagaaaatcttagaaaactacgacacgttttacaaatcattggtgaacattatccacgggtctggctttgagattaatgagaagaagactcgctttgtgtacaaacatagcaaacaaattgtgactggactcgttgtgaataagaaagtaaacgtcgactccacttattatcgtaatgtgagatcaatggcacaccacctctatactgagggaaccttttgggacaatgggaatgaatgtaccataaatcagctagagggaaaactgtctttcattaaccagattgacaagtacaacaacaaactgtgcgaggaaaagaaaaacctcgcaaatcttaacaggcgggaacgcgaataccagcgcttccttttttacaaaaacttctatggcaaccctcagcccgtaatcataacagaagggaagaccgacatcctgtacataaaagccgctcttaggaaatactatcttgattacccagaattgatcgaaaagagtaactctggccaatttcattacaagctgacattctttcgacggagcagcatcaagcaattcttctttggaatgagctatgacggagccgacgcaattaagaagatatacaacttcttcaccgataatgatagcggcaggtttccaaattactatgagaagttcaatcagatcagtgcaattaagacctcatcccccattatccttctcttcgataatgagctgaacaataagaataagcccatcaaaaacttctgcaattatgtcggtctgaaacctgagactgtcgattgcatcaagaatggtgggtttatcccaatcgtcgacaacaaattatttctgctcacacaccagctagttaatgatctcgcggaatgtgagatagaggacctgtttgatgagatcacattgaaccataccataaatggcaagaccttttcaaggcagagcgatttcgatattgataagcactatggtaaagagatcttctccaaatacatcatctctcactacgagagcattgatttcagcaacttcaaacccctgctcaactctattaatcagttgattgcccattga

SEQ ID NO: 8545 - RNA, 1443 nt, synthetic construct
  source 1..1443: mol_type = other RNA
atgaagaaaagccccttctaccagattagcacgcggcaagaactcgccgatgccctcaatatgagactgaaaagcttgtcatatgttctgtataagctcgatccgcagtctttgtacactatattctcgatctcaaagaaatccggcgggaaacgcgagatcactgctccaaagaaacctctggcaaacatacagtccaagattgcgaacgtgctgatgttgcagcctgaaaattctgcactgagatccaaggcctcccacgggtttatcaagaacaaatccatcctgacaaacgctactgtgcatcgcaataagaattacgttttgaacaccgatatccaggatttttttccatctttcagtttcggacgggttctgggctttttcaagaagaacaacgcattcatgatggaccataaagtggccgtagccctgaccaatctgtgctgttataaaaagaagttacctcaaggtgctcccagttcaccccctattactaacttgattttccacattgtcgactttaagattatcaaactagccaggaaatacaatctcgactacacgcgatacgttgatgacttgaccttctcaactaacgaaaagagcttcccgaaagtcagccagaactttctcaacgaacttaacgctctgattacccatgagggctttaaactcaatgaggacaaaacacacctagagtacaagaatagtcgtcaagaggtcactggggtgattgtaaacaagaagcttaatgtgcacaaggagttttataagaacaccagggccatggccgacaacctgtataaaaacacagaattcaccattgatggcaaattaggaaccatcaatcaattagatgggagatttaactacatcaatcagctggtgcgatacaataaaaagtccatcaaacggaaggtggcgtataaaacaaagtataacgtcgagaagaaggactttaaacatcaaagtcgcttcattcttttctccggaaaagagcagcagtacaggaagttcctcttttatgagtatttcatctacggtaacagctcaattattctgacagaaggtaagaccgacgtctcttacataaagctagcacttagagtgtacaaacaggagtatccccagcttatcactagtcacggtaagaagaccgaatattccgtgtctttcctgaaacacacccagaatacatcgaccaaagggcagaaaaagggcaaaaaaaataaccagatgagccataggatcccatattttatcggcatctctgaagatggcggaacaagcatcgacaatttcctcaattactatagcgagatctctacgacaaacctgaatatgtaccctaattacccaaagtactttatttcagacctgggaaagctgcccgataagaaagtgataatactccttgataaggctgactgcaagatatga

SEQ ID NO: 8546 - RNA, 1119 nt, synthetic construct
  source 1..1119: mol_type = other RNA
atggaaaagagccctttttatcagatctcaacacgacgcgagttagcgtctgtgctgaacatgcagttgaaggcccttagttatgtcctttacaagttaaacccacagaatctctataccagcttttcaatccctaaaaaaagtggcggggtcagaaatattgtggccccgcagaaacccctggccaatattcagaataagattgccaacgtgctcatgctgcaacccgaaaataaagccagcgggtcgaaggcaagccacgggtttataaaaaacaagagtatcctgaccaacgcgaaagttcaccggaacaagaagtatgtcttgaatacggatattcaggacttttttccatccttctcctttggaagagtgctgggattcttcgagaagaataacgctttcatgatggatcacaagattgccgtggctcttaccaacctctgctgttataaacagaaactgccccaaggagctccttcctctcccccaataactaatctgatcttccatatagtcgacttcaaaatcatcaaactcgcccggaagtataagttgacatacactcgatatgttgacgatctaacattttccaccaataatcactcctttctgaagacctaccatgactttctaactgagttaaacgctctcatcacacacgagggcttcaacttgaataacaacaaaacccatctggaattcaaaaattctcgccaggaggtaactggcattattgtgaacaagaagctgaatgtgcacaaggagttctataggaagacaagagccatggcagataacctctataaaaacaacaagttcgtagtggacaatgctgaaggtcggatccaacaactcgacggtcgctttaactacattaatcagcttgtgaggtacaataagaaagtcaagaaaaggggcgcaccttacaagaccaaatatacacatagcagcgaatcattttctaagctggataggttcctttcttttacgggcaaggagcagcagtaccgtaagttcctgttctacaaatacttcgtttacggggattcaagtataatcctgaccgagggaaagactgacgtttcctacatcaagctggcattgaaaaaatactga

SEQ ID NO: 8547 - RNA, 2004 nt, synthetic construct
  source 1..2004: mol_type = other RNA
atggaaatgatgatgcagatgaataaaagcgccttcttcaaaatctcaactaggaaagaattggccaacgccctggatatcagactgaagacactgacttatatcctttataagaagaagccccaaacactgtacacaaacttttccatcccaaaaaaatctggaggtacacgtgacattgtggcccccgagaaacagttggccaatatccagatcaagattgcacagatcttaatgagccagccagaaaacgactcttcccattcgaaggctagccatgggtttataaaaaatcgcagcattctcaccaacgctcagatccacaggaacaaaaaatatgtcctgaacaccgatataaaggattttttccctagtttcagctttgggagagtgctgggcttttttgagaaaaataacgcgttcaagatggagcacaaagtcgcagtcgccttaacaaatctctgttgttacaaccagtctttaccgcagggagcgccatcctctccgcccattactaacctgattttccacatcattgatttccggattataaagttggctaaaaagtaccacctcgactatacgaggtatgttgatgatcttaccttcagtacaaacgaaaatagttttccagtgacctataagaagtttctgatcgatcttaacaacttgatcgaccacgcaggttttagtctcaaccaggataagacccatctcgctttcaagaatagccgccaggaagtaaccggaattattgttaacgagaagctcaatgtgcataatgaattctataagtccacacgggccatggccgacaagctgtacaaaaccaactctttttcaattgatggcactctgggcaatatcaggcagttggatgggcgctttacctatataaatcagctggtgaggtataacaagcaacgaaagttaatccggtatagaaccaaatatagcacacctcacaacgaaaaggagactaaaaacaccataagtaacaaggacagatatcgcttcttcaccggcaaagagcagcagtacaggaagtttagcttctacgagtactttgtatacgggaacaattccattattctcactgagggaaagacggacatcacttacattaaagtcgcacttaagaagtacgctaaaaattatccagacctaatcaaactccaaggaaacaaatacgactttctgattagcttcctcaatcatcaaaagaataaggagaagagaagcaaaaacttcaagcgtaagaaaaccaagatactggcgaatcagatgtctcatcggattcctttctttctggggatttcagaggatggcggcaccacgtactcagattttctatactactacgcagaaatgactattgagaaagagtcgatttcttacaacatgcaacgatcatatcccaattaccctaagtatttcatctccgacctgaacaagctgtacaagaaaaaggtgatcattctgctggacaatgaagggtctaaccacccccttgaccacttcatcaagacatgcgccaagctgaaaatcaagaaaaaagaggacatagagaacgattttaagaataaaggctactcacacctcaaatataatctattcctgttgactatccccaagaagaatacatctaattcccagaattgcgccatcgaatcccttctaaacaaagacgaaatcgaaaagctgaacctgaagggtaagagttttagttccaagaacaatgagacttccaaaaactcattcggcaaacaagctcttgtgaccaaaatcaagtccgcacctacaaattttgacctctctggcttccgcagtttacttgacttgatcagcaaaataaacagcctccagccaataggtaatgagcagtacaaatacaagaagaagaaagttgagacgaataaggaggtgtatatccgaaattcactgggattccggattcctatagaatatcaaagcatcacccagtacaaagatttcgtcaaatga

SEQ ID NO: 8548 - RNA, 1875 nt, synthetic construct
  source 1..1875: mol_type = other RNA
atgtccgatcttatcctgttcctgtatagcggaggcatctttttgtttaaagacgtcaaaagcgtcgaatctttaagccgatacattggcgtgagcgtgaaactcatcaatttcgtcgtgtactttaagggcgtcgactccttttatgaggagttctccctccccaagaagtctggagggtcaagatttatttcatgtcccaaaggtcccctcaaaaagcttcagaagaaattgcagaagaaactgtcggaggagtacgataataagtacggctcttttaatgttagccaagctttcatcaagaaacggaacattatgagcaacgccaaagtgcatcgtaacaaaaagttcatcctgaacttagacatagaggatttcttcgacgaatttaactttgggagagtttacggctatcttcagaagagcaatgacttcaaaatgaataagcagctgagtgtcatcttgtcaaaaatcttcacctataagaacaagctgcctcaggggtcaccatcatccccagtcctgacaaatttcatctttaggatcgttgacttcaagattctgaagctgagcaagaaatacaagctggattacacaagatatgctgatgatatgactttcagcaccaatgactctaatttcaaataccgttacatcaacttcgtggaagagctgaagttccttctctatcgacagggttttaagattaacaagaagaagacaaggctacagtttagcagttccaaacaggaagtaacagggctcgttgtgaataagaaaattaacgtcagtaggaagtactaccgcgatttgcgcgcccaggccttcaatttgtactccgacggaaaatactttatcgacggcaagaagttcgacaagcttaataaattggaaggaaggtttgcatttgtaaatcaggtgaagcggtacaattttctgattgagtcgcgcaaatacgccagaaagagtaaggagtattcaaacttcatcaagtctactacaaagtataggtatgaaccgtatctcgggggatttgacgaacaataccgcaagttcctcttttacaaatatttcatccacgggtctaaacctctgatttttgtagagggcaagactgacatacggtatattaaggccgcaatgatgatgtattataaccgataccccgaacttattcggaacaataacggaacgttcgagttcaacattgattttttcaagcggggcaacgaggatctcttaaaggagaactataaacggaacgaaatagactactctatcaaagactactatctcggattaagtgatgatggcgctagcgtgatgtcaaagatagtggagtattggggtatcgctctggataaaaagaccaaggagaataagaactactacgactactttgtgaataagcttggtaataagtccaaaaaggtgatcttactgttcgacaatgagtacctggacaaaaaaaataaacctctccgctccttcctgaaccatgtttatggcaataaggccactagtcaatatagaaaactcatctccgaagggaaactggtgatagcagataacttgtatctgataaccctaatcaaggacaaaaactataagaaagagctagagaactacattgacgaccacattaatgacaagaacttcaagggaaacaatgatctctccattgacattgaaaacctgatcgatctgtctacgatcacgataaaccaaaaaacctttaataggaacgcgaataaagattccgataaagaattcgggaaacagaccctgtctaagtacgtatataaacactacaacaccgtgggcctgagtggttttattccactgctagatcagcttaaagaattttgcaagtga

SEQ ID NO: 8549 - RNA, 1602 nt, synthetic construct
  source 1..1602: mol_type = other RNA
atgtcatcaaaatataagggaaatagctcacggtttttcattatgaagaaattcgaggagatcaagaaagtagaagatttagccaaagctctgaacattacgataaacaaactctactacttctctaacaacagcaataaaccaaataagctgtacacccagtttactattactaaaaagctagggggtgaaagaaccattaacgcaccaaagaaagaactcaaaaaagccctgaacaagctgttcattattcttaagaatcgccatctcaattacaccaaagagaagaagataaaagacaagatcagctttggcttcaaaaagaataatggcattatcgacaacgccaaaaatcaccggaataaaaaatatgtgctgaacgtggacatcaagaattttttcgatagtttccacttcggccgaatttgcggcttctttatgaaatccaaggagtttaagatcaactctaagaataacgacacagttaaaaagatcagcatcctcatcagcaatttgttgtgctataaacagtgtctgcctcagggatcaccctgttctcccattctgtccaatctgatctttcggacaattgactacgaaatcctcaaactatctaagaagtacaagcttaagtacacccgctatgctgatgatatgacttttagtacgaacgacaacaactttttgaattcctacgagaacttcatatccgaactaaatgagtgcataaacaaaaacgggttcaaaattaacgacaagaaaacccaaatcgagttttacaaatctagacagagggttacaggcctggtcgtgaatcagaagttaagcgttaggagggaattttataaaaacacgaagagcatggcgttaaatttttaccgcaacgggtactttaaaatcaacgataaaatcgggaagctgaatcagctggagggaaggttctcctttataaaccagattgacaagttcaacaacatcgagtcgaataagtatgagaacaagaacaaggatttctattacgtgctcaattcacgtgaaaagcagtataaactgttcctgttttacaagttcttctacaatcccagtaaacctatcattatcaccgagggaaaaactgacatactctacattaaagcagccctcaagaaattctatgagaagtatccgaatatcatccaaaagaaccttaatggtaccttttcctacaaagtgaaatttcttgctaaggagaataagcagttctctaattacaaagaacgactggacaagaacttccaacaaattgagattatcttgaaggacgtcattgaaaacatagacgacaaaaaactggaagacattatacagtatgtcatagatagcatagagaagatcaaggaaatcttcaagagtaagattgtagcaaacaaaacgagttttgagaagatcaagcttaagctgaactatttttgggaagagattgtgaataagaagacttccaaagagttgaatgaaatctggaatgagatcatcaacatttacaagaacatcaagatcaccaatcttaagaaagtgaacaagttcctgtatttcttcaagtattggttctttagaggtttttga

SEQ ID NO: 8550 - RNA, 1785 nt, synthetic construct
  source 1..1785: mol_type = other RNA
atggactggaacgagattaagtcctgccgagattttgctcggtatctcaatattccatataagcacttaacctacctactctacaacaggaagattgacaaactttatgaatccttcgaaatcccgaaaaagaatggaggtattcgtattattcaggcccccaaaaaagaactgaaggaggtgcagcagcagatcctcaagattctcgagaagcgtgccttatcccttgagaaggagaataaaattagctttcgcttatcacatggcttcatcaagtacaaatcgatcataaccaatgcagagaagcaccggaataagaaaatcatcttgaacatcgacatcgagaattttttcccgtcatttcattttgggagaatcgtcgggttctttgaaaagaacaagaatttcaagctgcccaaagaggtggccatattcctcgcccagttgacaacggtggacggctcccttcctcaaggctctccatgttctccaataataactaatctcatctgccaaatccttgattttaggatcagcaaactggccaaagagtataagctgaactattccagatatgtggatgatatgactttctcaaccaataaagagaactttctggactgttacccagaattcttcagcaagctcagtaatgtgctgattaaagcgggcttcagcattaatgataagaaaaccaggattcacttcaataggaacaagcagatagtaacagggctagtggtgaacaaaaagatcaatgtccagaagaacttctacaaaaatacacgcgcgatggctcacaacttatacaagcagggtacctttttcattgacgaaaaggaagggacaatcaaccaactgttgggtagattcaattttatcgaccagctcgagcggtataataacaagaataagaagcagctgagtttgcagaaaaactacatcgaacagcagaaatacttaaccaaagggcaacaggagattaaaggagattttggctatttgggaaagctgtcttctcgcgagaaagagtaccgcaaattcctgtattactttcacttctttagcagcagcaaacctgtcatagttactgaaggcaagacagactctcggtacttgaaagcagcaatgaagaaatgctttaaggatttccccaatctcattcaaaaaaacgaggatggcaccttcctgtttaaagttaagttccttaagcgaacatctctgctgaaatactacttcaagttttacgaagacggtgctgactcaatgaaaaacctatcgaacttttggataactggcgaagaaaacaaacttttccctaactacaacaagtttttccaggagctgactggaagagttgctagtaatcccatcattttcctttttgacaacgaactatccaacaaaaagaagcccatccgcaacttcataaatcatatcctcaagagcacgcctaatgaggcaggaagtctccggaacgagattagtaatgtcaagtacatcaacatcgtggacaacctgtatatgttgacgcacgcctctctcagcggaaatgaggatgaggaaattgaagatctgtttactaacgatgtactgaatcataggatcaatggcaaatccttttccagagagaacgattatgactttacaaagttctacgggaagaacgacttttccaaatatgtcctgaagaattatcgaagcatagacttcaagaatttcattcccctgctgaataacctgaacaagatcatcctggaatataactcaaagctgaccttctga

SEQ ID NO: 8551 - RNA, 1779 nt, synthetic construct
  source 1..1779: mol_type = other RNA
atgcagtgggatgaaattaaaactcgagaagattttgcgacctttatcggggtgccctataagtatcttacctacctgctctataaccagcgcatcgaaaacttatacattgctttcgagatccctaagaaaagcggtggggttagaataattaattctcccgaagaccgcctgaagaagattctgaagaagattatgaggaaacttgaagaacggatggtttttctggaacaggaagggaaaatctccagcaaagtcgcccacgggttcattaagagcaagaatatcataaccaacgcctcctctcacagaaaccgaaaaattgttctgaacgtggacatcgagaattttttcccaagtttccattttggccgagtcaagggctttttcgagaagaacaaatacttcaaagtcccgaaggaggtagctgtgttcattgcacagttgacatgctacaatggatctctgccacaaggttccccctgtagcccaatcatcaccaacctcatatgtcaaatcctcgatttcaggatcatagagcttgctcagaaatataatcttaagtacacgcggtatgccgatgacatgacttttagtaccaatgatatgcagttcgttgacacatacattcggtttgtagaggaactgggagacttactgacgaggtccggtttttcactgaatgatgagaaaacacacatccagttccaaagagaaaagcaaactgtgaccggtctgaccgtcaacaaaaaagtgaacgtctcccggcatttctataaaaatacaagggccatggtgaatacactctacaaaaaaggagagttcatgattgatggcgaacgtggcaccattaaccagctcttcggccgtttcaacttcattgatcaactcgttaagtataacaaccggatagagagggaggcaatcattcgcaacgattatgtgaaccagcagaaaaaccttatcaagagtgtccctgacgctgagaacaagttcgattacttgaagaagctcagtgcccgggaaagagagtaccgcaaattcctgtactactactattttttctcgagcactgtgccagtaatcgtgacagagggaaaaacagattctagatacatcaaggcagccttaaagaatttatatcggaggtatccgaagctgatcgagcgcgatgagaagggaaagtttgtgttcaagatcaagtttctacgtagaactgcattgctgaagtactactttagattctttgaagacggggcagatgctatgaaaaatctcagcaattgctggtttggcaaaactgacgagaaactgtttcctaattacagcgagcttttcaaggagatcactaataggaaagccttgaaaccagttatttttctgttcgacaatgagttgaagaataataagaagcctatcaggaacttcataaatcacgtatccaataataccatccacgacaataaaaccatcgagaacgaaatccgagagaacaacatatttaacgtgattgacaacctgtatctactaacacatccctcagaaacagaggacgaagagatcgaagatctgtttgacgaccctactctcgattaccgcattgcgggaaaggtgtttaccaaagagtcgaagtttgatgtggacaagtattatggcaagaatgacttttctaactacattctgcagaattactcacagattaacttcaagaacttcacgcccctgttggacaacctcaataagatagtcgacgtgtacgaagccaaatataaatcatga

SEQ ID NO: 8552 - RNA, 1968 nt, synthetic construct
  source 1..1968: mol_type = other RNA
atgaataggctcaaacaggtaaccaataaggatgatttcgcaaaattacttggattcaagaactcgcgttatatcaattatgtcctgtattgcatcgggaccgacaaactgtacaaggaattcgagattccaaagaaaaatggcggtgtcagaataatttgtgcacccaaacccgagcttaaactcctgcaaaagaagcttgcctatgtgctctgggattgttttgtagacgatttaagttccaagagtaaggagaagaattacaaaatcccaatgctgagccatgcattcgagaagaacaaaagcatcattactaatgctcaggcccaccgtaataagaagtatattctcaacgtcgatctgaaggactattttgagacttttaactttgggagagtacgcggatttttcatcaaggataaggattttcaggtgtctccagaagtcgccacagtgatagctcaaatcgcttgctaccaaggcaaattgcctcagggggccccctcatcacctattattactaatctgatcacacggatcctggactatcgcatcgttaaaatagctaagaaataccggtttacctatacacgctacgcagatgacctgacctttagcacgaataggaagctgtattcaaataagctgaaggccacaaaagaactggataaatttcttgaagagctggagaaactcattgtgagttctggatttgaaattaactccaaaaagactaggctgagtgacgcgatgcaacgccaggaggttaccggcttaattgtgaacaagaaactgaacgtcaaacgggaatacatcaaaaacaccagggcgatggcctttaagctttataaggacgaaaagtttgagattgatggtaagcagggcacaatcgagcagctcaccggtcgattcgcttttattttccagatagaccagtacaacaattacctcctctataagaagtcacttgtggaaaattccctgaactcccaaaaaaacctactcggacgaaatttgtccaaaaaaagtgacagcaagtactactggaagtatattttctacaacagggacctcagaaaagaactgttctacaataagcagcataaaacctacaatttgccgaaggaattttatgccattagcaaggaggataagaagaactatatggccttttttgactcaaaggagaaagagtacaagaagttcctattctacaagtatttctacggaaatagcaatcccatcatcgtcccagagggcaagacagatcctagatacattaaagctgcgttaaagaacttgtacctgaagtatccagaactgatcaaaaagtcaggtaacaagttcatctttgagattgatttcctaaagcactccaacacaatagaatatttgtttaacgtgcccgagggcggacctgggttccagtattggtataactacttcagcgacaaaaaagactttcccatgtctgataaagagaaactcctgtacccaaactacatcgagtacttttataatcagactagcgcacaccccaaaaaaccaacgatattcttgttcgacaacgaaccttctggcaatcctctgtacgcctttgtgaattacgcaaaagacctggaaattagctcgtctaatctgaaccagattagagggtccagcttttctaaaatcgtgaagaaaaactccctctacattatggccactcccttaattaaaaattggaatcaggggacgtcttccgacatcgaggacttgatagtttccaatgataagaacatcgagcctatccagaacttcatgaagatcaacaagatagatagtcttaacgtgttggacgtgaagaaacataaagaaatcttcagcaagttcgttcttcggaatttcaacaaattcgacttcaccgctttcatcccgctgctggacggcatacgggacaacatcctagattacaaaatgaagaagtga

SEQ ID NO: 8553 - RNA, 1959 nt, synthetic construct
  source 1..1959: mol_type = other RNA
atgaacaaactcaaacagctggacaacaaggacgattttgctcggctcctgggctttaagaatagctcctacattaactacatcttgtacaacattggaaccgacaatctttaccgcgtgttttctatacccaaaaagaatggcgaggtcaggccaatccatgcaccgaagcccgagttgaaatttctgcagaagaagctagtgaatgtgctctgggactgctatattgacgatctgaccgtaaagtccaaggaaaaaaatttcaagatccctatgctgagtcatgccttcgaaaagaacaagagcataattacaaacgctcaacttcacagaaacaaacaatatatcctgaacatcgacctcaaagactattttgagtctttcaatttcggtagagttaggggattttttatcaaagacaaggatttccaggttgcccccgaggtggccactgtgataacccagattgcatgttatcaggggaaactgccacaaggtgccccctcctccccaatcatcaccaatttgattacgcgtatcctggactatcgcatcgtaaagattgctaagaagtacaggtttacttacacacgttacgcagatgatttaaccttttccaccaatagaaatctccggagcaataagctgaaagctacaaaggagctggacaaatttctggaagaactcgaagagctgattgtctcttcaggatttgaaatcaactccaaaaaaacacggttgtccgatgatatgcagcggcaggaagtgacaggcttgatcgtcaataagaaactgaacgttaagcgcgagtatattaagaacaccagggcaatggctttcaaattatacaaagacgagacattcgagatcgatgggaaacagggaactattgagcaattaaccggcagatttgcgtttatctttcagattggccagtataacaattacctcctgtacaagaaatctctggtcgagaataacctggaggcgcagaagaacctactcggtaaaaaatcaagcaagaaatccgattcgaagtactattggaagtacatcttctataacagggatctcaggaaagagttgttctataacaaacagcacaaaacacacaaccttccagaagagttctattctattggaaaggaggaaaagaaaatgtacatggccctgtttgactcaaaggagaaggagtacaagaagttcctattctataagtacttctacggcaatagcaagcctattatcgtgaccgagggcaagacggaccctcgctatatcaaagctgcccttaagaacctatatccccagtatccagaacttatcgaacgggatggggataagttcatattcaagattgacttcctcaagcacagcaacacaatagagtatctgtttaatgtgcccgagggcggggaaggattcaactattggtacaactacttctctaacaaagaagatttcaagatgtctgccaaagagaaattgctgtacccaaactacatagaatatttccagaagttgaccagtcgacaacctaaacatccaactatctttctgttcgataatgaacctactggtcaccccttttaccagtttgcctcctacagcaaagacctcgacatatcgccgaataatctggacactatcagaaaccctatggtcaattatcgaattaaccagaagtcaagcctctacattatgagtacgccgctggtgaagaatgtgaattcagggagtagctcagacatcgaggatctgcttattgcaaagcaaaaaatgcccactctttatctggatggccagaataagaccttcaaaaaaaacggcgggtttaattactatggaaaggaaatccttagcaactacgttttaaagtactaccagaactttgacttcagtgagttcatccctctcttaaatgggattcgcgataatatactggactatcgaaaatga

SEQ ID NO: 8554 - RNA, 1938 nt, synthetic construct
  source 1..1938: mol_type = other RNA
atgaataagctgaaacagctggaatccaaagatgactttgctcgacttcttggattccagaacagcaaatacatcaactacctcttatattccgtggggactgacaacctctataaaacttttagcattccaaagaagggcgggggggagcgaataatcaatgcaccaaaaaaagagctgaaatttctccagcggaagctggccaacgtgctgtgggactcatacatagattctctcaaacttaagagcaaggacaagaagtttaagattcctatgctgagtcacgcctttgagaaaaacaagtccataatcactaacgcccaggtccaccgcaataagaggtacatcattaatatagacctcaagaactacttcgacagctttaacttcggcagggtccgcggtttttttctgaaagatcgggatttctgcgtaacgcctgatattgctacaatcattgcacagattgcctgctatcagggcaaactgccccagggagccccatcatcccccatcataacgaaccttatcacacgcattctggactatcgtatcgtgaagatcgcaaaaaaatatcgattcacatacaccaggtacgcggatgatatgacttttagtaccaatcgggatctgtattctaataaactccaggctacaaaggagttagaaaagtttctgagagagctcaacgagctggtgatttcctccggtttcgagatcaattcacaaaaaaccagactttccaatgagatgcaacggcaagaggtgactggactcgtagttaacaagaagttatcgattaagagggagtacattaagaatactagggccatggcatttagactttacaaggatggctacttcgaaatcgatggcaaattgggtacaatagatcagctgaccggcagattcgcattcattttccagataaaccaggttaacaattacctactatacaagaagtccttggtgaaaaacaacttggaattccagaaaaatctgctggcgcaacaaaccttgaaaaagtctgaatcgaagtattactggaagtatatcttctatgctcgtgacctgcgcaaggagctcttttacaacgagaaacacaagacatataacctgccgaccgaattttatgacatcagcaaaaacgagaagagaatgtacatgagcctgttcgacagtaaggagaaagaatacaagaagttcctcttctacaagtatttctttggcaatgacaaaccaatcatcgtcaccgaagggattacagatccccggtatatcaaagccgccctaaagtctcttcatcagcagtatcctgagttgatcgagaaggtggacgacaagtttatctacaaggtcgagttcctgaatcattcgaataccattgagtacctttttaatgtccccgaaggtggggaagggttcaaatactggtacaactatttctccaacaaggaaaactttcctatggatagcaatgaaaagatactgtatcccaattacatcgactattttcaaaagctcaccattaggaaacctaagaatcctacgatgttcctttttgataatgaaccgactggaagccctctgtacaatttcgctcgctatgctaaagatttggacattaactcgaataacctcaaccagatcagacagcccatgctgaactatcggattaaccgcaagtcttctctgtatctgatgctgacaccattgatcatgggatcaaactcaagtgacattgaggacctcctactgtccaaaaataccccacccattttaaaaggaaagtcttttagcaaaggcgggggcagtaataactacggcaaagacgttttcagcaaatacgtgttgaagaagtattcacagttcgatttcagcgacttttgtcccttgttagataaaatcagagacaatatcctggactacaggaaatga

SEQ ID NO: 8555 - RNA, 1959 nt, synthetic construct
  source 1..1959: mol_type = other RNA
atgaacaaactcaaaaagctagacaataaggacgattttgctcggctgctgggcttcaagaatagtacctacatcaactacatcctttacaacattggaacggataatctttatcgcactttctcaattcccaaaaaaaatggtggaactaggttggtgcacgctcctaagccagagctgaaattcctgcaaaaaaaactggtaaacgtcctgtgggattgttacgtggatgaccttaccgcaaagtccaaggaaaaaaatttcaaaatcccaatgctgtcacacgcattcgagaagaataagagcattatcacaaatgcacaggtgcaccgtaacaagcaatacattctcaatatcgacctgaaggactattttgagtcctttaattttggacgggtgcggggcttttttatcaaagataaggatttccaggtcgttccagaggtagctactgtgattgcccagatagcctgctatcagggcaaattaccacagggcgccccttcctcaccaatcataaccaatctgatcacaagaattctggattacaggatcgtgaaaatcgcgaaaaagtacaggtttacttacacccgatatgctgatgacctcaccttcagcaccaacaggaacctacattcaaataagctgaaagctacgaaggagctggataagtttctggaggaattagaggagctcatagtgtcttccgggtttgaaatcaatagcaaaaaaacacggctaagcgacgatatgcagcgacaggaggtcactggtttgatcgttaacaagaagcttaatgtcaagagagagtacatcaaaaacacacgcgccatggcctttaaactttacaaagacgaagcgttcgaaattgacggcaaacaggggacaatagaacagcttaccgggcgttttgctttcatattccagattggtcagtacaacaactacctcctatataagaagagcctggtagagaataatctggaggcgcagaaaaatctcctgggcaggaatctgtccaagaagagtgacagtaagtactactggaaatacatcttctacaaccgcgatctgcgaaaagaactgttctataacaagcagcacaaaactcataacctgcccgaagaattctactctatcggtaaggaagaaaagaagatgtatatggccctctttgatagcaaggagaaagagtataagaagttccttttctacaagtacttctatggaaactccaaacctattattgttacagaaggcaagaccgaccccagatatataaaagccgccttgaagaacttgtatccccaatatcccgagttgattgagcgcgatggtgacaagtttatcttcaagattgacttcctaaagcatagcaacacgatcgaatacctgttcaacgtccccgaggggggagaggggttcaattactggtacaactatttcagtaacaaggaggattttaagatgagcgcaaaggagaaactgctttaccccaactatattgagtatttccagaagctgacctctaggcagcctaagcaccccacaatcttcttgtttgataacgaaccgactgggtatcctttataccaatttgcatcatactctaaggacttggacatctcgccaaacaatctcgataccataagaaatcctatggttaactatcggatcaatcagaaatcgagcttatacattatgtccactcctctcgtgaaaaacgtgaatagtggctcctcttctgacatcgaagacctgctcatcgccaaacaaaaaatgccgacactgtatctcgacgggcaaaataagacctttaagaagaatggcggatttaactactatggcaaagaaattctctccatctatgtgctgaagtattaccagaacttcgacttttctgagtttattccattactcaatggaattcgcgataacatattggactatagaaaatga

SEQ ID NO: 8556 - RNA, 1977 nt, synthetic construct
  source 1..1977: mol_type = other RNA
atgaataagctgaaacaattaactaccaaggacgagttcgcgaggttactaggatttaaagacacgaagtacatcaactacttgttatacaagatcagaaccgagaatctgtatgaaacttttagcatccctaagaaaaacggaggcgagcgggtcattcatgctccaaagcgcgatttgaaaattctgcagaaaaaactcgcggaggtgctgtgggattgctacgtgtttgatcttgaaaagaagagcaaaaacaagaacgtaaaagttccgaaattgtcccatgctttcgagaaaaacaagtccattatcacaaatgcccaggtgcacagaaataagaagtatgttcttaatctggacctcaagaactacttcgacagttttaattttggcagggtacgcggcttctttataaaggataaaaacttccaggtggtcccggaaatagccactatgatcgcacagattgcttgttacgatggcaagctgcctcagggggccccatccagtcccattataaccaatctcattacaaggattctggattataggattgtcaagctggcaaaaaaataccgcttttcatatacccggtacgccgacgacctgaccttttccacaaaccgagatctgagttcaaacaaattgcgcagcgctaaaattctggagaaatttctatgcgagctcgagaacctgatagtgtctagcggttttgagatcaattctcaaaagacgcgactatctgataatatgcaacggcaggaagtgaccgggttggtcgttaataagaagatcagcgttaaacgcgaatatataaagaacacccgggctatggcctttaaactgtataaggatgaagagtttgagattgatgggaaacagggcaccatcgaccagctcactggaaggttcgccttcatcttccaaatctctcagtataacaactacctgctctacaagaagtcattgatcgaaaataacttcgagagccaaaagaatttgctgggtagaaattccctgaaaaaatctgagtccaaatactactggaagtacatcttctataacaaagacattcggaaggaactgttctacaataagcagcacaaaacatataaccttccacaggagttctattccatcaataagattgagaaggaaatctacatgagcctgtttgattccagagagaaggagtacaaaaagttcttgttctacaagtacttctacggaaactctaaacccataattgtgacagaaggcaagacagacccaagatacatcaaagccgcacttaaaaatctatataggaagtatcccgagctgatcgagaagaagggagacaagtttaagttcaagatcaacttcctgaaacacagcaacacaattgaatatctgtttaatgtgcctgagggcggtgaagggtttaagtactggtacaactatttttcgtcaactatgccctcaaatattttcaaagagaactttcccccaaagtccctcgggcaagacctctatcgcaagatgtaccccaactatatagaatatttccaggggcttactacacgaaaacccaattacctcactattttcctctttgacaatgaacctgccggcagtcctctctacaaatttgtgaatcatgcaagcgagcttcagatcgacaccaacaaccttgaccagatcagagaaaaaaacttctataggatctcgaccaaaaatagtctgtatgtaatggcaacgccacttctgaacaagggcaacagttcagatatcgaagatctgctgttagctcgtaatcagcttcctgtgttaaatggaaagaactttagcaaatccggtggaagcaattactacgggaaagacgtcctctctaagtatgtgctcaaaaacttcaagaagttcgacttcaccgagttcataccgctgttggatggcatccgtgacaatattctggattatagaaagaaccggatctga

SEQ ID NO: 8557 - RNA, 1980 nt, synthetic construct
  source 1..1980: mol_type = other RNA
atgaataaactgaaacagttgagcacaaaggacgatttcgcagagttactaggctttaaaaactcccgctttatcaactacctgctctattccattggtacagataatctgtacgaaacctttactataccaaagaagaatggtggagaaaggattattcatgcccccaaaaaggagcttaagtttttacagaagcgtctggctaatgtgttgtgggactgttatctgtatgacctgaagagtaagagcaaggaaaagaaactgaagatccctatgctgtcgcacgcgttcgaaaagaacaagagtattatcacgaatgcacaggttcatcggaataaaaaatacctgctgaacatagatctcaaagattacttcgactcttttaactttgggcgcgtgcggggattcttcgttaaagataaagacttccaggtgacctcagagatcgcaaccgtgatcgcacagatcgcctgctatcagggaaagctgcctcaaggggcaccaagcagtcccattatcaccaatcttattaccaggattcttgactataggatcgtaaagattgctaagaaataccggtttacctatactcggtatgccgacgatatgacattctctactaatcgcgaactgaactcaaacaaactgcgagctactaaggagctcgagaattttctggccgaactggagcgcctgataattagttcaggattcgaaatcaaccctaaaaagaccaggctgtcaaataatatgcaacgacaggaagtgactggactggtcgttaacaaaaagatcaatgtgaagcgagaatacataaaaaacacccgggctatggcttttaaactgtataaagatgggacctttgagatcgatggtaagcaggggacattggaacagctgactggccgtttcgcgtttattttccagacagacaagtataacaactacctactgtacaagaaatccctcatcgagaacaaccttgacgagcaaaaatacctactcggccgcaacagtagcaaaaagagtgagtccaaatactactggaagtatatgttctacaacagagacttacgtgacgagctcttttacaatcagaaacacaacacctacaatttaccaaaaggattctactctatctctgagaatgagaaggaggtgtatatgacgttgtttaactctaaggagaaagactataagcgctttctcttctataagtacttctttggaaacgataagcctatgatcataaccgaaggcaaaactgatcccctttacatcaaggcggctttgaaaaagatgtaccttaactatcctgaactagtcgagaaagtaggtaacaactttgtcttcaagatcgaatttctgaatcggagcaatacgattgaatatctgttcaacattccggaaggaggctctggcctgaattacttgtacaattacttctccaaccagattcccgccaattttttcaaacagaggtttccaacgaataacgatagaaaggacatttacaaggagctctatcccaactacatagagttcttttcaaacctgacattgaggaatcctaagaacagcacaatcttcctgttcgataacgagccgtcaggcaatccgctctttaagtttgtgaattacgccaaagatctccaagtcgagtccaataatttggaccaaatcagaggcacagccttcaagagaatcactaaaaaggggtccctatatattatggccacaccccttttaccaaatatgaacggcggtaacagctctgacatcgaggacctcatccttagcaaaaataccgcccccatactgaaaggcaaaaccttcctcaaaaatggcgggtcgaatcattatgggaaggaaattttcagcaagcacatacttaagaactacaagcagtatgatttctccgacttcattccattgctcgacgggatgagagataacatcctcgattatagaaagaagtga

SEQ ID NO: 8558 - RNA, 978 nt, synthetic construct
  source 1..978: mol_type = other RNA
atgaataaacttaagcagctggagacaaaggatgactttgcatctctcctcggtttcaagaacagtaagtacatcaactacattctctattctgtgggcaccgataatctgtataaaactttctccatcccgaaaaagaatggaggggagaggattatccacgcccccaaagaaaagttaaaacggctccagagaaagctggcaggcgtcttgtgggattgttatctggaatcgctgaaaatcaagagcaagaacaaaagcttcaaaatccccgctatctcccacgccttcgaaaagaacaagtcaataattaccaacgcccagattcatcggaacaagaaatacatcctcaacattgaccttaaggactactttgatagctttaatttcggccgcgtgcgcggatttttcctgaaggatgctgacttcaaagtcccagaggaaattgcgactgttatagcacagatcgcctgctataaagggaaactgcctcagggggccccaagtagccctatcataaccaatctgatatctcgaatcttagactacagaattgtgaagatcgccaagaaatatagatttacttacacgcgctacgctgacgatatgactttttcaactaactgtgagctgtccagcaataagctacaagcaacaaacgagctggaaaagtttctgaaagaactggagaaggtcatcaccctttcagggtttaaaatcaatccccagaagacaaggctatccaataatatgcaacgtcaggaggtgacaggcttggtggtgaacaagaaagtaggcgttaagcgagaatatttgaaaaatacaagggctatgaccttcaagctgtataaagacgagaagttcgagattgacggaaaacagggtacgatggagcaattaaccggacggtttgcgttcattcttcagattagtcaatacaacaactacttgctctacaagataaattgcaagatctga

SEQ ID NO: 8559 - RNA, 1953 nt, synthetic construct
  source 1..1953: mol_type = other RNA
atgaccaagttaaatcgattggagacaaagactaaaaacgactttgccaggctgttaggatttaagaatgcccgctatatcaattatctgctgtacatcatcaagaccgataacctgtataattcgttcaccatccccaaaaaaaatggaggtgagcgggtcatacatgcaccaaaaaaggagctgaagtttcttcagaagaagctggctgatgttctgtgggaatgtcacttggagtctgttgaatctaagtccaaggataagaacttcaaaacccctgtgctttctcatgcgtttgagaaaggaaaatccatcatcacgaatagtcaaatgcaccggaataagaaatacatcctcaatattgacctcaagaacttctttgattcattcaatttcggccgagtcagaggtttcttcatcaaagataaagacttcgcggtcagtccggagattgccacagtcatcgctcaaatagcatgctaccagggaaaactgccccagggggctcccagctcacctattataaccaacttgattactcggatccttgactacaggatagtgaaaattgccaagaaatatcggtttacttactcaaggtatgccgatgacatgactttttccaccaatcgggagctgaattctaacaaattaagagcatccaaggaactcgacaactttctaacagagctcgaggaggtaattgtgagctcggggttcgaaataaacccccaaaagacccggctgtctaacaatatgcagcgacaggaagtcacggggctcgtagtgaataagaagatcaacgtgaagagagaatatgtgaagaacaccagagcaatggcgttccagctctacaaagacggagcctttgaaattgataaaaagacgggcacactgaatcagttgacaggccgttttgcattcatcttccagatcgaccagtacaataactatctgctgtacaagaaaagcctaatccagaataatctcgacagtcagaaatatcttctcgggcgcaattccagcaagaagtccgaaagtaagtactactggaagtacatcttttacaataaggacctgaggaagaaactcttcgataatactaagcataacacagacaacttgcctaaggagttctatagcattggcaaagaacagaagaagatctatatgagcctctttaattctcgcgaaaaggaatacaagaagttcctgttctacaaatacttctttgggaacgataaacccgttatcattaccgagggcaagaccgatccacgttatatcaaagctgccttgaaaaagctgtatcaaaagtatccagaactgattgagaaagtgaggaacaactttgtgttcaagattgagtttctgaaccgcagtaacacgatcgaatacctttttaacataccggaaggcgccagtggactgagtttctggtatagctatttctcagacataaagtaccaaactgaggaggccaagaagctgttttatcctaactacatggagtatttctcaaaattcacctctagaaaaccaaaaaaccccacaatgttcttatttgacaacgagccgtcaggccaccctctgtttgagtttgctaatcacgctaaggacctgaaagactcttttaagaatcttgacagcaagagaaacacaagcagcaagaaactggcaaaaaaagggtccttgtacattatggctactccactttcccctgatattaattatgggtacagctctgatattgaggacttactactctcacgcaactccgccccaacccttaaaggtaagacttttagcaaagatggaggcgccaaccactacggtaaagacattttttccaagtacgtgttgaaaaactacaaggaattcgatttcacagagttcatccccctgctggatggcatcagggacaacattctcgattacaaatccctattctga

SEQ ID NO: 8560 - RNA, 2058 nt, synthetic construct
  source 1..2058: mol_type = other RNA
atgacgaaactaaataggttagagacaaaagatgactttgctcgtctgctcggctttaagaatgctaggtatatcaactaccttctctacatcattaagactgacaatctgtacgatagcttcactattccaaaaaagaatgggggagagcgggtgattcacgccccaaagaaggagttgaagttccttcagaaaaaattggctgatgtactctgggaatgtcatttggagagtatcgaaagcaagaaaacactccagaaacggctggccgcaatactgtgggaatgttatcttaaatgcctgaacttcaactacatagagaataatctcgccaatgtgctgtgggagtgctttttgaaagttttagagtttcgcccgaaggagaaaaatcccgtgttgagccatgctttcgagaagggtaaaagcatcattacaaacagccagatgcacagaaacaagaagtacattctgaatatcgacctcaaagacttctttgactccttcaattttggacgtgtaagaggattcttcatcaaagatcgagatttcgcagtgtcccccgaaattgcaaccgtgattgcccaaatagcgtgctatcagggcaaacttcctcagggttctcctagcagtcccattatcactaatctaattacccgcatactcgactataggatagtgaagatagccaaaaagtaccgattcacctactctaggtatgcggacgatatgactttttcaactaaccgcgaactgaatagtaataaactacgcgcaagcaaagaactcgataacttcctgactgaactggaggaggttatcatttcatccgggtttgagatcaatcccaataaaacacggttatccaacaatatgcagagacaggaagtgaccggcttggttgtcaacaagaagatcaacgtgaaacgcgagtatatcaaaaacacacgcgccatggcgtttcaactctataaggatgaagcatttgagattgataagaaacctgggacaatcaatcagctgacgggccggtttgccttcatctttcagatcgatcaatataacaactacctcctgtataagaagtctctgattcagaataacctggactcccaaaaatatctgcttgggagaaactcatctaaaaagagtgaatccaagtactactggaagtacattttttacaacaaggacctgaggaaagaactcttctacaacaagaagcacaacacctataatctaccaaaggagttttacagtatcggaaaagaagagaagaagatgtacatgtctttattcaacagtagagagaaggagtacaagaagtttcttttctacaagtacttcttcgagaacgacaaacctataatcgtcaccgaaggcaagacagaccctcggtatatcaaagctgccttgaagaaactgtacaagaaatatccagagctgattcaaaaagtcggcaataatttcgtgttcaaaattgagttcctgaaccataccaataccattgaatatctgtttaacgtgcccgagggcggagaagggttcaagtactggtataactatttttccgataaggaaggagtccagatgtctgacaatgagaaagttctgtacttaaactacatcgactatttcgaaaagctgaccaaaaagtctccaaagaatcccaccatatttctttttgacaatgagccgtccggcaaccctcttttcaagttctttaactatgctaccgacctgaatgtcagctctaacaatctgggccaggtaagaggtacttcatttaaccggatcactaagaagaacaacctttatatcatggccacccctctcttgtcgacacgtaacaatggaaacagctcggatatcgagtatctgctcttgtcaaggaatccctcaccaattctcaagggcaaaacgtttagcaaaggtgggggggccaaccactacggtaaggatatcttttccaagtacgtgctgaagaactacaaaaagttcgacttcacagaattcattcccctgctggacggaatccgagataatatactaaattactga

SEQ ID NO: 8561 - RNA, 2052 nt, synthetic construct
  source 1..2052: mol_type = other RNA
atgacaaaatttaatcagctgcagactaaggacgatttcgctaagctactgggattgaagtctgcgaaatatatcaattacctgctgtacaacatcaaaaccgacaacctgtacaactctttcccaataccaaaaaaaaacggcggcgagcgtgtgatccacgccccaaagaaggaactcaaattcctgcaaaaaaaactcagcaatgtgctgtgggaatgttacctggaatccattgaaagtaagagcaaggataaaaacttcaagactcccgttttgagtcatgccttcgaaaaggggaagtccattataactaattcccagatgcaccgcaacaaaaagtacatactgaacattgatctgaagaacttctttgacagctttaattttggtcgcgtacggggattcttcattaaagatcgggatttcgcagtgtctccagaaatcgcgaccgtgatcgcccagattgcctgctatcaggggaagctgcctcagggagcaccaagttcacccatcataacgaacctcattacccgcattttagattacagaatagtcaagatcgcgaaaaagtatcggttcacttattctagatacgccgacgacttgacgttttcaacaaatcgcgaattgaattccaataaactgcgcgcttctaaagaactggaaaattttctgaccgagttagaagacctcattatttcctcaggcttcgaaatcaatcctaagaagacaaggctgtctaacaatatgcagcgacaggaggtaaccgggctagtcgtgaacaaaaagatcaacgttaagcgtgagtatgtgaagaacaccagagccatggcattcaggctttataaagacggcgcttttgagatcgataaaacaccagggaccatcaaccagttaaccggtagattcgccttcatctttcagatcgagcagtacaacaactatctactgtataagaagtccctgatgcaaaacaacctcgactctcaaaagtatcttttaggcagaaatagcagcagaaaatcggagagcaaatactactggaagtacattttctacaacaaggatctgcaaaaggagttactgcacaacacaaagcatcacacttataatctacctacagagttttacagcattgggaaagaggagaagaaaacctacatgtcactctttaatagccgggagaaagagtataagaagttcctcttttacaagtacttctttgggaacgacaagcctatcatcattacagagggaaaaacagatcctcggtatatcaaggctgctctcaagaatttgtatcagaaatatccggagctcatagaaaaagagggcaacaatttcatcttcaaaatcgagttcctgaacaggagcaatactatcgagtacctttttaatgttccggagggcggcgagggctttaagttttggtacaactactttagcgacaaattctattacaacgagaagaaggaaaagaaattctttgcactgaatagtgaggaaaggatattgtataccaactacatcacgtactttaagcaactcaccaactccctgcctaactaccccaccatcttcttgttcgataatgaaagcaataaccggaatggcaatgataagagtgccctgttcttgtttgcttcccatgcaaaagatcttatgattcccaaaaacaaggatctcgaagactcaaagaatattaagctggaagagaagatctcagacaatctagaaaaggtccgaagggataagccctggaggatcaacaaaaaggacagtctctatattatggccactccccttatgccccatatgaatgatggaaaatcctcagacattgaggatcttctgttttctagttcccagaatagcctgcccattcttaagggaaaagagttccacaaagacggtggagacaatcactatgggaaagagatattttcgaaatacgtgctcaagaactacaaagagtttgactttactgaattcatccctcttcttgacggtattcgagacaatatactggattataagtccttgttctga

SEQ ID NO: 8562 - RNA, 1980 nt, synthetic construct
  source 1..1980: mol_type = other RNA
atgacgaaactcaatcagctgaaaactaaagatgattttgccaagcttttgggctttaaaaatgccaggtacataaatcacctgctgtataacatcaccacagacaatctgtacgaacctccaatagtgattcccaagaagaacggaggagagcgggtcatccatgcgccccagaaagagctcaagttcctgcagaaaaaactatctaatgtcctctgggaatgctatctcgaaagcattgagtcaaagagcaaagacaagaactttaaaaccccagtgttgtcccatgctttcgaaaaaggcaaaagtatcattaccaactctcagatgcatcgcaacaagaagtacattcttaatattgacctgaagaacttcttcgattcttttaacttcggccgtgtgagaggattttttatcaaagatcgcgattttgctgtcagtcccgaaatcgccaccgttatcgcccagattgcctgttatcaagggaagttacctcagggcgcaccctcctctccaattatcacaaatctcataaccaggattctggactacaggatagtgaagatcgccaaaaagtacagattcacctattcaaggtatgctgatgacatgacattctccaccaattgtgagttgaattccaataaacttcgggcctccaaggaattggataactttctgacagagctggaggaggtaatcattagtagcggcttcgaaatcaaccccaaaaaaacccggctgagcaataacatgcagcgacaggaggtaacgggtctggtggtcaataagaagatcaacgtgaaaagagagtacgttaagaatacacgcgctatggcatttcaattatataaggacggggctttcgagattgataaaaaacctggtactatcaaccaactaacagggcgattcgcttttatcttccagatcgaccagtataataactatctcctctacgagaaatcgttgattcagaacaatctggactctcagaaatacctgctggggaggaactccagtaagaagtcagaatccaagtacttctggaagtatatcttctacaataagaacctgcgtaaggaactgttttacaacaagaagcacaacacctataacctcccaaaggagttttactcaatttccgagaatgagaaagaggtgtacatgtgcctgttcaacagcaaagagaaggaatacaagaaattcctcttttaccggtactttttcggcaacgaccgccccatgatagtgacggagggcaaaacagatcctctctatatcaaggcagccttgaagaaactgtataagaactacccgaagcttatagaaaaagacggtgacgacttcatttttaagattgagtttctgaaccgaagcaacacagtcgaataccttttcaatatcccagaaggaggcgagggcctaaagtactggtacaattatttcagcaatcaaatccccgcaaattttttcaatcaaaagttccccgccaaaaatgatgggaagaagatctataaagagctgtatcctaattacatggaattctttagccaccttacctcaagagagcctaaaaacccaaccatcttcctttttgataacgaaccatccggaaaccccttgtttaaattcttcaaccacgcgactgatctcaatgtttcatctaataacctgggacaggttcggggcacttctttctacaagatcactaagaaggacagtttatatgtgatggccactcctctgatgcctcacatgaataatggaaatagctcagacattgaagatcttctgctatcgtgcaacccaagcccgatactgaagggtaagactttttctaagggtgggggggcaaaccattatgggaaagatatcttttccaagtacgtgctcaaaaactataaagagtttgacttcactgagttcataccgttgctggacggaattagagacaacattttagattacaccagttga

SEQ ID NO: 8563 - RNA, 2097 nt, synthetic construct
  source 1..2097: mol_type = other RNA
atgaataagctgaatcagctcaagaccaaagacgatttagccagacttcttgggtttaaaaacgcacgatacattaactacctcttgtatgataagcagaccgacaatctctatgagtcctttacaatcagcaaaaaaaacgggggggagcgtatcattaatgccccgaagaaagagctaaaatttctgcagaagaaactggcaaatgtgctctgggagtgttatttggaaagtctggagagcaagaattttcttcagaaacgcctcgctggcattttgtggaagtgctatctgaagtccttggagatcaactacatcaagaacaacctctctgattttctttgggagtgcttcatgaaagtccttggatttaaaccaaaggaaatcaaaactcctgtactatcacacgcctttgagaaaggcaagtcgattatcaccaattctcaaattcaccgcaataagaagtatattctgaacatcgaccttaaagactttttcgggagttttaatttcgggagggtcaggggatttttcattaaggaccgggattttggaatcagccccgaaattgccactgtgatcgcgcagattgcctgttaccagggaaagctgcctcaaggtgcgcccagttcgcccattattaccaaccttataactaggatccttgactatcggatcgtcaaaattgctaagaaatatcggttcacctatagtagatacgccgatgacatgacattcagcactaacagggagttgaattcaaataagctgcgagcatctaaggagctcgaaaattttctggccgaattagaagagctcatcatctcttctggctttgaaattaacccgaagaaaacccggctcagtaataatatgcagcggcaagaggtgaccgggttagtcgtgaacaaaaaaatctctgttaagcgcgaatacgtgaagaacactagagctatggccttccaactgtataaagacggcgcctttgagattgacacaaaaccaggtacattgaatcagctgaccggcaggtttgcgttcattttccagatagaccagtacaacaactaccttttgtacaaaaagagccttatacagaacaacctggactcccagaagtatctgctcggcagaaacagttcccgcaagtccgaatcaaagtactactggaagtacatcttctataacaaagatctacagaaggagctgttcgacaacaaaaaacataacacgtacaacttacctaaggagttttatagcatccccgaaaatgaaaaagaagtgtacatgtccctgttcaacagcaaggagaaggagtacaagaagtacctcttctataagtatttcttcggcaatgacaagccaataatcataacagagggcaagactgatccgcggtacatcaaggcagctctgaaacacctgtatcaaaaataccctgaactgattgagaaagatggcgacagattcactttcaagatagaattcctcaatcatacgaacactctggaatatctattcaatgtgccagaaggaggagagggttttaagtactggtacaactacttctctaatcagattccctccaacttctttaaacagaggtttcctacaaagaacgatgggaaggacatctacaaagagctctaccccaattatatcgagtactttagcaatctcaccacacgtaagcccaagaacccaacaatattcctgttcgacaacgaaccttcagataaccccctgttcaagttctgcaatcatgcagtggatctgaaagtttcatcaaatgatctggatcaagttagaggaacctctttcaatcgtataaccaagaaggacaatttgtacatcatggctacaccattactgtccaaccgaaataacggcaatagctcagatattgaggatttgctgctatcccgcaatctcccacctatcctgaatgggaaaacgtttagcaaatccggtggcgacaaccactatggtaaagagatttttagcaaacacgtactgaagaactttacggagttcgattttgctgaattcatccccttactggatggaatccgcgacaatatactgaactattggtga

SEQ ID NO: 8564 - RNA, 1971 nt, synthetic construct
  source 1..1971: mol_type = other RNA
atgaataagctgaatcagcttaagactaaggatgacttggccaaacttctcggctttaagaatgcccgctatattaactacctgctgtacaacatacagacagacaatctgtataattctttcaccattccaaagaagaacgggggtgagagaatcattcatgctcccaaaaaggagttgaaatttctccagaaaaagctggccaacgtattatgggagtgctacttagagagcattgagtcaaaatcaaaggggaagaactttaagacaccagtcctaagtcatgcctttgagaagggcaaaagcatcatcaccaatagccagatgcatcgcaacaagaagtatatcttgaacatagacttgaaggatttcttcgactcatttaactttgggcgtgttaggggcttttttattaaagatagggatttcgcagtgagcccagaaatagcaactgtcatcgcacagattgtgtgttaccagggcaaactgccacagggcgctccgtcttcccccattattaccaatctgataaccagaatcctagactatagaatcgtgaaaatagccaagaagtatagattcacttactcaaggtacgccgacgacatgacattttctactaatcgcgagctgaattctaataaactccgggcgtccaaagaattagaaaacttcctggcagagctggaagaactgatcgcttccagcggatttaagataaacccaaagaaaacgcgactgagtaacaatatgcagcgccaggaggtgaccggccttgtggttaacaaaaaaatcaatgtgcgtagggaatatgtaaagaatacacgggcgatggcatttcaattgtacaaagacggcgcctttgaaattgatactaagccagggaagcttaatcaactgaccgggcgctttgctttcattttccagattgaccagtataacaattacctgctgtacaaaaagtcgctgatacaaaacaacttggattcacagaagtatctgctgggccgaaactcctccaaaaaaagtgagtctaaatactactggaagtacatcttctacaacaaggacctgcggaaggagcttttcgacaatacggaacacaatacatacaacttgccgaaagaattttacagcatcggtaaggagcaaaagaagatgtacatgtcgctctttaacagccgggagaaggagtataagaagttcctattctacaagtacttcttcggaaatgacaagcccatcattgtgacagaaggtaagacggatcccagatatatcaaagctgcccttaagaagctttatctgtcttatcccgaactcgttgaaaaagtcggaaacaacttcatcttcaaaatcgagtttctcaatcggagcaacaccgtggagtatctgtttaacatccctggaggtggcgagggactgaaacactggtataattacttctccaacaaggagaaattccaaatggactccaaggaaaaattgctctaccctaactatattgagtacttccagaaactcacaacccgaaaaccccaataccctaccatcttcctgttcgacaatgagcctaacaataggaaaaaggatgataaagcccctctctttctttttgccagtcacgcccgcgacctggaaattgattccgacaacttagaacaggcgaggcgtggctcaagcagtcggatcaccaagaagggatctctgtatattatggcaactcccttattgcccaatatgaataacgggaattcaagtgatatcgaagacctcctgctctctcagaagaaaccacctattctcaagggaaaagcttttagcaaaaaagatgatccgaatcactacgggaaagagatcttctccaagtatgtcctcaagaattatacacagttcgatttcactgagtttattcctctgctagatgctatcagaaacaacatacttgactaccagaatatcaacgattga

SEQ ID NO: 8565 - RNA, 1962 nt, synthetic construct
  source 1..1962: mol_type = other RNA
atgaacaagcttaccaatgtggagtccaaagatgactttgcacgacttttaggcttctctaattcccgattcatgaactatgtgctatatgtcctcaggactgaagaactgtatgagacattcacaattcctaagaaatcagggggggagagaaccatcaatgcacctaaaaaggagttaaagatcctgcaaaagaagctggccaacctgctgtgggattgctatatcgaggacctagagtccgagtccaaggtgaaaaataagaaaatacccaacctgagtcatgcctatgagaagaacaaaagtatcataaccaacgccaaactccatcgcaataagaagtacgtgttgaacatagatctggaggatttttttgacagcttcaactttggcagagttaggggattttttatcaaagacaggaatttctgcgtgtctagtgacgtcgctacagtgatcgcccagatcgcctgttataaaggtaaactccctcagggtgccccatcttccccaattattacaaatctaattgctcgcatcctcgattaccggatcgtaaagattgcgaaaaagtacaggtttacctatagcaggtacgcagacgatatgactttttcgaccaatcgggagctggcctccaataaactacgaactactaaggagcttgacaagtttctggccgagctcgaaaaagttatcgtggcctcaggattcaagatcaataacaaaaaaacgcggctttccaataatatgcaacgccaggaggtcacagggttagtcgtcaataagaagattaacgtgaaacgtgagtacattaaaaacactcgtgcgatggctcataaattatacctgtctcagaggtttgaaatagatgggcgggaaggcacaattaatcagttgataggcagatttgcattcgttcagcagatagatcagtttaacaactacctgtcctacaagaagagcctgattaaaaacaactttgacgcccagaagtatcttatcgggaaggatagcggcaagaagtcagaaagcaagtactattggaagtatatcttctctaaccgcgacctccggaaacacttgtattacaatagcaggcacgacacctacaacttacccaaaggcttctacacaataggaaaagaagagaagaagatgtacatgagcctctttaattcacgagagaaggaatacaagaagttccttttctataggtacttttacgggaatgacaagccaattattgtaaccgaaggcaaaaccgacagccggtacatcaaggccgctctgaagaaactctattataaatatcccgaactgatcgagaaaaacggttccgatttcgttttcaagattgagttcctgaaacattcgaacaccattgagtacctgttcaatgtcccagaaggcggtagtggatttgaatactggtatcgctacttctcagacaaaaagcgctttcagatgggcgaagttgagaaggtggtgtaccccaactacatcgaatactttaagaaactgacgaacagaccgcccgacaatcctacaatcttcctcttcgataatgaacttcaaggaccgctctataacttcgcgaatttcgcaaaagatctggctatctctaccaacaatttcaaccaaatcagatactccagttttgatagaatcgtgaaaaaggattcactctacgtaatggctacgcctttgatccccaagattaacaatggagtattctctgacattgaggatttgttgctggtgagaaattctactccaattctgcgcggtaaacagttttcaaaacacggagggagtaaccactatggcaaggacattttcagtaaacacgtcctgaagaactatagcaagtatgactttactgaattcatccctctgttggatggggtgaagaacaacataaaggactattaccagaagagcaacaatcggaaaaattga

SEQ ID NO: 8566 - RNA, 1956 nt, synthetic construct
  source 1..1956: mol_type = other RNA
atgagcgactatgtcaaccttaaaaccaaagatgacctggccaaaaatctgggatatagggactctcggtatctgaattacctgttgtataaagtaggagtggacaacctttataggactttctcaattcctaagaagaatggggatgaacgcataattaatgctcctttgaaggagttgaaaatcgtgcaaaggaagctcgccaacctcttgtggaatcgctacctggagatcctggaaacaaaaagccgagatcgcggaatcaaaattccgagtatttcccatggattcgaaaagaacaaaaacatcatcaccaatgcacagcagcatcgtaacaagaaatatataatcaacgtcgacctggaatcatattttgactgttttaacttcggacgcgtaagaggcttttttataaaagaccgagacttcaaggtcagtagcgatgtggctaccgtgatggcccagatagcttgctatcagggcaagttaccccagggtgccccttcatctcccatcattaccaatttgattgctagaattctggattatcgcatcgttaagctggccaaaaagtacagattcacatatacacgatacgctgatgatctcaccttctccaccaatagaaatctactatccaacaagctcagagctgagaaggagttcaacgaatttctcgtggagcttgagaaaatcataacaactagcgggtttaacattaaccccagcaaaacaaggatttccaacagttaccaaagacaggaagttactggcattgtagtcaataagaagatcaacgtcaaaagggactactttaagaacactaaagcgatggcatacaaactatataaggacggcgaatttgaaattgatggtaaaagtgggacattagagcaactgtctggccggttttcttttatctttcaggccactcagtacaataattacctcttctacaagaagtcgctgattgacaacaacttagaataccagaaaaaccttctcggacaggggacaaacaagaaatccgagtccaagttctattggaaatacatcatctacaacagagatctccgtcgcgagctattttataacgagaagcacaagacctataatctgccagatgaattttacgccatttccaaagaagagaagaagaactatatggcactgttcgattccaaggaaaaggagtacaagaaattcctcttctacaagaacttctatggcaacgacaaacccatcattgttacggaaggcaagacggacccacggtacatcaaggcagccttgaaaaaactttacctgtattatcccgaattgatcgagaaagttgataaccggtttgtgttcaagatagactttctgaaacacagcaatattatcgagtacttgttcaatgtgcctgagggcggtagcggattcatgttttggtacaactacttctctaataaggagaagtttcacctgtcaaatgaggagcaacttctttaccccaactatatagactttttccgtaagttcacctcagaaaaggcgaataacccaactatattcctgttcgataatgagccatttgggaatcctctgtatcagtttgtgaattatgcgaaggaccttcagatcgatacaaataatctgaataccgtgcgggggccctcattcaatcgaattagtaaaaaggagagcctctacctgatggccaccccactcgtttcgaatctgaataatggtaattcttctgacgtggaagatctgctgatatccaccaacaagctggcaatccaaacgttcttcaacatcaagaagatcaattacaagaggctcgaagacgtgaaaaaccataaagagattttcagcaagtacgtcctcaaaaactacgagcagtttgactttactgagtatattccgctgttagatggcatccggaacaacatcttagattacaggaaatga

SEQ ID NO: 8567 - RNA, 1986 nt, synthetic construct
  source 1..1986: mol_type = other RNA
atggggaagctacaagaactggaaacaaaagacgagtttgctcggctgctcggattcaatgatgcccggtacatcaactacttgttgtaccacaatgagaataaccaggacaagaagttcattaacacagagaatctctactatagctttaccattcctaaaaagtcaggaggcgtgagagaaattaatgcgcccaaggacgaacttaagttcgttcagagaaaactggcagaaatcctgtgggatgactacgtagaaatgctaaaagtcaacagcaagaacaaggactttaaaatcccttccatatcccatggttttgaaaaggaaaagtcaatcatcaccaatgcaaaacagcatcgtaataagaggtttgtgctcaatctggacttggacaactttttcgatagctttaatttcggccgagtgcgcgggtttttcattaaggataaagattttggcaccactccagagatcgccaccgtgatcgctcagattacctgctaccagggtaaacttccacaaggcgctcccagctcccccattatcaccaacttgatcgcccggatcctggactaccgtatagtcaagatcgccaagaagtatagattcacttatacgcgatatgctgatgatttaaccttcagtacaaaccgggaactttattccaataagctcaagtcccgcaaagagctcgagaatttcctcgaagagatcaagataaaagtggaggccagtggcttttctatcaatgagaaaaagactcgcctctcagatcagtcacaaagacaagaagtcaccgggatcgtggttaacaaaaagctcaatgtaaaaagggagtactttaagaacactaaggctatggcattcaagttatataaggacgagaaattcgagattgatggtaaagaaggcaccatagatcagctcaacggcaggttcagcttcatcaatcagattgatcagtacaacaactacttgctgtacaaaaagtctcttatccagaatacgttgagccaccaaaagaatttgattggacaggagctctccaaaaaaagcgagtccaagtattactggaaatacatattccagagtaaggacttactgaaggaaacatactataacaagacacatcacacgtataacctgcccgtagagttttatgacatcgccaagaatgagaaaaagctgtatatgagctatttcaacgctcatgagaaggagtacaagaaattcctgttttacaggtactttttcgggaacgataaaccaattattgtgacagaagggaagacagaccctagatacctgaaggccgcactgaaaaacctttatcttaactatccggaactaattgagaaagtcgagggcaaatttctttttaagatcgacttcctctcgcactctgacactatcgagtacttattcaatgtgccggaggggggagaaggcctgaaatggtggtataactatttctcagacaaaaactaccagaacaaaatgagtgaggaagagaagctattatatcccaactacatatcttacttccgcaagcgcactggaagggatcctcgaaaggcgactatcttcctgtttgataatgaacctaagggatcgccactttttaattttgccaactacgccaaagacctgcagattgacagcaataatctggaacaggttagacgggacaacttctacaagatttctaagaaagagtctctctatctggtggcaccacctctactgacaaacatgaattttggaaactcttccgatattgaggacctgctcctgtccaggcagaaaatgccaactctttacatggacaaacaaatgaaaaccttcaacaagaacggtgggctgaaacactatggcaaagaaatattgagtaagtacgtcctgaagcaccatcagaagtttgactttaccgagttcgtgcccctgctgaatgcgattcgcgataatatcctggattataatgtttga

SEQ ID NO: 8568 - RNA, 1929 nt, synthetic construct
  source 1..1929: mol_type = other RNA
atgaataaacttcagaccatccagagcaaggaggactttgctcacttgctggggtacaaaaagtattcctctataacatacctgctgtacaagatcgggatcgacaacctttacacctccttcgaaattccaaaaaagactgggggaaccagaactatttatgcaccacagaaggccctaaaaaaactccagaaaaggtttgcaagtctgttatgggaagcatatgtagaaaacttccagccaacctctaataaaaaacacaaaaagctgcccaacgtgtctcatgcgtttgagaagaataaaagtatcatcaccaacgctaaaaggcacagaaataagaagttcgtcttaaaccttgatcttgaagatttcttcggttcatttcattttggaagggtgcggggatttttcctcaaaaatcgggactttcaggttcctgaagaagtcgctaccctgatcgcccagctgacttgttacaaaggctcactaccccaaggcgcacccagctcccctattataacgaacctcatttgccagatattagatcaccgtattgtgaaactggccaagaagtatcgcctcacttatacacgttatgccgatgatctgactttttctactaacgctgaactgccagcggaaagctttgaagccttcttcacacagctccaggatatcattcaccgaagcggcttttctatcaatcaccgcaaaacaagaatcagtgacaatggccagcggcaggaggtcactggcctgattgttaataagaaggtgaacatcaagcgggagtactttaaaaataccaaggccatggcttttcatctttataaggacggacagtttgagatcgacgggaaaccgggaacaattgaccaactcaacggcagattcgcttatatccagcagattgagaactataacaactacttgctctacaagaaatcattatccaccaatggcatcgaatatcaaaagtacttgttgcctaagtatgagaataaaaagggcagggataatttttaccaccattacatcttcaacgagcaggacctggttgagccaaccaatttctggaattccaagcacaagaaatatgagttgccccagacgttctacaaagccgagaagaattcgaactacaactacatggagaattttagtagccgggagaaagaataccaaaagttcctgttcttcaagaatttcttcatgaacaacagacccctgatcgtaaccgaagggaagacagacatcgtgtatctgaaagccgctcttaagaatcttgcatcaaaatacccttccttaattgaaaaggaggacaatcagttcaacttcaaaatcaacttcttcagtcatacagccacaatcgactatttgttcaacattccaaagggcggtggtgaggtgtttaaacatctgtacaactacttttctgacaatacaggaattaagcaacagaagtatctctacccaaactatttgaagtactttagggaacttactagtcgagagcccaaaaatccgacctttttcctgtttgataacgagcccaaggggaaccctttgtataattttgctaaccacgcccgcgacctcaaactggattctcagacgctcgacatactgcgcataaatgcggtcgatattttcgtgaagaacaatttgttcctgcttctcatacccctgctgtcagggaagtcatccagcgatattgaggacctgctcctggccgagcaatccatgcctattctgaacaacaagagcttctcgaagaacaataatgatgaaggtcgaaattcttactccaaggaaatactgagcaaatacatcctacgccattaccaaagctttaacttcaacaagttcatccctctatttgatgcactggagaaaaggattctcgagtataaagagagcaccaagtga

SEQ ID NO: 8569 - RNA, 1683 nt, synthetic construct
  source 1..1683: mol_type = other RNA
atgaagaaaaaaaacatcctgtacaacgtcatttcaaagagagcattggcaaccgtgctgaatgtccagtataaaactctgacatatgttctgtacaggcggggagtggacagcttctacaatgggttcgagatacagaagaagacaggaggcacaagaatcattaatgctccacaaggtgaattgaaaaccatccagaaaaatctcgccaaaattctggaaaagtcgatcaacaatagctcaaacatttcccacggcttcatcaaaaataagagcatctataccaacgcagccatacacagaaacaaatgctttgtgcttaacatggacctccaaaactttttcgatagcttccattttggtcgtgtgcgcggattctttattaagaaccgcaacttcaattgtacaaatgaaatcgcgacgatgatagctcagatcgtctgttataaaggaaaactgccacagggtgccccttcgagtccagtcattactaatctggtgtgcgggtctttagattatcgcatctctaaactgtctaagaagtataagctggattatactaggtatgcagacgatattacatttagtactaacaaccgccattttatctgtgaatacgagaatttcctgaatgagattaccgaaataatcgagaaaagcggattcaagattaacgataagaagacacgacttaccttttcacacaaaagacagactgtaactggggtagtggtgaataaaaaattgtccgtgccgcgcgagtattacaaacagacacgagctatggccttcaacttttacaagaataggattgcttacttggatgagagcaacaagacgctgaaccagattgaaggccggttctcctacatcaatagttttgacaagctcaataacatcctagaaagcgacaagaataacaagaagaaaaacctgaaggatctgaacaaccgggaaaaggattacgccaggttcatcttctacaagtacttctacatgaattccaaaccactgattattaccgaaggcaagaccgatatcctgtatatcaaagccgctttaaaaaaccttgtagggtcatacaaggatctttacaacggtgagtttaagatcaacttcttgagaaggagtaaaaggtttgcgttcctgttaaagatttctactgatggagcagacaccataaagaacttctacaagaactattacaccaagcctgttatcaaagacctatcctttgactactttctggacttcggctattaccccgactgccccatcattatcctgctcgacaacgagcctgacggcaaacacccccttggcaaatttgttagctccgataaatcatccgagttgttagagcagctcagattgaatggctttatccggctcaataaggttcacaatgtctatctatctgtggtccccaaaaatcctgacaaaaagctcgaccgttacgaaatagaagatctgtttgacgaggaactcctccatatggagctcaatgggaaaaagttcaatcgagagggcctgaaggggtattatacgaaggacgatctttctaagtatgtgtacagtcattacgaggagataaacttcaacaactttaatgccatgttcgagaattttcggaatataattgtggactaccaaaagtggtatcttgccaatatcaacaattga

SEQ ID NO: 8570 - RNA, 1974 nt, synthetic construct
  source 1..1974: mol_type = other RNA
atgtcatgccacgccctcttcatcatcatgaagtacacagagattaagaccatcattgatttcatcaaagccattaaagtgaacaactactcctacatcaattacctgctgtacggaattaaacccaataaacagtacagcctctttgaaatacccaaaaagaacggcgactctcggcagattgtctctccaaatcctaaactaaaaaagatccagaagcgcatttattcactgctgtggcagagatatgaagaggtgatgctgagtaagaccgggaagtaccagaaaactcccagcctatcccacggctttctgaagaataggagtatcataaccaacgcccagaaacaccgtaaccggaagatcattctgaatattgacctcaaggacttttttgattcctttcatttcggaagggtcaggggattcttcctcaaaaacaagtacttcaagttgcctgaagaggtggctactatattagcacagctcacttgctataacggaaaactgcctcaaggcgctccaacaagtcccttgatcactaatctgatctgtgagatactggactatagaattgtgaccttaagcaagaaataccgggttacttacaccagatatgccgacgatttaacgttctctacgaacaacaattcatttcttcagtcagtgagcgaatttatcattgagctgacaaacattatccaaaagagtggctttgaaattaacgattccaaaacgcatttgtctctgtataaccagagacaagaggtgacagggctgatcgtcaacaagaagatcaacgttcgccgtgagttttacaaaaaaacccgagccatggcccacaatctatacaaaaatggcgagttctacattgacgaaaataacaataagggctcgattaatcagttgcacggccggtttagcttcatctataacatcgagaagtacaataacttcctcagttacaaaaagtccctgtccaagaatagcgtcgaatatcaaaaaaacttgctatcccgcaacattgggataaagggtaacaatgatctctacaccaaattccttttacaggaacacgacataaataataccacttactactcccctgaacataataagcttttccttccaaaggatttctattcctacttcctgaaatacgaatctgactatatcaagtatctgagcgcaaaggagaaagaatatcagaagttccttttttacctgaacttctatgggaattcttatccaacaatcgtatgcgaaggtaaaaccgatcctctctatattaaggctgcgttgaaaaacctgtataaagattatcctgagctggttacgtatgacgatcagaagttcaccttcaagatcaactttttcaaaaggacatctgacaccaataaactcctgtttggcgtgccagagggaggtgggagtagccttaagttcctttataactacttctctgacattaagcccaagaataatactcaagaggatatttacacgaactacctggagtattttgagaatttgacactccacagcgcaatctcacccaccatcttcctgtttgacaatgagggcagcgggcaacccctgtctaactttatatgtcatgtggcaaaagacatccgcataccaaacaatgacctcgatgaccgcagaaaggagatgtactgtcagaaagtcaaaaagaacctttttgtactgagtaccccgaaagcggctcatgatacaaagtccgatattgagtccctgttaatcaacaagcccgttataaatggacgaacatttagctcacaggagtcatataaacgggaatttgagtacggtaaaaatgagctcgccaattatgtgctgaagaactacaagaacatcaatttcgagaagtttaagccgctcttgaacactatcagggaaattaacatctcgtacaagaaggaatacaataagctaaacagcaaacgagaatga

SEQ ID NO: 8571 - RNA, 1728 nt, synthetic construct
  source 1..1728: mol_type = other RNA
atggagaatttgagcttaataaataccaagcggactctcgcttttcatttgtcaatcccatacaaatcgtttgtgtatcttctctaccatctagaccacccgtatagcaccttcgagattttgaaaaagaatggggagtctagggtaattaattcacctcacccgaaattgaagcggctgcagtataagataaaggatctcctggaaacacagtacaatctcatgatgaaagatcgcgtgtctcacaacgtttctcatgggttcatcaaagagaggtccatatttactaatgccaaaattcaccggaacaaaaagattgtgttcaacatcgacattaaggacttctttaagagtatccactttggtcgtgttaggggctttctgatcaaaaacaaatactttctgctgaacgatgaagtggccactactattagtaagctgatttgctacgaaggcagccttcctcagggagcacccacatctcccatcatgagtaacctcatcctgaacatctttgatatgaaagtcctggacatttgccagaaatattcagtcgattataccagatatgctgatgacttgacctttagctctaacagccggaagttctaccagtccttcggggatttctactatgagatcgaacaactgataaataagaacgggttcaaactaaatggaagtaaataccgagtacagttaaacaactccagacaggaagtcacaggcctggtggtgaacaacagactgaatataaagcgtgactactataaggcaacacgctctctcgtccataaatttctgttggaccagtccccaatcatcaacgagcaggttcttaatgctaatcaaattgagggtcgcctgagcttcatccattctatagagatttacaacaagaagatcgagtacaataaggaacgccaggagaaaagttataggaaggactttacgacatatttacacgattccgtgcttaatgctaaggaaagggagtaccagaaattcctgttctacaaccttttctataagccaaataacatcgtggtcttcccagaaggaaagactgacatctactacataaaagcggcactaaaaaagtattacaaggagtaccctgaactcgtggagttcaaggacaacaagtaccactacaagatcaactttattaagcggaacaagagactgtattacttttttgacctagccattgatggagccgatacaatgagcaagatcctgaattattactcctcaaaaccagggggcaaacacaataaaaaccccatcaactacttccagtacttcaacgaaagactcgatattcaaccctccaaacctgtggtgctgctttttgataacgaaggcaaagacaagcccctccataaattcataaatacggccaaaaagcaactggacatcgattcggatatgttaaagagcaaactgaatacctgtgacccttcccctgtaaatttgatcggcaatctgtatatccttaccattaataagctggaggcggacaaagagtatgagattgaagacatgataaaggagtataccgacaacttggtgatcaatggacgaaaatatctgaacaagggtgaaggcaactcaattagcaaaattgtcctcgcccaaaacgttctggagaattacgaaaccatcaacctcgagaatatcaagccccttctcaataagctgaagattctcaagaatctgtattga

SEQ ID NO: 8572 - RNA, 1680 nt, synthetic construct
  source 1..1680: mol_type = other RNA
atgaacgattataaggctgcccgtgccgaagtcagcaggttattcggtattaaactgaagatgatcacctatgtcctgtataaaaaaggcgtggagaacttgtatacatcctatgatataccgaagaagaatggaggtactcgcgttatctacgctccagattccaaactgaataagatccagaaaaagatctcagagaaactgtatgagattcacatcaattacatgaatcaggaaaagatcaagtctactatctcacacggctttgaaaagaacaagggaataatcacgaatgcataccgacataagaataaaaggtatctggtcaacgtggatatttccgacttcttctcctcttttaatttcgggagagtgcaggggtacttccataagtcacaggaatttggattttctaaagaggtgtcgacaattatagcccaacttgtttgccataatggcaaactacctcagggggcacctacaagccccatcattagcaaccttatcttcaatatcgtggacaggcggatcttaacccttgccaaaaaatataaactctactacacccgttacgcagatgatatgagttttagcaccaacaataaggagttccaaaaggagtataaaggcttcatccaggagcttacagacctcctcgagaagagtgggtttatgataaatcacaacaagacccggtttgtgtattacagcagtcggcaggaggtcaccggcctaactgtaaacaataaaatcaatgccagtcgcaatttcattaaccaaacaagggcgatggcaaaccagctctacaaaaaggataacttccagatcaacggtaaagacggcacactagcacagctggaaggaagatttagctttattaatcagctggattggttcaataacagactcgaatataagcgaaccaataagaagaagaacaagaagtacatcagcgacttgaatgctcgcgaaaagcaataccagtacttcctgttctacaaatactttttcaagcccataaagcccactattgtgactgaggggaaaaccgatattctgcacatcaaagcggccctgatgaaatactgcgatagatatcctaaactgatcactaaatctgctgacggaaagtacgaattcaaactgtatttcctgaacaagactaaaagactggaatactttctggggatatatagggagggcgctgatacgatgaagaacatttggaacttctataaaggtgctcacggctttacgaacatattctcatatctctctaagaaatgccttggggattccttaaatcgggtaaatccagtgattttactctttgacaatgagcaggttacagataaacccttgcgcaagttcctcaaccatatcggaattaaggccaagatcaatccagacctcatgaaccttacagccaacctgtatctgcaaaccataagtctcataaacgactttgacgaatgtgaaattgaggacctgtacagcgaggatattctgaacatcatcattaagggcaagaagtttgaaaaaaccgtcgagaaggacaaggaagacacgttttccaaagacattttctctaagtacatcttggagcactactacgagattgatttttccaacttcattcctttgttggactcaatcaacgacgtgtgtaaaaccgactga

SEQ ID NO: 8573 - RNA, 1722 nt, synthetic construct
  source 1..1722: mol_type = other RNA
atgaaaaattataaggatgcccggaaaaaagtagctggatggattaaggtgaaccaaaaggaattggtatatgttctgtatggtaagaaagtggactacttctacaaaagttttcccattccaaaaaagaacggtgaaagcagggtcatatatgcacctaaagacgagctgaaaatcatccagaagaggctttcacagaagctctatgaaacccaccgcgagtacatacgacagtacaggatcaaatcaactataagtcacggatacgaacaaaaacggaacattattaccaatgcccggaggcacaagaataagagatatctcctcaatattgacatctctgatttcttcccttcattcaattttggccgggtgcaagggttcttctacaagagtagagaattttccttttcgaaggaggaggcaacaataattgctcagctcgtgtgttataacgggaaattaccacagggggctccaacatctcctattatcagcaacctgatctttaatatcgtcgatcttagaatcctctctcttgccaaaaagtataaactttactacacgcggtatgtggacgacctgacattttccactaatcataagcgcttcaaggagacgtgcagcgacttcattaaagagctgaccgacctgttgaagaagaacgggtttgaaattaaccagggtaagacacgcctggaatactattcctccagacaagaggtgactggcttgacagttaacaagaaaatcaatgcctctcgtaactttattaacatcacacgggcaatggcaaatcagctgtatcgaaccgacgaatttcaaatagatggagagaagggatcgctggagaaactggaggggcgcttctccttcattaatcagctggattggttcaacaacaaactggaacacaaaataaagaagggcaatttcagtaagcgttataatagcggctttaacggccgagagaaacagtaccagtactttctgttttacaagtacttcttcaagccaaagaaacccactatagttaccgagggaaagactgatattttgcatatcaaagccgccttaatgaaatattcagacaggtaccccaatttgattgtgaaagaggacaatggcacctataagttcaagatctacttcctcaacaaaacaaagaggctcgagtacttcctaggcattagcgtggatggagccgacactatgaaaaacatctggaatttctatcacggcatggaaaactgcttcaacatatttaagtacctgtctgtcaagaacaataatgcaactcttgataaggctaaccctgtcattctgttatttgacaatgagcaggaaaaaaacagaccgctgaagaagtttttgaactacacgaagatcaatctcgaggaggctaatatttgccagaaactcaactttaacctgtacctacagaccattccccttatcgggaagttggataagtgtgaaatcgaagatctgtatcaagaggaaaccctgaatcttaccatcaacggtaagaaatttagccgtgacgccaaatttgatcagaaaatctatttcggcaaggcgatcttttctagatacatcatcgatcattacaacgagattgatttctccaatttcatcaagctactcgacagcatcaatcgcatctgtattaaagaccagaatgcgtacctggacataaacaacaaggtcttatccaactga

SEQ ID NO: 8574 - RNA, 1671 nt, synthetic construct
  source 1..1671: mol_type = other RNA
atgaatgattataagattgcgcggaaggaattggctcgtctcatcagcgtggacctgaaggaaatcacctatgttctctacaaaacgggtattgagaatagctacgtaagctttgaaattcccaaaaagaatggggaatctagggttatcgacacccccaaggacaagttgaagtggatccagcgaaagctgtcggagaaactctatcagatgcattctgattatatgactcaaaacggtatcaaaaccaacgtgtcgcatggcttcgaaaagaataaaagcatcattaccaacgcctacagacacaagaacaagaaatatttgctgaatgtagacatctctgactttttctcaagctttaatttcggtagagtgcagggatacttttataagtctcgggaattcatgttctccaaagagatagcaacaatcatcgctcagctagtgtgttacaaagggaaacttcctcagggcgcgccaacttcaccgatcatttcaaatctcattttcaacatcgtcgacattcagatcttagcacttgcaaaagaatacaggttgaactacactcggtatgctgatgacatgagtttttccacaaacaacaaagtctttgagaaggagtacttaaacttcatacaagagttgtccgaccttctcggcaagaatggcttcgagattaaccagaataaaactagactggagtactgtagtagcaagcaggaggtgactggccttaccgtgaacaacaaaataaacgcctcccaaaaattcattaagaatacaagggccatggccaatcagctgtataagaccaatagctttcttattgacggcaaggatgggactatcaaccagctcgaagggcgctttagttttatcaaccagctggattggctgaacaataagttagagtaccgcaccaccaagaagaaaaccaataagaaattcatctccgggctgaacgctcgtgagaaacagtaccagtactttctgttttacaagtacttcttccggcccaataaacctacaatcgtgactgagggaaaaacagatatactccatatcaagagtgccctgatgaaatattgcgaccgatatcccaactttataacaaaggtggccgatggagagtatgactttaaggtatatttcctcaacaagaccaaaaggctgaattatttcctaggcatttccggagatggagcagacacaatgaagaacatttggaatttctacagcggcaagaacaactacgaaaacatatacgagtacatgaagaagaagaatcaggccgagtcttctaataaagtcaatccagtgattcttctctttgataatgagcaaaagtccgatagacctttgaaaaaattcctgacgtattcagatgtcaagatggacgatggtcagatctttaaacaactgaaagctaatctgttcctgcaaacgattccactggccaatgggctagaggagtgcgaaatcgaagacctgtatcagaaagaagttctgaacgtgatcattaacggaaaaaagttctgccgcaacgaagaggacgactctgaaaagtacttcggcaagcacatcttttcagtctatataatggagcactacaatgaagttgactttagcaacttcttacctattctcgattccatcgatagtctgatatga

SEQ ID NO: 8575 - RNA, 1650 nt, synthetic construct
  source 1..1650: mol_type = other RNA
atggtggcaaagctgataaacgtagaattacgggctatcacatacgtgctttataagaaggggattgaaaagtcctataccagctttgaaatcccaaaaaaagccgggggcacaagggtgattgactccccaaacaaacagctgaagagaatacaacggcgtttgggcaaaaagatctatgacattcacaagaactacctggatcagaaccgtattgcatcaaatataagccatggttttgaagttggaaagggtattatcaccaacgcccgcatccataagaataaaaagtatctgctcaacatcgacatcgcaaactttttttcgagcgtgaatttcgggagggtacagggctacttcaacaaatcccaggagttcctgtttagtaaagaagtgagcaccatcatcagccagttagtatgttacgataaaaaactgccccaaggagcccctacctcgccaattatctccaaccttatcttcaacattgtggatctgagaatcctgtctcttgctaagaagtacaagctgagttataccagatatgcggatgacatgtccttttctactaataatagagccttccagactgactacattaattttattcaggagctccgcaatctgctcgagaatagcggcttcgaaatcaatgagaacaagactagattggaatattactcctcacgccaagaggtgactggactcaccgttaataaaaagatcaatgtcagcaggaagttcattaaacagacacgggccatggtggatcagctgttcaaagccaattccttttacattgacgatacttttgggacagaggaacagcttgagggccgactggcctttatcaatcaactcgactggtataataacgaattggagcctgagtccaaaaagcaaaaggctaataagaagtacatgtcaggccttaatgcacgcgagaagcaatatcagtacttcctcttctacaagtacttttttaagccctctaaaccaaccattgtgacagaaggcaaaaccgatatactgcatataaaggctgcgctaatgaaacacagtgatcggtatcctaacttaataacgaaaaatgacgagggcaagtacgtttttaacttgtacttcctaaacaagacgaaaaggctcaaatatttcttcggtatagtccagaatggggccgacactatgaagaacatctggaatttctataacgggaaaaacaactgcgacaacatcttcaagtacatcaatgataagagccagtatggagtcattcgaaacgtgaaccccgttatactcctctttgataatgagaaagaaccggacaagcctctgcggaagtttttaaatcacattggaatgcagtcaggaattgacaagccgtttctgaagctaaaggctaatctctatctgcagaaaatccccaggatcaacaattctgattgtgagattgaggatctgtactctaaagaggtcttgaacatttctatcgacggcaaaaaattcgaaaagaacgtcaaagacagtgtggaggacacattcagtaaggacatattctcaaagtacattcttgagcactaccaggaaatcgattttaaaaacttcctgcccttgctggatagcattaacaacatctgcaaaatcgagtga

SEQ ID NO: 8576 - RNA, 1677 nt, synthetic construct
  source 1..1677: mol_type = other RNA
atgagcttgtataaaaatgctagagaggaggttgcccggatgcttaatatccatcataaagagctgacttatgtgttatacaaggttggtatcgacaagtcctacaaaactttcaagattcccaagaaaaacggaaaataccgcattattaacgcccctactgagaaactaaaacgcatccagaagaaactggcggacgaactctacaatatgcatatcgaatacctgcacaacaacaatatcaagtctatcatttcccacggcttcgagaagaataagtctatcataactaacgccaccgtgcacaagcgtaatcgatatctcttgaatatggacatactcgacttctttccttcttttaacttcgggagggtacaggggtacttcgaaaaatcacgcgagtttatgttttccaaagaagtctcaaccgttatcgcgcagttagtgtgttttaatggcgaattgccccagggtgccccaacgagcccccttattgctaacctcatatttaacattgtggacatgcagattctgcccattacgaagaaatataaactgaactacacccgctatgcagacgatatgtcattttctacgaacgattacaagttcaagcagaattacgtgtatttcatcgaggagctcacaaatatcctggagaaaaatgggtttggggtgaacacagaaaaaacacggttacaatactattccaaacgtcaggaggtgacaggtttgaccgtcaacgataagataaatgccaacaggaagttcattaacgagactcgggcaatggctaatcaactctataaaaccggaggcttcaaaattaatggcgaggctggcagtctcctgcaactggaaggcagattctctttcattaatcaactggataagtccaacaacaaaatgaatggggtgagcgggaataatagatatatcaacaagttgaacgcccgagagaaacagtaccagtatttcctattctacaagtacttctacaagccacagaaaccgaccatcgtcacagagggcaagacagacattattcatataaaggccgcacttatgaaatactgcgatatgtttcctaagctcgtcagtaaaaacgatggacactacgatttcaaaatttcgtttctgaacaagaccagtaggttgaagtatttcctgggcatcagtgagtatggggctgacgcaatgcttaatatctggaacttttacaccggcaataataacaggaccaacatatacaagaacatctgtgacaagagcatcagagataagaatgagaacataaatcccgtatttcttctgtttgacaacgagaaggaatctgacaagcccctgaaaaagtttctgggatcaaccaaaactgaactggaggatagggaaacactgaagctgttaatctacaacctgtatctcctaaccattcctcttgaaaagggtctgaaagagtgcgagatcgaagacctatattccgatgaactcttgaacatcataatcaatggaaagaagttcagcagaagcagcctggatgatagtaagaatcactttggaaagcatcggttttcaatctatgtgcttaacaactacgaacacattgacttcgaaaaattcctcccactgctgaatactattaactccgtcatcatcaacaacaataatagcaattga

SEQ ID NO: 8577 - RNA, 1524 nt, synthetic construct
  source 1..1524: mol_type = other RNA
atgcatgccccgaaagataatcttaaatggattcagcggaagctgaacaacaaactatttgaaattcaccttgactaccttgaggataataacatcaagtctatcatctcacatgggtttgagaagggcaagtcgattattacaaatgcctcagttcataagcacaaaaagtacctgctgaacattgacattgcagactttttccctagtttccactttggtcgggtaaggggctattttcacaagtcgaaggagttcaactttagcaaagaggtttcaacaatcattgcacagctaacttgttataaagggaagctgccacagggtgcacccacttctcccatcatctccaactttatcttcaacatcgttgacctgcggatcctcaagcttgcaaaaaattacaaactggactatacccgctacgcagacgatatgtccttcagcaccaataacaaagcgttcaaaaaagattacctggccttcattcaggaactcaaggagctgttggagaagagcggcttcgagataaatcaaaataaaacccgcctcgaatactattcttcaaggcaggaagtcacaggtttgaccgtgaatgacaaaatcaatgccagtcgtacctttatcaataacactagagccatggctaaccagctctataagacgaatagctttcaaatcaatgggaaggacggtactataaatcagctcgagggaaggctctccttcatgaatcagttggactttagcaataacaagctgggatgcagaattactaaaaaaaaggcgaaccgcaagttcttttcagggctgaatgtgcgtgaaaaacagtaccagtacttcctcttttataagtatttcttccgaccagctaaacctacaatcgtcacagagggaaaaacagatgtgctgcatattaaatccgccctgatgaagtattatgaccgataccctaagttaattaccaaaacatctgacggcaaatatgaattcaaggtctacttcctgaacaagaccagaagattagattacttcctcggcgtaagttctgacggcgctgataccatgaagaacatatggaacttttacaccggaaaaaacaattgcgctaacatattcgagtacatcaacaacaagaatcagaatgagagtttagataaggccaacccagtgatattgctgttcgataacgaacaaaagagtgacagaccccttaagaattttctgaagtacctggacatcaaactcgatgatggacaaatatccaaacagcttagggctaacctgttcttgcaaacgatacccctcatgaaggggctagaggaatgcgaagtggaggacttgtaccgggatgaagtgctgtctgtgactatccatggcaagaacttctgtaggagcgccgaagatgactccgagaaatactttggaaagcacattttttccatgtatatcaaggagcactataaccgcattgactttagcaatttcctggagatcttagatagcattaacaatctgtgttga

SEQ ID NO: 8578 - RNA, 1752 nt, synthetic construct
  source 1..1752: mol_type = other RNA
atgtcctcatacactttgttcctcttcatcatgaacaactatagagaggctaggcagtcggtcagtaaactcattggtatagagttgcggaaactgacatatattctctacgagaagaagacgcatagcttttatagcacttttatcatcccgaagaaaaacggaggcaaccggaaaatctacgcccccgatgacgaactgaagtgggtacagaagaaactggccaataagctacattcaatccacgcgcagtatctggaggacaataacatcaagagtgttatttcccacgggttcgaaaaggacaagaacattataagcaatgcgtacatacacaagaataagagatttgtcctgaatgtggatatctctaactttttcgatagctttcactttggccgagtgaaaggcttctttatcaagaacaaggcattcaatttcagtgacgaggagtcgacaattctggcccagcttgtctgttataatggcaaattacctcagggagcacctacctcccccctcatcgcaaatctgattttcaatatagctgatctgcagattctgaaactagctcgcgcctacaagttgaattatacccgttacgctgacgacctgtctttttcaaccaacatctcaacctttggatctgcctatagtctttttctggaagaactcagctctatactcatcaaaaacgggtttaagttgaatgaggataagactaggttgcaatttttctccagcagacaggaggtcaccggcatcacagtaaatcagaagttgaacgtgagtaagaagtttatcaaagacacaagagctatggccgacaaactttacaaaaccgacgagtttcagattaatggtaccaatggcaccttaaatcagcttgaagggcggttctcattcatcaatcagctggattggttcaataataagtgcgagtacaagattaacaagaaatcttccgagaagaagtatattcatagcctgaacaccagggaaaaacagttccaaatcttcctgttctataagtacttctacaatcccgataaagttactctcgtcactgaaggcaaaacagatataattcacgtgaaagctgcactgaaaaagtactacaataagtaccctgaactaatcgtgaaaaaaggtgacgaattcgagttcaagattaacttcctgaaaaggacagaccgcctggcctattttctaggtatcgttagtgatggagccgacactatgaagaacatttggaacttttacaccgggcataacaatcactataacatcaacgactacttagagaacaagagcctcaacaatataaaacaagtgaaccggaaaccatctattctgctgtttgataacgaacagatcaaagacaaaccccttgattctttcctgaaatacacaaatcttgagctgaaagataaccagatctccatcaagttaattagcaacttgtacctgcaaacgtttccactcatttccaatatgcgcgaggccgaaatagaggatctctattccacagaggtgttaaataccgaaatacgaggaaagacctttaagaaagacaagaagatcaacaagaacaagaagaaaaacagcgacaatgatactgaaagctccaataagcattatgggaaacacattttctcccaatatattaaggagaactacgcatcaatcgacttcactaacttcatcccactccttgattctattaacacgatcgtgatgaataacaaatga

SEQ ID NO: 8579 - RNA, 1455 nt, synthetic construct
  source 1..1455: mol_type = other RNA
atgaaccggtacaaactggccagaaagaacatagcaaacttaatcgatgtcaaccccagtacacttacttacgtactgtatgtcgagaagatcgagcagtcatacaagataataaacatccctaagaagtctggcggaactagggatatctgcatcccttctcctcagttaaagagcgttcagagaaaactggccaatatgctgtgcaccaagcactccgaatatgtggtctacaataatatcaatcaggctgtgtcccatggatttgagagaaagcgatcaataataaccaacgcaagcaatcacaagaataaaaagtacctccttaacgtggatatcctggacttcttcgattctttccactttggccgcgttaaaggcttcttcaagaagaacaggaattttgtcttttccgaggaggaagccaccatcatcgcccagcttagctgctataagggtaaactgccccagggagctcccacatctcctattatcgcgaacttgattttcaacatagttgacctccagattctcaaactggctaagaagtatcgcgtgtattatacgcgatacgccgacgatctgtcctttagtaccgacatgaacaaatttaagaacatgttaccctcgttcctaaaggaactgaaactcctattggaaaagcacgggttcgagttgaacgatgaaaaaacccggctccaaacgagagagtgcaggcaagaggtgacaggcgtgacagttaatgaaaagctgaatccctgtccaatttttgtgcgtaaaactcgtgccatggctgaccggctatacaagactggagatatttacctggaaggttgtgtggatgatgaggacatttctctgaaaaaaaaacggttggaggggcgcttttgctttatcaatcagttcgactcctttaataacatgattgagtatgggcataacaatagtaaactctataagaagcaccaagcgaagttgaataaacgcgaaactcagtatcagaggtttcttttctacaaacatttctacaacccagacgcaccactgctggtgaccgaaggtattaccgacatcatccacattgagtcagcactgatgaagcattacgtgagatatccgcgactgatcaccaaaacagaaaaaggcttcgagttcaatttcaaattcttgaatcggaccgataaactcaagttttttttcgggattagcgaggacggggccgacacaatggtcaacatctacaattattacagcggtacaaactgtacgaacatcgataagatccttgaaaagaaactgccccctaaacaatccatgggaactaggaatccagtaattctcatttttgacaacgagcagcagggcaacaaaaaaccgctgaagaagttccttaactactcacggaagaagttaaatggcaatctctatagtcgcatttgtagcaatctgtactga

SEQ ID NO: 8580 - RNA, 1632 nt, synthetic construct
  source 1..1632: mol_type = other RNA
atgtatataaacgaggtcaatgaccgtgaaaggttggcaatattgctggacgtgccgttacagaagctgacttacatcttgtatgtcaagaagactgacaattgctacaagcaatttcagatcccaaaaaaagatggtaccatgcggatcatttgtgccccgaatgatgagcttaaagtgattcaacggaagcttgccaatgagctgtggaagtatcacttatactatatggagaagaagaacatcgagtccaatatttcccatggctttgtaaaaggacgcagcattctgactaatgcaaacatacacgtgaacaagaagtacattgtcaacatggacattgaagacttttttcctagtatccatttcggacgtgtccgagggtacttcaataaatccaacgagtttaacctgtcagaaaatgtctctaccattatcgcccagcttacatgttatcaaggcgtcctcccccaaggtgctccaacatcccctatcctcgctaatctcctctgtaacattctggatatgaggctcctgaaagtgtgtgccaaatacaaagttgactacagtcgatatgccgatgatatgacatttagcactaacgacaaatacttcatcgtgaatcagtctaggttcatagacgagattgagaaggaagtggaggaattcgggttcaagatcaataagaaaaagacacgcctggacttctacagcagtcggcaaaatgtgaccggattgatcgtaaatcagaaaataggcgtggacaagaagtttagaaaagacacccgcgcaatggcttattcactctacaaaaacggagagtttaaaatagatggagaaatcggcagcgtttatcagttggagggtagatttgcttttatcgatcagattgacaagtacaacaacaaaagcgacatccagaaaaatatatggggcctcaattccagagagcgcgagtacctaaagttcctgttctataagaatttcttcgccactaacaagcccgtgataatcaccgagggcaaaacagacatttactatttaaaggccgctctccagaagtattacgtgcagtatccaaaactgattacgaagaaagatgagaagttcatctacaacattaacttcttcgaaagaaactccaagacccagtttttcttcaacattaaaaaggatggggcagatacgctcaagaacatctataacttgtacaccgggttaaacaactttcccaatctttacaagtactttcttgaagtttgcaagtatatccctaagaccccagtgatcctgcttttcgataacgaacagaaaactaatcggcctctgaagaatttcctgaagtacatcaactacaaagatgggaaattgattggaaagaaatgcctgattggcaatctgtatatcatgacaaaccccctagtgaaaaatctggaggagtgcgaaattgaagacctgtttgacgatgaggtactgaatgttgagcttgcggggaaaacgtttagcagggacaagaatatcgatctctcaaaaaagtttggcaagtctatttttgcggactatgttctgaaaaactacaagtcgataaacctagaaaacttcaagcccatcctggattctatcaatgaatga

SEQ ID NO: 8581 - RNA, 1686 nt, synthetic construct
  source 1..1686: mol_type = other RNA
atgaagaacatcaaaacccgaaatgacttcgccaagtttatcggggtgaaattacagactctgacctatctcctatacattaagaagatcgacaactgctacaatactttggaaatccccaagaagaatggggataccagaactatttgtgtcccaaataagaatctgaagaaggttcagaagaagctgtataacaaactgtcgacctattatgatgaaatcaagacacagaacaactttacctcaaaaatttctcatgggttcgagaagaatagaagcattgtaacaaatgctgaagtgcacaaaaataagcgctatgttgtgaatctggatctgctggtctttttccccagtataaattttggtcgcgtgcggtcctatttcatcaagaacaactacttcgagattaatgacgacatagcaacgatactggcccagctcacctgttacaaaggaactctgccacaaggggcgtccacctctccattgatcgcgaatatgatatgcaacatcatggacatacggatcctgaagatcgcaaaaaaatatcgtctagactatacacggtatgctgacgacttgaccttttccacaaacaataaatacttcctcaacgattacgacaagttcctggaggacataaagaatattatccataggagcggctttgagcttaattctaagaagactaggctgcttttctctaatagtcgacaagaggtcaccggtttagtggtgaataaaaaaatttccgtgcctaaggagtattataaaaacacaagggctatggctcactcgttatacaagaatggctatttcctgattgatgatgaggtgggtacaattgagcagttagagggcaggttctctttcatcaatcagatcaatctctacaacatcgataacaagaagaagaatatgtggcacctcaactcaaaggaaaaacaataccagaagttcatgatctacaaaaccttttatgccaacgaaaaacctctgatcattactgaaggaaaaaccgacgtgttgtacattaaagccgcactgaagaaatactacaagtactttcccaacttgatcacaaaaaaagacaacggcaattttgtgtttcacgtgaactttttcaagcggaaacagaagcactcatattacctcaatcttgttaaagacggcgccgacactattaagaacatctacagcaactgttacattaagacgaagaacaacaagaacattacaacggtccatgattttaaaaagctatgcggggaaagagagacaaacccggtcattcttatctttgataacgagatggttagcaataaagaccgccctctgaagaaatttctcaacgagatcaaggtaaatgcctctcagaaagataaactgaaggaaaacctgtacataaacatctgtgataacctgtacttgtgcacttaccaactcaacaataaagaggcctgcgagattgaaatagaagatctttttcccgcagatgtcctggaacatgagattaacggaagaaagttctccaaaaaagatagcacgcacgacaatggcttctatggaaaaaacgaattcagtcagtatgtatacagtaattacgagagcattgacttctccaatttcataagccttctctcagctattaatgagatcatcgaactctatcctaacaacatctga

SEQ ID NO: 8582 - RNA, 1983 nt, synthetic construct
  source 1..1983: mol_type = other RNA
atgtttttcaaggagattaaagacttgaaccatttgagtagcatcttgggaatcgacaggaatacactcaacaacctgctaaatcagaaatatcgtgagaagctttatgagacatactacattcctaagaaggatggaagtgaccgacaaatctgtgcccctaaagagcctctaaaatcgattcagaaaaagatcgcggagctactctggcagaatcaactgtgggttaatcataagaaggaagagaagtatatccaggacaaaaagatgttgcgagaagagaagtatcgaatacagacgttctctgagacactggaggatataaattccagttacaagctcaccctggagattaaaaaggactacagattccaaaacgacatcattcaggcttttgaaaagggaaaatccatcctgactaacgcggagatccaccggaataaaaagtacatcatcaagatcgaccttgaagacttttttgactctttcaccttttatcgggtgaagggttattttgaaaagaaccgggatttccagctgagcaaagaaatctccatgaccttggctaatctcgtgtgctataaatctaaattgccacaaggggccccctcatccccgatcctgactaatatgatcgggcgcattctggattctcgcattctgaaaatatgtaagcggtataggcttaaatacactagatacgctgacgatatgaccttcagcacaaacgatgatactatcactaagacactggatgacttcctcagcgagctggacaatgtgattgagaattccggattcaaaatcaatgagaagaaaacacgtgtgagctactggaattcaagacagctggtgaccggcttagtggtgaataaacgcgtcaatatcccgcgggagtattacaaggcaactaagggtatggcacaccagttatacctaggcaacgacgtacacataaaaggcaagaagattaagaagcccattaatcagttaaccggccgctttgctttcattaatcaggttgaaaggttcaacaacgaaagaaccaacctggaacaaacggaattctcatctaaggaaaagtcctttcaaaggtttctcttctacaagaatttctacggtgcagaaaaacccgtgcttataacagaagggaaaactgacataagatatatccgcgccgccctgaaaaaattacacgataagcacccatcattgattactctggaggaaggcgggaaagcaaagtataagctgacattcttcaagaaaagtgatgttattgagcagtacctggatctcaataaacatgggggaagtattttcgaaaagatttggaacctctattgcaacaatcagatctttaagaagaagaacttcaacaacgtctacgagtatttcaagaggatcgactcgaaatacaaatcccctgtaatcatgatctttgataacgaactggacgtcaaagactcaccaatccagcagtttataaacaagttcggctctaatgttaagatagtgtggaacaccgagtataaagagaacatccatgtcaaacttcaggagctgaaacaggccggcaagacccggcaacaaatagatagcgagattaagaagtttcagaaagactttacggagaataagaaaacccagcttattaccgaactcaggaagaaggattacgcccatttaaaggacaatttgtacctgatgctgatcccccttgtcaaaccaaatcagtctaagagtgatattgaagccctcctcctgcccgaagacattgagaaaataaaccagaagcttggtaagcaatttaatccttcagagaaggagtttattgaaaaggacaactactccaaagataaactgagcaagcaggtaatctataactaccagaacattagctttgagaactttgatagcctgttcaagaacgtggagaaaatcatccagcacaacttcctcaaaagagtgttcaaaaaatga

SEQ ID NO: 8583 - RNA, 936 nt, synthetic construct
  source 1..936: mol_type = other RNA
atgattttcaaagagatcaaggatctgaatcatttatcttcccgactgggcatcgaccggaacattttgaacaacttgttgaaacagaagtaccgcgagaagctgtatgatgtgtacaatatcccgaaaaaggatgggagcgatcggcaaatatgtgctcctaaagaaccccttaaatcggtccagaagaagattgctgagctactgtggcaagagcagctgtggatcaatcacgaaaaagaggagaagtacattaaagacaagaaaatgctcagagaagaaaattttcgtacacagaccttttctgaagcaattgaggatatgaactccggctacaagctcactttggagacaaagaagtattaccggtttcagaatgacataattcaggcctttgaaaaagggaagagcattctcacaaacgcacaagttcatagaaacaagaagtatatcgtgagtatagacctgaaggatttcttcgattctttcaccttctaccgcgtgaaagaatacttcgagaagaatagggattttcagctgagtaaggaaatagccatgacccttgccaacctggtctgctacaaatccaaattaccacagggtgccccaagctcacctatcctcacgaacatgattggacgcatccttgactcccggattctgaaaatctgtaaaaagtataggctgaagtacactcgatacgcagacgatatgacgttttcaaccaatgacgacgttatcattaaaaaactcgacgacttcctaagcgaccttaacagcatcatcgataacgcgagttttaaaatcaatgagaagaagaccagggtgtcatattggaattctaggcagctggtaacaggactcgtcgtgaacaagagagtgaatacccccagagagtattataaggctactaactggactttctgcatccactga

SEQ ID NO: 8584 - RNA, 1053 nt, synthetic construct
  source 1..1053: mol_type = other RNA
atggatctgaaggacttttttgattcctttaccttctacagggtgagaggctacttcgagcaccataaggactttctgttgagtcgcgagatagctatgaccctcgctaatcttgtttgttataaatctaagctgccgcaaggggcacccagctcacccattctcactaatatgatcggcagaatccttgattccagaattcgaaagctgtgcaaaaagttccggcttaaatatacccggtatgcagatgacatgactttctccacgaatgatgatgactgttttgcccgggtaaaggactttctccatgaattgaacatcatagtggaggatgcagggttcactgttaatgataagaaatcacgtatctgctactggtactccaggcagactgtgacaggattaatcgtcaacaaacgaatctctgtgtcgaagaagtactacaaagctacaagggggatggcccaccagctgtatataggtcgcgaagtgtatgtcaataaggagaaggtggacaacccaataaaaattctgtcaggtagatttgccttcattaatcaagtcgaccagtatagcgataatattctgggtctagagaggaatatatttagtacccgggagaagacattccagagattcctgttctacaaatacttctatggcattgaccgtcctatgctggtgacggaaggaaagaccgacattcggtatatccgcgcgtctctgaaaaagctgaataaaaagtttcccgagctcattaacttggagaatgacgggaaagccgaatacagcatcaccttcttaaagaaatctacagttcttgagaagtacctcggcctaaacaagcacggcggaagcatctttgaaaaaatctggaacctgtatctgaacaacaacctcttgaacaacaagaactttggcgacatctataattacttcaagaggatcggaagcccatacaaaagtcctgtaattatgctcttcgataacgaattagacgaaccagatcgccctattaagcagtttctggacaaaatccagaaaaatggatga

SEQ ID NO: 8585 - RNA, 1641 nt, synthetic construct
  source 1..1641: mol_type = other RNA
atggaatttaaggacattactgacaagagactcttggccaaatttctgggcataaaatacaaggaactgacttacatcctttactccaaacgtaccgaaaatctatatcagaccttcgagatacctaaaaaaaatggaaagatgcgatgcatcaatgcccctcaagaaccactgaaatacgtgcagaggaatctggccaaacagcttatatcgatccaagagaagtactatctggagacgaacaacatcatacaaggctttaccaaaaaacgcgacattatcagcaatggaagctaccaccgtaacaagcgatatatcctgaatttggacctggagaactttttcgactcatttcacttcggcagggttaaaggctatttccagaagaaccagtattttatgctcaactctaatgtcgcgacatgtttggctaatatcgcctgctataaagggaagctgccccagggctccccctcaagtcctgtgattacaaatctgatttgttccatcctggatagacgcctcgcaacaattgctcagaagtatcgcatgacctatacccggtacgctgatgaccttaccttttctactaatcgcagagacttcttagaaaacaaggatgaactcatctccgagctctacgcagtaatcgataaatccggatttaaggtaaacaggaataaaactcgggtgctgttttggaacagcaggcaggaggtgacaggcttagtggtcaataagaagatttctgtcaagagagaattctacaaggagactagggccatgcttgatcatctgtacaagggtctgattgtcgagcacaatgggattgaagtttccttgcagcagattgagggacgactctctttcattaaccagatcgataagtacaacaataagcatgggggggagcgcaagaatgtgcaaaagggaatgaacgggagagagaaagagtaccagcagttcctgttctataagtacttcttttgtccttcaaagccggtgattgttacagaaggaaagaccgatcccgtatatattcgtagtgcgcttcagaaattctatatccaatacccaaagctcatccggaaaaaggaggatggttcattcgagtacctgattacattcctaaagcggactagcagactggagttttttttggggatccagcaagatggcgctaacgccatgaagaacatatataacgaatatgtgggcaacaaccagtatccaaatctatatgaacctcttcggaaatacgggctgaagtctagcaaccccgtgatcctactgtttgacaatgagacagtcaccaagaggcccttgaaggactttctcaatcacatcaataataagtcaggtatggactatcggttgtggctgaacatacatgagaacttatacctcgctaccatcccgctcgtgaaaggacagaaagaatgcgagatagaagacttattcagcgatgaagtccttagtcacgagattgatggcaaatacttcgaccgcaagggcaaagatggtgagaaaagctacagtaaacaaattttcgcatcttacatcgcccagaacatcagttccattgacttcacgaactttgttccactcctggacgcactgaacgaaatcgtgaaaaattga

SEQ ID NO: 8586 - RNA, 1710 nt, synthetic construct
  source 1..1710: mol_type = other RNA
atgttgagaattaaagaatgtgataacgtgtaccagctggccatgtgcctgaacctgaatacggcagtcatcaccaacatcctctataatatcaaaactgacaactgttaccgccaattcaaaattcccaagaagaatgggaagacaaggactatctgcgcaccaaatgctgaactgaaaagcgttcaaaaacgcctagcgaacgcgctctactatgaactcaaactcatccgggaagagaacaacatcaattccaagatttcacatgctttcgagaagaagaagtcaattatctctaactgcgagatccataagcggaaaagatttatcctcaatgtggacctcaaagacttttttgatcatttccattacggaagagtctatggctatttcctgaagaacaagtacttcttatgcaccgacgagacggctcgcactatcgctaacatcgcatgttttcagggaaagctgcctcagggagctccaacctcacccattatcacgaatctgatatttcaggccgtagacgcaaggattctgcaacttaccaaaaaacaccacttggactatacacggtacgcggacgatcttacatttagtactaatgagcaggatttcatagagacttataacgacttcctaaacaagcttaccagacttatagagaagagcggatttgagattaatcagaacaagatccgaatttcgtgtcacgatagtcgacagaccgttacaggcttaatagtaaatgacaagatcaacgtgtgcaacgactattataaactggtcagggcctacgcccactccttctacaagaccgattcctttgatataaaggataacaacggcaaagtgattaaatctggcaacgccaaccaactggaaggtatgttagcctttacgcacatgatcgataagcacaataaaaccatcaagaagaatcctgctgagctgcagcattctttaaataaacgggaacgcgagtatcagcgcttcctattctataagtacttctaccacaatgaacgtccactgattatcactgaagggaaaacagatcagatttatctgtgctgtgccatgaagaaatattatagggagttccccgaattgattgaacaaagaaagtccggctttcactttaaggtgcagttcatgaaaaaaagtaagaggatgttggagatgttcagctttgtgcaggatggtgccagcgcaatgacaaccctgtatctcaactactacaagaagaattccaagtttcccgattattaccaatacttcagtcagatcacatgcaagtcagcctctaatcctgtcctctttatctacgataatgagctgtgttctaaggacaaaccactttacgagcttatgaagaaggagaagaaatccatggttgacaaaatagaaaaggacgggtgggtgtcaatgagcagcaaaaagaatttgtacattgtcaccaatccgctggtggacagtaaaaaagagtgcgaaatcgaagagttgtttaccactgagacactgcagaaggaaataaacggtaaaactttcagcctcgaaaagaattacgacaccaacgagcattttgggaaagacatcttctccaaaattattgctaaggagtacgagcagattgatttctctcggttcattccttttctggaacgaatacgtgatgccatcgtggactacaacaatacagaggcatga

SEQ ID NO: 8587 - RNA, 1695 nt, synthetic construct
  source 1..1695: mol_type = other RNA
atgcagatgattaacgaagtcactacaagagatgagctagccgatctggttggaattccatataggaaactgacatatatcctgtacaagaagtacgtggaaaatatgtatacttccttcgagatacccaaaaaaaacggcggcagacggctaatcaattctcccaatgaagaactcaaatacatccagaagaacttagttaaagctctctacagatatgagcagacactgcttgataaggatataaatattcacagctcagtgtcgcatgcattcgagaacgaaaaatctatcttcacaaatgcccgtatccaccgcaacaaacgctttatcatcaatgtagatctggagaactttttcgactctattcactttgggagggtgagaggttactttctaaagaacaactatttccgactgaccgacgaagtagccacagtgatagcgcagcttacatgttataaagggagtctgccccagggagcaccaacttcgcctataatctccaactacatctgcaacatttttgacttgcgaatcatgaaactcgcgaagaagtacagaatgaattacactcgatatgctgacgaccttacgttctccaccaatgataaacactgcattgaatatcaggacgagtttcttttgaagttaaagaaggagattgacagggccggcttcagcatcaaccagactaagacacgcatttcttacaaaaacagccggcaagaagttaccggcgtagtggtcaatcaaaaaatctctatcaagcgtgaatactacaaaatcaccagagcaatggctgataggttgtataagactggggaatttttcatcgatggggagaaaggaagtatccatcagctggagggaaggtttgattttataaatcaggcggagtggtttgacaataaatacttcaagaagaagcggaacttctattccctgaacggccgggagaaagagtacaagaagttcctcttctacaagtacttctttgcaaacgagaaaaccctgatcatcactgaagggaagaccgatgtgatttatatcaaggccgcccttaaaaacctgtacaaagagtatcctgagctcgtcacgaggaacgagaagggtgagtatcaatacaagttcagtttcctgaaaaagagcaaacgcctggactatttcctgaatatcaaaaaagacggtgccgacaccttgaagaacatttatgcttattacagcgggaagtcagaggttaactacccagagtatatgacggaattcgagaatagtcagggaattcgggctcagaatgccgtgattatgctgtatgacaatgaactgcagcagaaaaccaagcccgtggcaaaattttgtaaagtgaacatgtccgacgatcaaataaagaagctcaagaaggaagaatatgtcctcctcaattccaacttatacctgatggtgacccctctgcaaaaaggcaagagcatttcagatattgaggacctctttcatagcgagttattgaaaacaaagcttgacggcaagatttttaccaagaatgacaagtacgataccaaaatctactatggtaaggatcgcttttcaaagtacgtcatgaaaaattacgccaaaattgacttcgaggcttttaagccgttgctgaataacataaagaagatcgtgtacgaatacaaaaagatagaggaatga

SEQ ID NO: 8588 - RNA, 1689 nt, synthetic construct
  source 1..1689: mol_type = other RNA
atgaaaatgattaacgaagtgaagagcaggaacgagctggcggatctattaggcatcagcaggaaacggttgacatatctgctgtacattaagcacctcgaaaacatgtacacctcattcgagattcccaaaaaatctgggggccagcgtctcattaatgcacctaacaaagaacttaaactgattcaacgacgtctggcgaatgaattgtatgagtatcatactagactcaacaaggataagcagatcaacggggtgtcccaggcctttgaaaaagagaagagtatcttcaccaacgccaagatccaccgcaagaagcggtttatcatcaatgttgacctggagaatttcttcgataatattcacttcgggagagtgcgcggctatttgatcaagaacaaagacttccaactgtccgaggaggtagccacagtgatcgcacagttgacctgtttcaaagggagccttcctcagggcgcacccacttcccccatcatcagcaactacatttgcaacatttttgacctgcggattattaaactggctaagaaatacaagctgaattataccaggtatgccgacgatctaactttctctacaaacgacaagtacttcatggagaattgggaagcttttttaggcaatttggagaaagaagtcgaaagagccggcttccacctcaatgagaaaaagacgcgaataagttatgaagattctaggcaggaagtgaccggagtgatagtaaataagaagatcagcatcaagagagagtactataagaatactagagcaatggccaacaatctgtataagaccggtgaattctacattaacggggagaagggcagtctcaaccagctggaaggtcggttcacattcattaaccaggctgagtgctttggtaagaagattaactttcagcaactaaatggaagggaaaaagagtaccagaagtttctctttttcaagtacttttacgctaacgaaaagccattaatagtgacagaggggaaaactgatgttatttatcttaaggcagctctcaagaaaatgtacagggactatcctgagcttgtgacccgcgatgataaaggaggtttccattacaacctgagctttctgaagaagtcgatgcggctcaaaaattatcttaatatacagtcggacggagccgataccatgaagaatatctacctgtactactccaaacaatcaaataagaactacccgcaatacatcaaaaaatttgagaacatacggggttcacgcccacagaacgttgttataatgctgtttgacaatgagttgaaagaaaaagatcgacctatctctaagttttgtaaaggaacagtcaaggatgagcagaaagtcgagctgcaggacaagctccatatactgctggaaactaatcttttcctgatggtcacccccctcaaagagggaaaagagatttccgacatcgaggaccttttcccagatgaagtgttaaacatcgagattgacggcaagaaatttacgaagaaggacaaatacgacacaaaggagaattatggcaaagatcgctttgccaagtatgtcatgaagaattatgggaaaatcaacttcgacgggtttagaccactgttggataagatcaagttcatcatcatgcagtacaaggaaggagacaagggcgaaaaagagaactga

SEQ ID NO: 8589 - RNA, 1674 nt, synthetic construct
  source 1..1674: mol_type = other RNA
atgttattgtcagagatacatacaaggtacgagtttgctcagctgctcggaatcgaactgaaggaattgacctatctgctttacattgagaaggttgaaaacctgtataccacatttagtatccctaaaaagagcggtggcgagaggtgcatcaatgccccccaaaagaagctcaaatatatccagaagctcctgaaggtgcttttagaatcatacgaagaggagatatgttgtgccaatcatattaataccggcgtggctcacgcgtttaagaaaagacggagcatcattacaaatgcccagaagcacaagaacaagaagtacatcatcaacattgatctcgagaacttctttgactcttttaatttcggtcgggtgagggggtttttcataaagaacaagtactggaaccttgacccaaacatcgccacgttgattgcccaaatatcatgctataatggggttctgcctcagggagcacctactagccccatcatcacaaacatgatttgtaacatcatggactggcacataactaaaatcgcccagaagtacaaattaatctacactcgctatgctgatgatcttacctttactaccaacgacaagaaaattgtggacaaatacgatgacttcctgctggagctgaatagagagatcgaaaaaagcggtttcaaaataaacaactccaaaacccgctttactaacaatcttaatcgacaggtcgtcactgggttggtcgtgaattccaaagtatctattaacagggagtactataagaagacatatgcaatggcccactccctttaccggtccggcgaattcaccattgatgaaaaaaagggcaccattaatcaactcgagggcagattctccttcatcgaccagattgacaaatataacaaccggatcgattgtaacataaagcacgacatttggcatctgaatcaccgcgaaaagaagtaccaggagttcctgttctacaagtacttctgcgctaacaatcgccctctagtgattactgagggcaaaacagatattatctatctgaagaccgcatacaggatcttgcgtcaggacgacacaaaattatttatcccggaggacaatgaaatagattacggcgtatcttttctgcgtaaatctgaccgactggactattttttcaacctgaaaaaggatggagcaagccccatgaccaatattcttgatagttatctggggaataagacgtttaaaatcagctattacgagcagctaatggcgaaatataaaataacgccaaatgctccagtcattctgttgtacgataacgaactcaataaaaagggagcagtgagagatgttattaactcgaagaagctggacatcgagtcactaaaggagaaaaactacatcagagtcataggtaatctgtatattcaagtggtacccctcgttaaagggaaggaagactgcgaaatcgaggatttgattacagaaaatgtggatgacctcatcatcgaggggcggcactttgaccgaaaaggaaaggccgacaaagaaaagttctacaataaagacgtgctcagtcactatatcgaggaacatgagaacgagttccatttcgattgcttcaaagagctgtttaagacctgggatctcattatcgaagattacaacagtctgaagtga

SEQ ID NO: 8590 - RNA, 1722 nt, synthetic construct
  source 1..1722: mol_type = other RNA
atgaacttagaggatgtgtgtacacgcaacgacctcgccgattttctgggaattaagagaggcaaactgacctatatcttatacatccagaaagtcgacaccatgtatagtacctttagtatcccaaagaaaagtggcggtgaacgcacaataaatgcccctaatgacgatcttaagcagatccagcgtaaactggcagatgcactgtggaattatcaggtgaaaatatgggagaagaacaagatccagaccaatatttctcatgcgttccagaagagtaagtccattgttaccaattctatgagacacgtcaggaaacgatacgtgctgaacatcgatttaaagaacttctttgactccttccatttcggcagggtgcgggggtttttcatgaaaaatttgttctggggcatgaccgaggaggctgctacagtgattgcacagctgacctgctataagggcgccctgccacaaggtgcaccgacatctcccattatcacgaacatgatctgcaacataatggatatgcatctactgtctattgccaagagatacaagttgaattatactcgatacgccgacgacatgacattctccacgaatgataaacacttcatggaacactatgacgctttctataaggacctctcaaaagaagtattgggagcgggctttcagataaatgaagaaaagacacgcctgctgtacaatgactcccggcaagaggtcaccggactgatcgtaaataacaagatttccatcaaacgcgagtattacaaaaatacccaagctatggcacactcgctgtacacgaacgggttctttactataaacggggaggatggaactatcagccaacttgaaggacgcttttcgtttattgatcagatcgagaagtacaataactcccacgacggggccaaacatagtgccatttcactcaaccacagagaaaagaaataccaagagttcctgttctacaaaaacttctgtatcaaccctaagcccctaatcgtgaccgaagggaagactgatattctgtacataaaaagcgctctgaggaagatgtatctccagtatcctgatctcatagagaagaaagacaaccaatggatctataatctatctttcctgcatcggagctctaaactgagctactttttcgacttcaacgtggacggggcagataccatgcagaacatctataatatgtacaccggcagcggaaggactcacgttaattattacagacattttcgggagaagtacgatttaaatatgcatcagcccgtcatactcttgtttgacaacgaatttgagaattccgaaaagcctattaagaagttcatgaacaacattggtagcgataaaaagggcaagaataaggccaagggcgaatccaaacagcgtgagacatcacttcagaacgagctgtttctgcaccttattggtaatctgtacgtgcaggccgttccacttgctccatccgagacaagcggagaaatcgaagatttgctcgggaaaaatattctcaacatggagattgacggcaggaaatttgaccgaactggtaagaaagataagagccggttctataacaaggacattctctcaaagtacatcctctctcactatgaggagatcgacttttcattgtttatcccccttttcgacacttttaggaaaatcaaaaacgactacagcgatcagaaaaatacttga

SEQ ID NO: 8591 - RNA, 1695 nt, synthetic construct
  source 1..1695: mol_type = other RNA
atgtcctataatgaggctagaaataatgtggccgaaaaactcggtgtaccaccaaaactgttatcgtatctgtttagacgtgggatcgataagttctacaaagagatagaaatccccaaaaaaacagggggactacggaaaattatgatcccccagaatcagttgaaatctgtgcagaaggagattctgaaaatgctacagaagatttacatcgagaacaacgtggaaaccaccttctcacatggtttcgagaagaacaagagcataatatctaacgcgaggatgcacaagaacaagtatctggttttgaacctggatctggaggacttttttggatcattccacttcggcagaatcaggggctactttgagaagagtaataatttccagctgtcccatgaagaatccgctgtgctcgcaaatcttatttgctacaaaggatttctgcctcaaggggcctccaccagccccattatgacaaacatgatctgtcattttctcgacttgaaactgcactacatagccaagaaaaataagttcacatacacgagatacgcagatgatctgaccttcagtagcaacaatattaagactgagtctgaatgcgaacaattactgttcaacatcgagaagcagatcaagaaagcgggatttaaaattaacaagagcaagactcgcctgcaattccgcaatggctctcaaaaggtgaccggactcgtcgtcaacaaaaaagtgaatgtgaacaacacgtattacaagaccacacgggccatggctaataaactttatagggagggctccttcaatatcaatgggaataaagggaccgttaatcaactcgaaggccgctttagtttcatagatcagctcaatttcgagtcaaacaagaacgacaaatctatgtctaccgtgaaacacgggttttcctggggcagcgacaaccggaaagactatctggtgaacagaagggagaagagttatcaggagttccttttctacaaatacttttacgcaaacgagaagcccatcatcctcacagaaggcaaaactgacatcacttatttaaaggccgccctgaagaacatgtatcaggattatccttctcttattgagaagaaagatggcaagttcaactttaaggttgaattcatgaagcgcagcaagaggttcaactacttttttggttatttcgaagggggaaatggtatgaagaatatctatcggttgtttttccactcaccgtacaagtactatgaaaagttctacaagaagcgccagattgagaatcacaaccctgtcttccttatatttgacaatgagctagtcgacaatcttaaacctttgcggtcgtttattaactttacgaacctcaatacgaacgataatatccggtttctggaagagcagcactacctgaacctggacaaaaacttatatgctattactcatcagctcatgaatgacaagtccatgatggagattgaggatctttttctggaagacgtactgaacgtccgactcaataataagagtttcaaccgaaaggacaatgcagatagggagtccactttcggcaaaagcagatttagcgattacatcgccgaacattacaagaccatcaacttcgaaaactttaaaccaatgttggatatcatccgtaacatttcagacaatgagaaaaacattcgactgtga

SEQ ID NO: 8592 - RNA, 1677 nt, synthetic construct
  source 1..1677: mol_type = other RNA
atgaactataacgatgctcgcaactctattgccgacaaaattaatgtccccccgaaactgctgagttacatcttcctgactggtatcgataagttttacaccgaaattgagatccctaagaaaaatggaggcgttagaaagatatctatcccacagaatcaactcaagtccgtgcaccaggaagtcctgaagtttctgcaaaagatctacaagaactcagatctggccaccgtattttcccatggtttcgaaaagaataagagcatcataacgaacgcacaggtgcacaaaaataaaaggatcgtgctaaatatggacttggaggatttcttctatagtttccattttggacgtattcgggggttcttcaagaacaataagttcttcaagatgactcacgaagaggccaccgttctttccaacctgatctgctataagggagtactgcctcagggcgcagcaacttccccaattatgactaacatgatctgccactttatggacctgaaattgcagcatgtggcgaagaaacataagtgttcttataccaggtatgctgatgacctcacattttcgaccaataacaagaacacagttgagaactacaaagagctcatcaaggacatcaaaactcaaatcaacaaagccgggtttaagattaatgacgacaagacgagattacagtccaaagagaattcacagcgagtgaccggcctggtggtgaacaaaaaagtgaacgtctctcactactattataagaagactagagccatggcagagagcctatataaaaccggcaagttttacatcaatgaccaggaaggggacattaagcagctggaagggcgctttagcttcatcgatcagctgaattttgccaataacattcaagggaagaaagatggcaccggatatcacggcttctttacaacaggcaatgacggaaagatagctgtcaacaatcgggagaaaagctaccagaagttcttattctacaagtacttttacgccaatgataaacccacaattctcacagaaggcaaaacagacatcaagtacttgaaagctgccttaaaaaaaatgtacctactgttccccaacctcattaaaaaaaaggagacggggtttgaatttaaagttaacttcctggaaaggtcaaggcggttcgatttttttttcggttatgtggagggggctgagggaatgaaaaaaatcttcgagctctatttcaggaagcccttctattactacaacgagtttcaacttaagcgtacctttccaaaccagaagccagtcttcttgatttttgataacgagctgaagaataacaagaaacctattcggaagttcattaacttcactaatggaaatgtggagctgaaagtctcaaaagtggaatctgagaatttcttgcatatagacaagaacctttaccttatcacccaccagcttatgaatgacaaggacgagatggaaatcgaggatctcttcagcacagacgttctcagtgctaaggtagatggtaagatctttgatcgcaatgataatgcggaccgatccaagacttttggcaaagcagtgtttgccgaatatattaccagaaattaccgcaacatagactttagtaacttcatacctatgctgcacagaattagcgaaatcataagcaacacctga

SEQ ID NO: 8593 - RNA, 1911 nt, synthetic construct
  source 1..1911: mol_type = other RNA
atgaaaaataagaacaaggccaacgatataaagaagttcgtcatggacaatatcaagatcgataccattcggcattccgacgattatcttccctacttctattacttgtatcctcagtgggctcccgaccataccaaaattataaataccctcgcgaatatcagtgcctcttattgcaacgtgagtattcctaagaagataagtggcactagaaatctttctgtaccaaacaagtttctcaaacccttacaggagtttgtgaagcttctgatcacgaatcagttaaagtcgaacaatttctccttttccccaatcgctcagggttttatagaaggtcgaggaatctacactaacgcccacattcaccggaacaagaaatatatacttcacctcgacctcaaagatttctttaccagtattcactttgggcgtgtatcaggcttctttataaaggacaagaactttaagctgcagcctcacattgcttattttttcgcaaacctctgctgccttgatggagttcttcctcaaggctctcccacctccccaatcatttccaatctgatcgcgcaacatctggacaaaaaagtcctgctgctcagcaaaaagtaccatttcaccttttctcgatatgcggatgacctcgtgttcagcaccaatgacacgaagattatagtgaacgaattgccgaatttcctgaattctatcaacagcatcgttaaaaaccaagggttcgaaattaattgggataagctttcactgatggggccagatgtccggcatacagtgactggactgtccaacaacgtaagagttagcgttaccaaaaatttctatctagagacgcgcgctatcagcgagaatctgtatgtgtcaaactcgttcttcgtggacaataaattatttctagggcacagcgacaaatccattactgagaatctgaaaatcgtcgaagggcgcttcgcatttatctacgatatcgagaaaagaaacagacagttttactccaagaaaaccttcgggaaagctctgcagggcaaaaataacaataactaccagccgaatcacaaaattactttcctggagagcaagaacaagaaacagggagcttctgatatcgggcagaatgcctttaacggcaaaatttgggcctatagcaagttcctcttctacaagtactttatatacggcgacaagcttactattttctgtgagggaaaaacagacccaatctacctcaaagctgccatgggcgcactaggctataataacgcagtgacaatgtactccattgaaacatggctcaacgaaaagaacgtcttcgtcaatttatttggactgcccatgggaggttcaggtctgcagaaactgatctattattttttgacacccatcaagaacagtaagagttattacgatttcttcgagaagaagaccttgagcatgaaacctgtggtgctgctggtggactatgaattgaagaaagacaaaccactcaataacatcattaacgccatttgtattgccaagaagctgagcaataatgagaaggtgaaattaaagaacgagattgagagcgatctcgacaagaacggctactacttcttgggtaataatgtttacatcgccgtgacaatagattttaactccaagaaggacacagacagggccatcgaagagtactttcctacaaatactctgctagatattgaaggaaatcaaactcgccacttcggcgatgagaactgtaaagtcatcaataagaacaagcacctgatctctaacaactcacagcccatggagaaaatcgacttcgcaatctggtctttgaaccataggtacaataggaacctgtttatcgggtttatcaatatcctgaacatactgattacctcagaaatgaccatttga

SEQ ID NO: 8594 - RNA, 1983 nt, synthetic construct
  source 1..1983: mol_type = other RNA
atgaacattaagaaaatcagcctgaaaatctctgacttttctcaccgtgattctttcatcagcaccctggaaaaatataaaaagcattttggcaccttcgatgtgcaatctacaatccagaatgccagcgccctgtactcggaaaaaaagattcccaagaagatatctgggttcagagttatctccattccctctcctgagctgaaaattatccaggtttttgtgaaagagctgatcgagaatcagttggagtactttgattacaagttttcagtcgtgaaccatgctttccaaaaggagaagtcgatttatactaatgcacaggtgcatagaaataagaagtacattttacacgtggatctgaaggatttcttcagcagtatacacttcggccggatatctggatacttgagcaaaaacaagaactttaagctgccatcctatatggcttattttttcgcggacatttgttgtttgaatggcattcttcctcaaggatccccagctagccctgtgatttccaatcttatcgcagaaaatctagataagaaggtcctgtccctgtctaaggaataccactttatctatactcggtatgtagatgacctagtgtttagcaccaacgacacagcgataatcatgaactatatgcaggatttcctgtacaaactgaatgctattgtcgagaatcagggattccacataaattgggaaaaactcaacctcatgggcccagacgtccgccataccgttaccggtttaagcaataataagagggtgtccgttaccaaggacttttaccttaccacccgtagtatcgccaataacttctattgcacaaactcattctactccaaaggcatcttgtacagcggttacgagtcgtccgaccgccagaagaacctgaattttatagccgggctgttttccttcatctatgatattgaggttaggaacaagaactttcacaaagagaagacttatggtgagagcttgcaggggctcaaccacaataattatcagccccgacataaagtgagcatggagacgaacaattctctgagtgaccaaatttttaacgggaagatcttcctttactccaagttcctattcttcaagtatttcctgttcggggacatcatcacagttttcactgaagggattacagatcccctctatctgaacgctgccataaaaagtttggattaccagaacgaagtggaactaattagtattcaggagatgcagaacaaagagatggtgtttcctaaactgtttaacttaagcaggggcggctcagctcttcgcagactcattgactactacaacgacaccgtgaaaaatggcaagacatattacgacttcttcaaaaacaagatggtccctctcaaacccgtagtgctcctgttcgactacgagattaaaaagaataagccgttaggacaggcaatcaatctcctcctgaactacgggcacaactcacagacggtagaggatgagctgcgggaaaatggtttttatttcgtaggagacaatctgtacattgcaactacagtcaattttaacgacaaaaccgacgatgatcgagccatcgaagactatcttccgatccaatttcttggagatgtgaatggagatcatactagacacttcgccgatgagaagtcaaaattctttagggaaaagaagatcgcgatcagtgaactgtccaccccaatgtacaaagaggaactcgcccagactgtcctgaagaagacgagtgacatcgtcatttttaaggacttcagcatgatactttcaatcttttcagagattcgcttaggctacatgaataaagtgatagactgcatcaacgaggatcggattaacacaatctataacatattggactccaaatctgcaagtgaaatcatcgacaaaaacactgagctcaagaaaaagtttgacgaaaagctctcagatctgctgaaaatccatgcctga

SEQ ID NO: 8595 - RNA, 2088 nt, synthetic construct
  source 1..2088: mol_type = other RNA
atgaagcatttcgagtatcatagacagaagaagatatctgactttcattctagggacagttttatacacgaactccatatcgtctcttggatcacagacgaaaggaaacaattgttcagtaggttgcttaattcccctggcaatttttacaaggagttttcaatccctaagaagtatggagaaggtgaacgtatcatcgacgccccaaatgaggatctcaaatctctgcagatcatcataaagagtctcatagagaatcagctgaaggtgaaagagttcgtattcgggaagtatgaccaggcataccagaagaacaaaggaattttcacaaatgcccagatccacaggaacaaaaaatatcttgtgcacatcgatctggaaggattctttccgtccatacactttgggcgcgtcagcggattttttcagaagtcccggctgttcaaattggagcccccaatggcttttttctttgccaatctgtgctgctacaaagggcatttacctcagggggctccgacctctccactcatagctaaccttataggtgagaaactggaccgggaggttctcctcctgtccaagaagtttagattcacgtacagtaggtatgcggacgatttgacattttccacgaacaacgtcaagagcatcaccaatgactttcgatctttcatggacgcactgaattacatgatcgaaaaaatgggcttcaacatcaattgggacaaggtgggaattgaaggacccgatgttcgacacacagtcaccggacttagtaacaataagagagtgagcagcaccgttgatttctacaaattaaccagggcaatggcaaactcattatatgtcgacaacgagtttttcgatgctaaacggtcctataacgcctacactcagaagagcctcgagaaagcaattcaagtgattgaggggcgctacgccttcattaacgacattgaggataagaacaagaaactgtacgaacggcattccggcggcgaagaatatcagagtattacccccaccgactttagggagcaccactacatatcctccagattgaatggcgtctcaaaggagaatctgccagctatttatagtggcaagaaactgtcctacagccgctttttgttttacaagaaattcttagccggggatgcgatgactgtattcactgaaggcaaaaccgaccctatgtatatttccgcagccatgaaggccttgaccccaaacctaaagatcacctttacgattccccaagtggaaggggagaaccagactcagttcgcaaatctttttgacctcaaccgaggcggtgcctccttacggcgtattctggatatctatttcgggattagcacaggtggccacgccagcatcagccatcccctctacttcgaaaaaaagatcatctcaatcaagccatgtgtcctgcttctcgattttgaattcaacgatggccagcagaaatctgagaaagccaattctaagaagaaaaacagctcttcaccccacccgcttgtggttgttctgaactacatttttcaaaaccgcagaatcgctaagaaaaaggccagcattatcaaggatgaccttatcaaaaatggcttctatttcgtggacgagaatctgtacattgctactacaactgatcggtcaggcgacaaaacaaatcgagccatcgaagattacttccctgctagcttcctgaatgatccttatggagatggtacaaaacacttcgagaatgcgcccatgctgaaaaaagacaacgggttcaaggacagtgattctctgagaaagtacgactttgctaaatatgtgaagacccaaactgagactgtggacctatttaaggatttcaacgtgctgtttgacattttcaataacattcgcaaggactacaatcgtagactactgaagaagatcgcggatgtatcgacaaattataccatactggcaaagaacacgatgtaccgcattctggatagcgatatcctacggaaagagattgcccatgactcagatctgaaccagctcttcttcgacaactataagaaactctttgatgtgtcgtcatactga

SEQ ID NO: 8596 - RNA, 2025 nt, synthetic construct
  source 1..2025: mol_type = other RNA
atgaccaagttcaagtataatagggagaaaaagatctccgattttaaaactaggctatcgtttgtgcgcgaactgtattctattggtctgaatagcatcgacattttcaaactgtccaagaacataaacaactactacacagagtttactatccctaaaaagtacggcaccggcgtgagaacgatttccgcgccgctgggagacttgaagcaaatccagcagatcattaagaaactcatcgagaatgaactcacctattgcaattacacgtttgggaaatacaatcaggctttccagaagaataaaagcattttcaccaatgctcaaatccatcgtaacaagaagtacattatccatttggacctaaaagacttctttagttccattcacttcggccgcataagcggatacctgcagaaaaactccaaatttcggctgaccaaggacatggcctcattcattgcaaacctttgctgttataatggcatgctccctcaaggcgcaccgacgtcaccaatcataagcaatctgctgggggagtctctggatcgaaaactactgaaaataagcaagacttaccatttgacctactcgcgatacgccgacgatttagtgttttctactaacgacgagaaaattatcgcacaaaagctttcagaactcatagaagttatctctaccagcgtcaagaaaagtggctttcagctgaactgggacaagcttaattttatgggtcccgacgttaggcatttagtaaccggactctctaacaataagcgtgtctcgagcacaattgacttctataagaataccagatccatggcccttaacttctacgtgaagaatagcttttacgccggtaaacatttctacaacgggtatactataagaaaccagcaacggtcaatgcaggtgctggaagggcggtatgcttttattaacaacatagagagccaaaatcgcaggctgtatgagaatcacctgtccggtgcagagtatcacgccatcacaccacaggatttcaaagacagacacaatttgattaaggccaaaaaacacgacgaaccctccttttcaggaaaagagctgagttacagccgcttcattttctttaagaagttcttgttcggcaataacatctccgtgtttactgaggggaaaacagatccacgctatatccaggccgccatgcgggctttaaacagtgatatccagctggaagtgacatcttttcagactgaaagcgaccttaacacccagttttcaaagatgtttaacttaacgcaggggggaacatctctgaagcgaatcatcgatctctataagggcaccaattatcaatacgggaagagggcgctgtctgcctactataactattttgacctcgataacagtaagatcaagtttgttcccatgaaaccatgcatattgttgctggatttcgagcttctggggcctacatcccccttgcagacaattatcaataggttaatgggcgcaagaaaaaacagctacacaatcgactcaaaagagaacattcagaagaatcttaaggagaagggtttttattacatcttcgacaacctctacatagtcacaactattggctcaaatgataccgaaaatcagaagaacagggcgattgaggattacttccctaaggagtttctggccgatatctataaggatggaaccacttgtttcgaaaatgctgaaaacaagtctgataacagtcggaagctcatcagtaagaatgattttagcattctgatcgaatccaatttcttcaacgatcctgagattttcaaaaatttccagatcctctttgacatattcggaaaagtccaattcgactatctgaataaactcctaaaccggattgataacaaccccagtgctcagcacgtaattttcaacatcctcgactctaatttcattcggaacatcatcaacgaaaatcactccctgcgcgagaaatttctgatgatcttcaacaagtacttccttagaaattaccagaaatga

SEQ ID NO: 8597 - RNA, 2010 nt, synthetic construct
  source 1..2010: mol_type = other RNA
atgagctataaaatctcggacctgaatacaaagaacgacatcattaactatctgatgtccaccaagtcaataagctccccgaagattttttacaagattttgaacgacgtgtccgctcactacagcgacatctacctaaagaaaaagtattcaaacgacgttaggcacataaatgccccagatgagcagctgaagagcatacagcacaagattaagatcttgatcgaaaatcagctttcttacaagaactacaagttcaacaacatcagtcaggcctatcagaatggtaaatcaatctttacgaacgcccaaatccatcggaacaagaagtatgtcttgcacttagatatttgcaacttcttcgacgagattacgtttaaaaggattaatggctttctgcagcacaattcaaaattcatgctgaactacaccgtatccactattatgactaagctttgctgctatgacggccacctgacccaaggttcccctgtctcacctataatcagtaacttgctgggggagaaaattgatctcgtgctagttaaggttgctaagaaataccatttcgtctatacacgatatgccgatgatctggtattctctaccaatgatacgtacaccattaatgaaaagttgaccgagttcataaacaaggtgtccgagataatcaatagccagggctttagtatcaactgggacaaactgagcatagcaggccccgatgtcaggcatacagttacaggactgaccaataataaaaaagtcagtgtccctcttgaattttataaacaaactcgggctattgccaatcatttctacatttacgacgagttctacaataatcagcaaatctaccgcgactgttatgtgaaaaactttaacaagacgccaatgaagattatagaagggagactcaaccacatctacaatatcgaaaaccagaatcggacactctattctgaccacctgtccggatttgagtatcaggccattacacctattgattacaagcgtcatgtgttcagccccaccgaaaacaaggagactcacgaggtgatcaatgaattttccggcaaagagcttgaatactccaagttcatcttctataagttcttcctttacggggattttatcacactgttcaccgaaggcaaaacagatcccctctatatcaagaaggcgaaaaagattttaggcatcgatgatttcgatctgaaaatttatgacgcagatactgagatcaacaagaaaagcattttcagccgcttattcaatctccataccggcgggaaaagcttgattaagatctttgagatctacgttggtagagcgaccgaccagcacttcatcaattactctaaatacttcgaggagaaaacattctctataaaaccaacagtgctgctctatgactttgagctgtatagtcgcaattctcccctaggaaatttcatcagcatcatttgtggaaagaagtataagcattacggatttaagagaaacgtgatcatcaaggagctcaaaactaaaggattttacagggtctataagaacctctacattgcagtgactatggattttaacatgatagggcttaatacccaggaagaggatataaaaagatcgatcgaagactacttcccatcacaactcctgagcaatactaatggtttaaacaccgagcattttgaaggggtgtccgctccgaattctcacagtgtggtgattgataagaaccagtttagtaagcggatccagacctataccgataagaagatcttcaacaactttaacaacctcttcgacatatttctggacattcagaaagactacctgtctgtgctgctctcccgtttggacaaatctaacttagacaatcccgtagaaaaacgcatggtgattaattgtctgtaccgaatccttaattcaaataagactctgcagctcatcgagcaatttaaactaaccaaactgtttatggacgtatacaacaaaaactttctgtga

SEQ ID NO: 8598 - RNA, 1998 nt, synthetic construct
  source 1..1998: mol_type = other RNA
atggccaagaaattgtcggacattaccaacaagaaccagctcattcaagtgctgatagtagcacatgccattaccaatggaaagactttctataacgtgctgaacaatattgacaaacattataccgagttcagcattccaaagaaatacagtaatgaactgaggacaattaacgcacccgactccgagctgaaaaaaatccagaaacaaatcaaacggcttatcgagaatcagctgttaagcaagaagtattacttcaacatcagttctcaagcataccagaagaataagtccatctttacaaacgcccagattcaccgtaacaaaaaatacatcctccatttcgacatagagaacttctttgacaatatcacattccgaaggattaatggtttcttccagaaaaacaagaggtttaaactgccctacaacatttctaccattcttactcggctgtgttgctgcaaaggccacttggtgcaaggcagtccgatctctcctattatctctaatctcattggcgatggcttggattacaaattacggaagctgtccaataagtaccacttcatatacacacgatatgctgatgatatgatattctcaaccaatgatagcaagataatcacgaataagctgcaggaatttatgaaggacttgcaagatattatcgagcaggagggtttttctctgaaccagagaaaatataccctgatgggcccaaatgtaaggcactatgtcacaggacttaccaacaacaagaaagttgccacaccgattgagttttataagagcactcgggctatggctaatcacctgtataagtacggggagattaatgtcaatggcaaaatctttgactccaattcttaccctagtcctgtgaatattgtggaggggcgccttaaccacatttatcatatcgagcaggagaaccgcaagttatatcaggaacacagcgcgggatttgagtattttccaataacccctctcgactaccagaaacatactaacaagttgaagatcaacaacgatactggctcaatcattaatgaactctcagggaaagaactggagtattctaagttcatcttctacaagaacttcttctatggggactacataaaagtgtttactgagggaaaaacggatcccaggtatataaagaaggcctatagcatgctgcgtcccaacgacaactcaatcagactctccagcgtcgagtcactgctcaatcacaacaatatcctcaccaaggtttttaacctgcaccaaggcggggatggattgaccgatattttcaatatgtacaccgggaatcagtctaacgagaataaatacttcaactacacgcagtacttcaatctaaagactttacccatcagaccaactatcatcctgatggactttgaactgaacaacaagaataagacatcccctctcaacaactttatcaacaatatcgtgaacacactgctcgggggaaaaggtcgcaataaagaaaaggagaggaacaaaatcaagcaggaactgaaggaaaaaggatactatcggatctactcaaatctgtacttagccgtcactacagacttgattgaaataacatcccataccgaaaacaaaacaatagaccgcgatattgaaaattacttcgatattgacctggtgaaagacatgtttcagagaaacatgatccacatcaaagacattagaagtgtctgtaaagtgagcgagttgatcaataagaatgagttctcgaagtccatcaaaaagattaatgatgctaccaagttcacaggttttcagaacctaataaccatcttcagcaatattcatcttgactatcttgaactggttctaaacaaactcctactgacccgagataatccactcatctacacgcagactatcaagaagattaagtccagtaactacatcatacatatgatcaccggcaatcaaaagcttaacaatctctataagcagcttaacctgtga

SEQ ID NO: 8599 - RNA, 1821 nt, synthetic construct
  source 1..1821: mol_type = other RNA
atgctcaacgaagctaaaaccatcgacgaattggctgcatgtatcgagatgcagccctggcagctgaagaaggtgttgtatagcgggggcggcgccaacacaaaataccgccaattcgaagtgataaagaaaacgggggggataagaaaaatcgatgctcccgagcaaagtctgaaacacgtccagaagcggatcgcggccaagatcaatgaccttctggcacttgagaaaggtgatgcaccgttcgttccccttagtcaggcttaccagaaaggccatggaatttatactaacgcgcttgtgcaccgtaacaagaaactagttctgaatatcgacatctctgacttctttccgagcctgcactttggccggatagctgggttctttatgaaaaataagaacttcctgctgtcaaaggaggttgccgtatcgatcgcccagctaacctgccataatggtgtgctcgctcagggttcagccctgtctcctgtgattagcaacttaattttccaggccgtcgatcaacatatcctgaaggtaactcgcaagtacaagcttacctacacccgctacgctgatgacatgacgttttccactaacaattttggcttcttgaacgagctggaggagttcgtaaaaagcatcgaaagccagattaaagccgatggattttcgatcaattggtcaaaaatgaggctgagtggaccagacgtccgacagacagtgaccggtctatcaataaacaagaaggtgaacgtttcaaaacagtactacaagaatacccgcagtatggccctgtccctgtacacaacgggcttttttcatgtcgatggacagaggtatgaccagaacatgctgagtaaactcgaaggcagattcagctacattaatgacattgtacggaagaacaacctcctgtatgaacagtattcctttgaatatctggcgacacgagctaacaataagtctaggctcctgaacgagaagaagtccaaaccatctttgcaccccgaagcattttcctcttccgagaaagcctacaggaacttcctgttctacaagtacttctataagaacaagaagcctctgatagtgacagagggacatactgacgcgatctatttaaagaccgccataaagaacctgaagatcagcaacttaaatctcgatttcttgaagagatcaaagatgaccaagtatttcttcggctttattaaaggtggcgactccctcaaaaatattgcaaatctgtacctcagctctcagaaaagcaacgtgaatatcagcaacaagatgtataattacggcgtgatcccagaccaacctgttatcttactcctggaccacgaaatgcataagaaagaaaagaaggattctccactccttcctctcgcaaattacttgaagggggtgtccaagttccctgagattgaggatttcttttgcgaactccacaaacacggatttatccacctaacctctaatttgtacattgccgtggtcagtaaaaagggcactaccaaagacgatatctatgagatagagaatctgtttcccaatactctgttaaacgatgtttttggtatggggacatttgagaaagtgtattccggaaaagggagaaaaatcgacaagaatgatttcgcactgattattaggaaacactggaacaacgacatttttcagggattcaaggtgatgttggatgtgattgataaggtctgtctcgactatgagaaaagaaagcaacggatgcttgaaaaacgtcaaaatgacgagaagaaagccgtgaaggtcgggaatacaaacaataaactttga

SEQ ID NO: 8600 - RNA, 1755 nt, synthetic construct
  source 1..1755: mol_type = other RNA
atgtatctcaatgaagccaaaactatcgacgacctcgcggagtgcttggaaattaagacctggcagctgaaaaaggtgctctatagtcacggcggagccaacaacaagtatttccaattcgagatcacaaagaaatccggaggcacgcggaaaattaatgctcccgagaaaagcttaaaactcgtgcagaagaagcttgctacaaaaatcaatgatcttctgcatgaggagaaaggagaggcgccttttacgccactgagccaggcataccagaaaaaacacggaatctatacaaatgggctcattcacaggaataagaatctggtcctcaacatagatctccttaatttctttccaagcctgcatttcgggagggtggtaggattcttcatgaagaacaagaaattctccctcaccaacgaagtttctgttgcaatcgcacagctgacttgccatgatgggatgctggctcaggggtcaagcctgtccccggtgataagcaatctaatctgtcagtccattgaccagcatattctgaagattagcaaggagtacaaattgacgtataccagatacgccgacgacatgactttctcaaccaacgactttaacttcattaatcgactggaacagttcgttaagctgttggaaacccagatcaaacgggacggctttgatataaactggagcaaaatgcgcttttctggtcctgatgtgaggcagactgtcacaggtctatcagtgaacaagaaggtgaatgtcccctaccaattttacaagaatacccgatcaatggcactgtctctatataccacagggcattttactatcgatggccaagagtatgatcgcgataaattgtacaaactagagggcagattcagtcacataaatgatatcgactggaagaataacctgttatatgaacggtactcctttgaatatcaggctatgcgcccaaataacaagtctcaccttctgaacggtaaaattagtaccccctacctttaccccgaagctttttccagtagagaaaaggcctatcgcaatttcttgttctacaagtacttcttcaagaacaagaagccgcttattgtgacagagggccataccgacatcgtatatctgaaatccgccattaagaatctgcagagaaacgatttgaacgtggactttctgaaaaggtctaagtctaccaagtacttttttgggtttatcaagggaggcgattccctgaagaacattagcaacctctaccacaatagttcattgatgaacatctccaacaagatgtataagtacggtatcaagccagaccagcctgtgatactccttttagatcacgagatgtacaaaaaagttcagaaggatagccctttaatgcccctcgccaactattggaaggatgtatcgaaattccccatcatccagaacttttacgacgaattacatcaacatggcttcatacacctcacttcgaatctgtacattgccgtggttagtaaaaaaggcactacaaaggacaatatcttcgaaattgagaatctgttctcagactatgtcctggataaggtcttcggcctgggaacatttgagaaaaaatacaaagggtctgggcggaaaattaccaagaacgacttttcactgatcatccgtaagcaccaaaaggatagcatttttgagggtttcgacaaaatgcttgacataatccacctggtgtgtgtcgactatgagaagcgttctggacagcaatga

SEQ ID NO: 8601 - RNA, 1833 nt, synthetic construct
  source 1..1833: mol_type = other RNA
atgaatctgaatgaggttaatgatgtcgtggacctcgccagagtgttacactatcctagcaggaaaataaagaagattctttacagggacagggttgataaccaatacttcgaatttagtctcgccaagaagagcggtggctcccgacttattaatgtccctaacgaagtgctcgccgacctgcagaattgcattttgattgagctgaaacgctatatgaacaatcatgacatcaaattcagccgcgtgtctcaggcttaccaaaaggatcgcgagaaaggaatctacaggaatgctcgaattcaccggggaagaaagtacgtaataaatgttgatctcgaggatttctttccctccattcattttggacgagtggtgggcttctttgaaaagaacaacaagttcaagttcacacacagatgtgctatcttgctcgctcagctggtttgctataaaggctatctgccacagggagcgtccacttcacctctgatcagtaatctgatctgtcatactctggatatccacattttgaagatagcaaagaagtatcaccttagatattcaaggtttgctgacgatcttaccttctccacaaacgacgatgaaattagcacggaagaacaaatgcacaattttataaaggagctgacaaggcagatcgggcgtgatgggtttaaggtgaactggaaaaaaatgcgaattgccgggccggacgtacgccacactgtaaccggtctggtgaataacaagatcgttaaggtgaagaaggagtactacaaaaatacccgcgctatggtgaaccagttgttttatactcaccggttcattattgatggcgtcaagtacaatatcgaaaacgacgagtcaaaaaaaggcgggataaaaaagctggagggaagactcgcattcattgacgatataaaccggaggaataatatcgaatatctggacgatatcaccaagaaagccatgacacgggtgcagaatccaaaacggtacgacaaatttagtgcgttcgagagaatgtacagacagtttctcttctttaagaacttctggcaaagaaacacaccgctgatagtcaccgagggcaaaacggacgtgttacatctgaaagaggcaatcaagaattctgatattctccttcccaacatttcgttttttaaaccttcctcccggttcgacttcttcctgggaattgggtttgacggggccagcaagatggacaagtttatcaacttgtacatcaaggagaattccttcgagaacctatcaatcaaatttcggaagatagatgacatcaagaaagaaaacgatctgtttggactttcgggggaatccaaacccgttattctactcttcgaccatgagtttgcagacttagagtctccaataaacatgttcatcaataacctgagcaaagaccgcacctacaggcatattgagagtaagaagatcgaagaactcgagaaatatgaaagcgagaaacagaattctaacgccattaaaaagttcctaaagaagaagctgaacgaaaatggcttcatccacttggtcgataatctgtacgtcctcgtcatcaagaaagacgtgccatcaatcaacgaaaagtatgccattgaaggtctataccccattgaggtcgtaaataacgtgtttggtctgggcgtgctggaaacctatgccgacaacaattttgagaacgtgcttagcaaaaacgatttcagtaaaatcatccgtcataagcctgcagagatcttccgtggcttccggcccactttatcttgcatcgaggagatcttgaaagattctgagaaccgcaacaattga

SEQ ID NO: 8602 - RNA, 1695 nt, synthetic construct
  source 1..1695: mol_type = other RNA
atgaagttcaatgaattgagaaacaggaatgacctggcatcgatcctgaaaatacctaaaaaccagttctcataccttctctacaagctaaacgtgaataagcagtatgagaaatttgagatccccaaaaaatctggtgggactcgaacgattcatagcccgaacgataggctaaagtatatacagaaacgcttgaacgaggagattcttaacttcatcgacgatagcgattatccaaagagcaaaatttctcatggatatgagaagggcaagagcatttcaacaaatgcttcagttcacgtcaagaagcggtacgtcttgaatatcgatatcgaggattttttcgggtctatcaactttggtagagtgcgtggattctttaacaagaacaagtttttctccctgcccctggaggtgtccactatcatcgctcaaatctgctgtaaagacggggtgttgcctcagggagcgcctacgtcccctatcattagcaacctaattggacataccctcgattacaggatcagcatcttagccaagaagtacaaaatgaattactcaaggtacgtagacgatctgactttttccacaaatgagaaaaacttcgagttgtatctcgagaattttctgagcgaatttgacgcacacctgaataatgctgggtttaaacgcaacaagaagaagacgcgtctgcaatataagcggagtcggcagagtgtgacaggcgttatagtgaatgaagatctgagtatacccaacgatttctataaaaacacaagagccatgctcaacgagtttattaagaacgagaagttcttcattgacaaaaaggacaactatggcactctcaatcaattagagggccgcctgagctacataaaccacttcgagaagatgaaaaatatgcggaacgccaagaataaggaagttaacaaaaagaaccacactaagttctccaccaaagaaaaggaattcaagaagtttctcttctacaagaacttcatcatcaacgacaagcctctcattattaccgaaggtaaaactgacgtactgtatctcaaagccgcgttgaagaatctgcattctgaatacccaaatctgatcgaaaagaaggataatggcaattacgacttcaaagtgaaattctttcagcgaagtaagaggaaccggtatttttttatcatttccaaagacggagctgatgcaatgaaaaacctcgtagacttattcatcgataagcgcagtaataatgtgaatgagtgcgtcatgaccaaaattaaaaccatgcgcaaaacaaaagccctgaaccccgtgatactgctgttcgataatgaaatggtcaccgatagaccgctcaagaacttcctgaatttcatcaaaatctctccagaagatcgacttaaatttggcctgtccctgaatacctgtattagcgacaacttgtttttactaaccaacgatatccccctgaaaaagaaggacgttggtgaagccgagattgaagaccttcttccagagaatatactgaatcacgtcataaacggcaagatgatgaattatacaaacgggaaggacaaacagtcaatttctaaagactttctgtccaaatacgtggtgtcaaattacgagaagattaacttcgacaagtttagaccccttctcaattcgcttaactctatcatcgagaattactga

SEQ ID NO: 8603 - RNA, 1677 nt, synthetic construct
  source 1..1677: mol_type = other RNA
atggtgatttccgatattgaaagccgggaacagctcgccttccttctcaacatccccctgagcaaactgacctatctgctatacgtgaaaaaaattgacaactgctacaccagtttcgacattaagaaaaagaataacggagtcagagtaatatccgctccaaacgaagatctcaaagatatccagagaaaacttggatatctgttggagtcacatcataaggctttcctgaaggaaaaaaacattgacaacaagatctcccatggcttcgagaagaacaagtccattattacaaatgctgcggtgcaccgcaataacaagtacattctgaacatcgacattaaggatttctttgactctatccactttggccgggttagagggttcttcaacaagaacatcgagttcaatttaccgctggatatggcaactgttatggcacaactggtttgttacaagggggttctgcctcaaggcgccccaaccagccctatcgtgtcaaatctgatatgcaacattctggacatccgaattctcaacctggtcaagaaatataggatgaattatacccggtatgctgacgatatgactttttcaacaaatgacaggtgtatcgtcgataactacgacggaatcctcgaggagatagccaatgagctggataaatttggcctctacataaacgacaaaaagaccagactaatttacaaggattcgcgccaggaagtgaccggactggtggtcaacaaaattatcaacgtaaaccgggattattgcaaaaaaactagagccatggctgaaaatctctaccgtaaaggttctttttacataggggatgaggaagggtctataaagcagttggaagggaggttcgcctacatcaatcagctcgacttttataacaacaagcgaaaaggcgaaaaaaaagactgctggcacttgaattctcgcgagaagaattatcagaagtttctgtattaccgctattttttcaacaacgagaagcctcttatagtgacggagggtaagacagatatcctttacttgaagtcagcactcaagaaaatgtatgactcttatcccaatctgatctccaaaactaagaatggcttcgaatttaaagtgagctttttgaaacgaagcaagaggctcgaatatttcttcaatatcaatcaggatggtgcagacaccataaagaatgtgttgaacatgtacaccggacagaaaggatttgcgaattactacaagtacttcaaggacaaaagtgagaaagacgggcgtaatcctgtgttactgatcttcgataatgagcagaagacagataggcccctaaaaaagtttaagaaagacgccaagatccaggatgtgaacatcaagaattggattaacatcttagggaacctttacctggtcacaaatccaattgtgaatggcaaagacgagtgtgaaattgaggatcttttctccgagagtactcttaatacgttgatcggtggcaagtcctttagccggaactcaaaaagtgagaacgacaaatactacggcaaggccattttcgccgattatgtcatgaagaactatcagaagatcgactttagtaactttgtacccttcctggacagcatcaatagcgttttagatgactaccaaaagaagaatctgatccaatctcagtga

SEQ ID NO: 8604 - RNA, 1827 nt, synthetic construct
  source 1..1827: mol_type = other RNA
atgatgtcctataaagagattgactcaaagcgcaaactggcactatatattggagttccagtgaaacagttgacctggcttctttacgttcggaaaatagaaaactgctacaacaactcgtttagcattaaaaagaagaacggggatgaccggattattaatgcacccaacaagtctttaaagtatgtgcaaagaaggctggctcggttactgctcaaacgactgaatgaggtctacgtagaaggtaacatcatcaataacatatcccacggctttttcaaggggaaaagtattaagacaaacgctgtgccacataggaacaagaagtacattctcaatatcgatctaaaggacttcttcgacagtatccattttggcagggtgcaagggttcttcaaaaacaacaaccactttaagttgcctgaagtagccaccatcatcgcacagctgacctgctacgaaggcaagctcccccaaggcgctcctacatcccccgttatcagtaatctgatttgccaaattctggactacaaaatcctgagcctctgtaagaagtaccgacttacttacaccagatacgccgacgatctcaccttctctactaatgacaataacttcaaggacaactattccaactttttaagcgagcttgataaagtggtcgtacggtcaggctttgagatcaatagtaacaagatacgcttccaggagttcaattatcgtcagacagtgaccggcctaactgtcaacaaaaaagttaacgtgcgacaggattactacaagcggaccagatctatggcgcactctctgtacacgactgagaaatatgagatcaatggaagaaatggtacgattaatcagctggaaggaaggttttccttcataaacgatttggtgaagtacaataacaggctggttgaacaaaatagtctgagactcaactcaattgagtataagaaaaaccttctctacacacaagactcagagtttgtgaatcggacaaataagaacccttggaagaccaatttaaacagcttgagcattcgcgagaaggactatcagaaattcctgttctacaagtatttcattgccaatccccagatcactttcattccagaaggaaagactgatgaaaagtacataaaagctgcccttaaacgttactacaaggactatccgaatctggtgaagaaggtcgggaagaagtttgtctacaacattactttcatcgatagaagcaagcgctggaaatacttttttggcgtgctggaaggaggtgggtccgatctctatcagctgctaaattattttaccaacgccgagaataggacttgtcgcaactatctgtctcattttaagtcaatcatcccaaatcccccgaaaaaacccgtcattttcttactggacaatgagttcgataagaaaaagcccctcaaccagtttataaaaaagctcctgattgcaaatggactggattccaataaaatcgagagcacggtgcatgaggagtatctgtataacattgaccttaatgcgtttatcatgacaattccattcgacaacatcaaaaacgaggatgataaagagatagaagacctgctggatatcgaaaccataaataacgaactcatcagcaacgaatttgacggcaaaatcttcgacaagaataagcagcacgatgatcctaaatatatagggaaagagatcttcgccaatacaatcttgaagaaccacaactctaaattgatcgactttacccagttcaaacctcttttggacctcatcaatcagctgtccacaaattacagccagtttcagaacaagtga

SEQ ID NO: 8605 - RNA, 1848 nt, synthetic construct
  source 1..1848: mol_type = other RNA
atgcagtattccgatattaagtcgatcagaaccctcgcttatgcgttgggcgtgcaaaccaaacaactgacgggactactttacgggatcaaaattgaaaactgctatacctccttcaaaatttccaaaaagaacggggacgaacggaccatcaacgccccaagcaaaagtttaaaatatgttcagaggcgactgactagactgttagtcaagagacaggaggagttcttcttggagagaaacgtcaaaaacaatatttctcatggctttagcaaggggaaaggcatcaagacaaatgccgtgcctcacaggaataagagatacgtgctcaatgtagatcttgagaacttttttgagacgatccatttcggtcgagtccagggcttcttcaagaataacgagtactttaagttgcctgaggttgcaacaattatcgcgcagatagcttgttatgaaggtagcctgcctcagggagcaccatcttcacccattatatccaacttgatttgccaaatcctagattaccggatcgtccatctctgtaagaagtaccgacttacttacacccgttacgccgacgatttgacgttcagtactaatgacaaaaacttcgaggacatgaaagatgaatttgaggatgagctgaaaaaggtgattagtcgtagcgggttcatcgttaattccaataagactcgctttcagaaaaatgactcaaggcaaatcgtaacaggactgtctgtgaataagaaaatcaacgtgacccgcgatttttataaaaagactaggtctatggccgataaactgtatcggaatgggtccttcactattaatgagaagaacggaaccatcgaccaactagagggccgcttttcatttatcaatgatctcgtgaagtacaacaacagactggatgaactgaacagcctcaagagcaatctgatcgaatataagaagaacctgctctatactgaagagcggaaatataagaacgataatgacaacaaccaggtgctcgattgggaacggaatctgggcaatctgaacataagagaaaaagactttcagaagttcctcttctacaagtatttcattgccaatccgaaggtcacagtaataactgaggggaaaacagactcaaggtacattaaggctgccctacgcgagtattacctcgaatatcctaacctgataacaaaggatgaagggggcttcaagtacaatatccactttctcaagccgtctaaacggctgcgctatttttttgattacatgtctgggggaggcggaggttttgtccttattaaccttatggagttctttagcggaaaagattcaaggaccaagcgcaactacattaagtacttcaactcaattctgtcggagaaaacattaccccagaagccaaccctgtttctggttgacaatgagtggcagggttccaaccctttaccaggtgtgatcggcaaattagtgaaggacaaaaatctggagaggaaagatattgaacagaagatcaagagcgactttctctaccacatagacttgaatgctttcgtgataaccctccccgttgaatccgtcgactacaaaacaaacattgagatagagaacctgtttaatcttgaggaaatcaataacgagcttatcgcacccaactatgacggcaagatcttcgatcccaagaagaaaaatggcgacaacaaaaagaagatcggaaaagaaatcttcagcaactacattttgtctaactacgacagtgaagtgatcaattattccaagttcaagccactgttggacctgattaataaactgagtgaagactacaccaaattcaaggacaataaatga

SEQ ID NO: 8606 - RNA, 1833 nt, synthetic construct
  source 1..1833: mol_type = other RNA
atgaattatgaggatattcatagtcgcgatatgctggcattcgctctgggaatacccattaagcaattgaccggcctgctgtacggggtcaaaatcgaaaactgctacactaccttcacaattagtaagaaaaacggctccgagcgaaccatatcggccccaaataagtcactgaagtatgtgcaaaggaaactggcccggctactccttgagcgctacgaggagtttctcaccgaaaagaacactaataaccgcatctcacatgcttttttcaagggcaaatccataaagacgaatgcattacctcatagaaacaaaaggtatgtgctgaatgtagacttgcaggatttcttcgactctatacatttcggaagagtccacgggttcttcaagaacaatgactttttcaaactccctgacgtggcaactgtgatcgcgcagctgacatgctatgagggcgtgttacctcagggggcgcctaccagcccaatcatcagcaatctcatctgtcagatccttgactacaagataatcgagctttgtcaggaataccacctgacttatactagatatgctgatgatctgaccttctctacaaatgagaagaactttgacaacaactatcaggattttttggataaactcgacaaactggttacccggtccggttttaaaattaatgccgagaaaacccacttccaggaatacaacggtcgccagactgtaacagggcttagtgtcaacaaaaaactgaacgtgaagaagggtttttacaagcatacccggagcatggcccactcactctacaagacgggcaagtttatgattaatggcaaagaagggacactaaatcaactcgagggaagattcagcttcattaacgatttagtgaagtacaacaacaggttggaggagcttccatccctaaaactgaactcaattgagtacaagaagaatttgcagtttaccgatggaaaggaatttgaagttaagaagaacgagcagaagcaaatcctggactggaaaaagaatctatctacactgagtatcagggagaaagactatcagaaattccttttctacaagtacttcattgccaataccaatatcacagttgttactgaggggaaaactgactctaaatacatcaaggccgctctgcgtaagtattatgcagaatatccagaacttgtaacaaaggagaaggacggctttaagtacaagatcaattttctccccaggacgaagcgaatgagatatttctttggtttcctgtctggaggcgggtccgatcagattcagctcttcaactacttcattaaccgtgataatcacatcagccggaattacatcaagtacttcaaagagatcagcgaagacgtgccgctgccgcagaaaccaactgtgtttttgctggacaatgagtgggagacaaaaaagcccctccacaatatcataaaagtgctgtgtagtgctcaaaacctgaacaacaaagacatcattcagaaaatccacactgattatctgtatcacgtggatctgaatgcctttcttatgacactgcccgtcgacaatttaagccctaaatgcgaagtcgaaatcgaaaacttattcgacctggaaaagattaacaccgaactcattgaacccttgcatgacggaaagaagtttgatattaaaaaggagcacgacgatgataaatcaataggcaaagagatctttgccaataccattctcaccaactacgattccgagattatagacttcagcaactttaagcccttgctggacaaactctccgacatctctaaggattttacaaagtatacgtga

SEQ ID NO: 8607 - RNA, 1866 nt, synthetic construct
  source 1..1866: mol_type = other RNA
atgtgcaagtattcaagtattgatagcaaagaagctctcgcgtccaccattggtgtgagcgtgcgccagattacaggccttgtttacggcatccgaattgacaactgttatcactccttctatattagcaaaaagtcagggaaaaagcgacaaatatcagccccaaataaatcgttaaagtacgtgcaaaggcggctgtgccggctgctaattgagaaattgaacgacttctatctggagtacaacataaagaatcagatcacccatggattcttcaaaggaaagtcgataaaaacgaatgccttgccgcacagaaacaaacggtatgtgcttaatatcgaccttaaggatttttttggcagcattcatttcggaagggtccaagggtttttcctcaagaataactatttcaagctgccaaaggtggctacacttatcgcacagctgacttgttacaatggcaaactacctcagggagccccgactagccccattatcagtaacctgatatgccagatcctggactacaagataatcatcctgtgtaagaagtatcggctgacctatactaggtatgcagatgatctgacattctccaccaataataaggtctttagcgagaactatactctcttcttggaagagttaaaagatatcgtcaccagcagtggttttgacatcaatgccgagaagactcattttcagaaattcaacagcaggcagaccgtcacaggactgagtgtgaataagaagttgaacgtgcaaaacgacttttataagaagacacgcagcatggctaataccttatataagactggtgagtttaccatcgacggaaaagagggcaccataaaaaaactagaagggcggtttagtttcatcaatgaactcgtaaagtacaacaacagacttgtggaagatcggtcactcacctcaaacatcatcgagtataagaagaatcttctgagaacacaggagaaattatttagactgtccgaccgtaaaataaagaccctcgcctgggacgagaacctgcgctcactgtctatgcgtgagaaggactaccagaaattcctattctacaagtacttcatcgctaataagaaaactacactgattacggaagggaagacggatccacgctacattaaagcagccttgaaacattactatagcgattttgcgggtctggttagttccgacgggaacaactttaaatacaacgtaagtttcctctcccgttccaatcgcatgaggtacttttttgggtttaaagaaggcggaggcggcgagctccagaatctgctgcgattctttaccgagggcaacacagttgagaaccttttggagtatttcagaaaaatcatccctctcaaaccctctaagcccgttattttccttgtcgacaatgaattctctaaagatgacccactctactgcgtggcaaagtttctcaagaacaaaatccacacaactgagtacatcgaaaaaaaactccacacagactatttttaccatgtggggttgaatactttcatcatcaccctgcctatctctaacatcgatatggataataaggacaagtctaagttgaagggaacggatattgaaattgaagacctgtacaacctgaacgagattaatgaaaaactcataaagcccaatcacggcgggaagatttttaataagaagaaggaggacaactctaagtacattggcaaagagatattctccaagttcatgatctctaattactccaactcctgtattgactactcaaaattcaggcctttactggatctgattaacgatctgtctgaaaactatcacctgaagaccgatggtgaaagatacaatacaaaatga

SEQ ID NO: 8608 - RNA, 1155 nt, synthetic construct
  source 1..1155: mol_type = other RNA
atgtattcgtactcttcaatcgatagcaaagaaaatctggcagccaacataggtgtcactgtgaagcagattacggggattctttatgggatcggaatagacaagtattaccacacctttttcattcccaagaaaaacggacagcagcggcagattaatgcgccaaccggctctctgaaatatgtgcaaaggcgcctaaacgtgctgctgctgaagagactggatgaattctatctggagcacaacatcaagaacagaatttcacatgggttctttaagggcaaatccattaagacgaatgcattccagcatcggaataaacggtatgtgctgaatattgacttgaagaacttcttcgactcaatacattttgggcgggtccagggattcttcttgaagaacgattacttcaagctgcccaaagtagctactattatcgcccagctgacctgttacaatggtaagctagcacagggcgctcctacaagcccgatcatctctaatttaatctgccaaatcttggactaccgcatacttaaactctgtaaaaagtaccgactcatgtataccagatatgccgatgatctgacattttccaccaacaataaggcctttagtgaggcttataccctctttttagacgagctcagcaacattgtgaatgatagtgggtttgccattaatactgaaaaaacacacttccaggagtttaacaagagacagaccgttactggcttgtctgtcaacaagaagatcaacgttcaaaatgagttttacaagaagaccaggagtatggctaatacactctacagaacagacaaatttacgatagacggcaaagaaggaactatcaataaactggaaggtcgtttttccttcatcaacgatttagtgaagtacaacaataggcttgaggaagacaatagtctggcgtccaacatcatagaatacaaaaagaacatcctgcgcgccaaagagaagcactttaacaagagcaacaataaccagatcaaaattctcgactggaacgagaatcttaggtgcctcagcattcgtgagaaagattatcaacgattcttgttctacaagtacttcattgccaacaataaaatcactcttatctccgagggcaaaacagaccctcgctacatctga

SEQ ID NO: 8609 - RNA, 1848 nt, synthetic construct
  source 1..1848: mol_type = other RNA
atgaaatacaccgacatatgtagcagggatgatctggctatcgctctaggaatcggcaaaagacaactcactgggctcctctacggaatcggcatagacaagtgctatagctcttttgagattcctaaaaagaacgggggaaagcgactgattaatgcgcccaataaatctctcaagtatgtccaaaggaagctgaataagctgctcttgaagagactcgacgattataaccgagaaaatggttcaaaacagaacatcgcacacgcatattttaagggcaagggcattaaaactaacgcctttccacatcggaacaagagatttattcttaacatcgacttggacgatttctttggaactattcacttcgggcgggtgcagggtttcttccaaaaaaatgcctatttcaagctgcctgagatcgccacaattcttgcccagctcacatgttatgaggggaagctgcctcaaggagctcctacctcccccgtcatcagcaacttgatctgccagattctcgactacaagatattagacttatgcaagcggtacaaattaacctatactaggtatgccgacgacctgactttcagtacaaatgatcggaagttcttcgaatctagacagcagttcgttgaggaacttgggcgcattattaagaagtccggtttcaatatcaacaacgagaagacgtatttccagagttccgagaataggcaggtggtgacgggcctgtctgtgaataaaaagatcaacgttacagtcgacttttacaaaaaaacccgctctatggcacagcatctttacaagacaggcggatttagcgtggacgggaaagagggtaatttgaatatccttgaaggcagattcagttttatcaatgacctcgtgagatacaacaaccagaccaaaaaaaatgagagcctcgtgagtaacagcccagagtaccagaaatacttgagtctgccgatcgaaaaactgattagcttaaaggggaaacgatttaccggaaaactgacgcgcaacgaaaagctgtacaatctgacaattagggagaaggattaccagaagttcctgttttacaaatactttgtggcgaatcccaagaccatcattataacagagggtaaaacagattcgcggtatattaaagcatccttgaaaaggtactacactgattatcccaatctaatcaagaaagagggcaacaagttctcttataatatcactttcctgccccgctcacagcgtcttaagtatttttttggctttttagacggcggagggagtgatctgataaacctggttagcttctttatagacactaacaactactctttccgcaattacgtcagctatttcaagtcaattatcaccaacaatcctcctaaaccagtaatatttcttctggacaacgaggaaaaatcaggaaaaccgctcggctccttcaagtccttcatctccaagaacactagtgccacctcatctcaaatagatagcgccattaaaagcgatttcttctaccacattgattttaacacgtttttgatgacccttccagtagaacgtacctcaaactccgacattctggatgtcgagatcgagaatctattcgatctagacaagatcaataacgaactgatccgggggatgcatggtggcaagacattttctccaaagaaggctgagggggatgatctccacatcggcaaagaaatcttttccaagacaatcctgaccaactacgaatcagaaataattgacttttcgcagttcaagcccctgctggacaacatctccaacctgagcaataattattccgagtacaccaaggataaaattcagtga

SEQ ID NO: 8610 - RNA, 1842 nt, synthetic construct
  source 1..1842: mol_type = other RNA
atgaaatattatcaaatcagttccatcgacatgcttgcgttcgcactcagaatccccgtgaaacagattacaggactcttgtatggtgtcaagatcgagaattgctacagcaccaaggaaatccccaaaaaagatggttccaagcgcatactcaacgctccaaacaaaagtttaaagtatgttcagcgtcaaatctgtaagctgctgattaatcgcttggacgagctgacggagaaaaatggggtgaaaaataatatctcccatggcttcttcaagggaaagagcatcaaaaccaatgcacttccgcatagaaataagaagtacgtacttaacgtggacttagaggacttttttgacagtattcactttggaagggttcagggcttctttaagaacaacaagtacttcaaactccctgagatcgccactgtgctcgcgcagctgacctgcttcaatggcaaactgcctcaaggtgcccccacttcaccccttgtctcaaacttgatctgccaaatcctcgatttcaagattctgaaactgtgtaagaagtacaaactaacttacacacggtacgttgacgatttgacattttccactaatgacccatacttcttttacctgtacaactactttctcgacgagcttaacaacctaattaataaggccggcttcaagataaatcttcagaagacccactttcagccttttaataatagacaggttgtgacgggtctaagtgtcaataagatccttaacgtcaaaaaggaattctacaagatcactagatcaatggcaaactcactgtataaaacaggaacttttgagattgacggaaagaaagagacggtggaaaaaattgataagctacatgggaggttcaccttcattaatgatctggtaaagtctaacaacaggttacacgaaatcaattctctgcgcctgaatggcatcgaatataagaagtttctactcactacctatgagaaggaattcgaatataaatcggccaatcagaagagcgagttgaagtggaaaaacaatctggggcacttaaacctccgggaaaaggactttcagaaattcctcttttacaagtacttcattgctaatacctctgtaacaattctgaccgagggaaaaaccgattccagatatctgaaagccgccctgaaaaagacatatagtcagtatccagaactcattaactttgaggattcaaagttcaaggtcaacatcaacttcataaatcggacggctacacagcggtatttctttgggatattggaaggcgggggcggggatctgacacaactcctgaagtattttactgacggcaaaaacgatattgagaggaattaccttagctacttcaaacggattataccagaggccccaaagaaacccgtcatattcttagtggataacgaatctgataacaaatcgcccctggagaacgtggcatcctttctcgctagcaggcagggggtgaaaaagcaagacatcgtgaaaaaactgcagaacgacttctattaccacgttgattttaatgtgttcatcgtgaccctgcctaccaatatcttcaacaataagaccaacatcgagattgaggaccttctgaatctggacgaaataaacaaccagattattcgagaacgatatagcggaaagtccttctctccgaagaaatctcacaacgatataaaccatatcggcaaggagattttcagcaattttatcaaccgtaactactccaaccctctgatcgattttagcggctttcgccagctgttggacttgattgattcactgagccaggactaccattcttacacaaataattga

SEQ ID NO: 8611 - RNA, 1755 nt, synthetic construct
  source 1..1755: mol_type = other RNA
atgaatctgcagatcaataatttcaccacgcgcactgagttagccaacctgctggaaatagagttacagattctcactcggctgctatactcaccaacccagaatgtgaatacacagtatcatacgtttgaactggaaaagaaacgcggtggagctacccgtacaatagccgcgcctaacgactcacttaagattgttttgaggaagctgaacgaccttctttcccaatattatttgaaagcgtttgcctttagggaggccgagaagcagatttcccatggcttcgttcgaaaaaaaaacattttcaccaacgcctctcagcacaggaacaagaaatatatcctcaacattgacctggaagactacttcgaccactttcactttggtagagtcaggggcttctttgaaaaagataagcgctttaacctgagcaaggaaatggccaccgtgcttgcacagctcacttgctacaagaaagtgctccctcagggtgcacccacaagcccaacgatcgcaaacatgattacggcaattttagatcggcgcatcttatccctgtgccagaagtacaagttgaaatacactaggtacgctgacgacctaactttctccaccaatgataataccttctccgataagtacggagaattccttattgagctcgacagaatagtgaaagcttgtggccacgagataaaccaagacaaaactcacttcctgacatacaacaatcggcaaacaatcacagggctgagcgttaataagatcgtaaacgtgccgagaacctactcaagtaagacgcgagccatggcccataacctgtatactaagggagagtacttcatcggggacaacgtgtataacatcaatgagaatgaaaagacactcgagattctgaccggacgattcaactttagtaattggatcgacaacttaaagctgcagaacaatcagttcgctcaaaacaataaatcactcaggacctatagcaaacgtgagaaggatttcagcaaattcctcttctacaagactttttatgtgaatgccacacctttgctgattaccgaaggcaagactgatttcagctacatcgattctgcgtataaatctctactaccacgggatatcgaagtggtcaacaagtttgattacaagctgttcaagaaaaacaactctatcactacctactttctcaacagcaaatcggacaataagacaggcgagggcggcgacgagattagcaaattgtttttccagtatacctcccaaattaccttcggcaaaggaatagtggaggattgtgaaatcaacattgggctgagcaaagtaagtccccatttttaccactattttcggaaatatgggcacccctttaatcatcatcctgttgtcatcctgctggataatgaaaacagttctaataagccccttaaaaagtttctcaaggcaatctatacaggagggaattaccagccaccgtatgagttgcttcagtctacaaattttctgcacctggtcgggaacctgtacctgacaaccatacctagtccacaaaagaaccccaatgcctttgagatagaagatctgtttacagaggaggacaagaaaagactctccttctcgagagatagaaaagctcccttctccgaggctgtcgaggaaaatcgcgagactatcaatttcgacaactttatcaagctcttcaagatccttgatgacattaagcagcactacttgaccttcgaatcatattga

SEQ ID NO: 8612 - RNA, 1761 nt, synthetic construct
  source 1..1761: mol_type = other RNA
atgagcgactataatttctcaaacattaagacgaggaaggatctggctagatttctcaaaatacccctaaagaagcttacttttctgttgtacatcgatcaaaacttgtacaccaactttagcatacccaaaaaatctggtggaattcgcaatatctacgcacctaacaaaaatctcaaagaggtgcagagagtcatcaaacataagttggagcagcacattaatgaatatcagaaactcaacgggattaagaataacgtgtctcatggctttgagcgggagaagaatattatcaccaattcagagatccacaagaataagaagatagtcttcaatactgacatcaaagactttttctccacaatccactttgggcgggttcgcggattctttattaagaacaagtacttccgcatggaggaaaacattgccacaatgctcgcgcagctggtgtgttataatggctcattaccccaagggagccccactagcccaataatcggcaatctgatttgcaacacccttgatatcaaaatcttgaagctgtgcaaaaagtttaagcttaactatacccggtatgccgatgatttgacttttagtaccaataacaagctcttctcagacgagttccagcttttttacaataatttggaggaacaggtgaaccaatccggtttcctcataaacaccaacaaaaataggttcctgtgtaaggataatcgacagacagtgacaggactcactgtaaataagaaggttaacgttaacagggacttttatctgaagacacgtgctatggcatattgtctctataatagcggggaattctatatagatggcgaaaaagcaaacatcaatcagctggaaggacgatttagctttattaaccagctggataagcaccagaacatcaagaaattcaatatgctgctgccatctgagaagaaagaaaagtttttcagcaacctgttcctgaattcccgtgagaaagagtaccagaaatttctgttttacaagtacttctggaggaacagtaaacctttaatactgactgaaggaaagactgacattctctatattaaggccgctcttaagaaatactataaggcctatccggaactaatagagaaaatcggggaagacgagttctactataagatctcttttttcaagcggtctgacaagatgaagtttttcttctccttcatttccgacggcgccgacaatctcaccaacatcttcaactactacattgataacttcgacgacaaaaagaataagagtttcaactactgcaactactttaagaacaaactgagcatcccattcaagaatccgatcatcatcttatatgacaacgagagacaaaacaaaccacttcacaaagccattgataatgtaattaccggcctcattaggggaaagtcagaggagaaaaaaaaacagcgcagagaaaaaaaggagagtctgaagaaatctctgaatgactccacgccttttgctgagaatatcctagagaacatctactttctaacaaatcctcaactggaggataagaatacggaaattgaagacttactcaccaacataacaaatcatctggaacttgatggtaaatcgttcaataaagatggcgggaagaacaatttcggcaaaaacattttatcccagtacgtgtataagaactacaagaagctggatctgaactccttgaaacccatcctggacaacatcaaggacgtcaaaagtaaatacttttga

SEQ ID NO: 8613 - RNA, 1728 nt, synthetic construct
  source 1..1728: mol_type = other RNA
atgaataaactgtccgagatcaaaacacgtagcgaccttgcggccacacttagtgtttcagaaggcgacctggtgaagatcctatattacgagaaggacttataccaaaactttgacattgcaaagaagaacggcacatcccgcaagatcaatgccccaaaagagaatctcaaaaagatcttacagaccttgaatatcttgctgaataagcacgtacatgattattacgacgagaacaattcctcattaaatgtttctcacggttttgaaaagggacgagatatagtgtctaatgccgaggtgcacattaacaagaaatttgtgttcaacactgacatcaaggattttttccccagtattcattttggaagagtgcggggactgtttcataagcatacaatcttccagatggatgagtacgctgcaactatgcttgctcagttgacctgctataatggctccctaccacaaggcgcccctactagcccactgatctctaacctgatttgcagggaattggacattaggatgctgaggatatgtaaaaaattccgactgcactacactagatatgctgacgatctgacctttagcacaaataacaagaactttcagctcaattacgagaacttttataagaagctcaacaacgagatcaacagcgccggattttctttaaaacacaataagtcgaggctgcagcagaagaccgagaggcaggaagtgaccgggctgacagtcaataacaaggtcaacgttaatcgcaaattctatctgaaaactagggccatggcgcacagtttctatgagaacggtagcttctatattaacaacaatatcgggactatgagacaactcgagggacgtctagcatttattaatcgcctcgacaaagagaataatattcggaagtatgagcgcctcaccaatgaaaaggataaaatggggtttttcaagcataaacctctcaatgctcgagagaaagaataccagaagtttctgttctacaaaaacttctgggtgagaacgaaacccctcataataacggaaggcaagactgatcccctgtatatcaaagctgccttgaaaaagtattacaaggaatacccggagctgattgaactcaataacaacaacgacttcgaatttaagatcgatttcttcaatcggaccagtaaactgagatactttttcgaacttgagaaggacggcgcagataccatgaaccggcttattaactactacgtgcacaaaaactacaattccaagcgcaatgataagttcaactactatcacttcttccacagcaagatgggggtaccccctctttatccaattgtctttctcttcgataacgaatatgaaaagaagccactgcataagttcattgacaatgtggccccactgacaaataagcccgtgaaaaccctgaaaaaggaattgaacaaaaccaatcctactccgcagaacctgataggcaatacctacatcttgtcagtccccaaatccacacctaacgtcaatggggagatcgaggacctgttactcaacataaccaaagacctgacgatcaaaggaaaaaagtacaacaaaaacggtggcgatcagtatatcgggaaggacattcttagcaagtatatctaccaagagtacgaatcattgaatcttgattctctcaagcctctgctggaccggattgttaacctaaaaatcatgtacgagaagtga

SEQ ID NO: 8614 - RNA, 1791 nt, synthetic construct
  source 1..1791: mol_type = other RNA
atgaagtatgcgttcataaacaacaaatacgacttcttcaacgttctcggggtgcctgccacaaaaatgaactacttactgtacaatcgagagagaatgggtactaacaatatgtatcacacctttagcattcctaaaaaatcaggaggaaaacggaccattcatgcaccgaacgatgagttgaaaaacattcagaagaaactggccaaagtcctcgaaaaccactattacgaaagcatccaggacaataagaataaagacgcgttcttgcaaggttttttcaaggatcgcggcatcattaccaatgctaagattcatcggaacaagaagtttattctcaatatcgaccttgaagacttttttcagactattcacttcgggcgtgtcaaaggctttttcgagaaagataacacctttaaggtgccgagcgaagtcgctctgataattgctaatctcgtttgttatcgtggcatccttccacaaggcgcccccacctccccaattatctcaaatttgatcgggcgcataatggatgtaaaactgctgaagctatgcaagagatataaactcaagtacacaaggtatgccgatgatctgacgttctctactaatgacaatagttttctggaactagaggataagctgatctatgagatcaaaaacgaaatcaggaaatgcggatttgaggttaatgaaaaaaagacgcgagtacaggattacagactccggcagagtgtgaccaacatcactgtgaacaagaaactgaatgtgtcaaaaacgtacattaagaacacccgggccatggcccaccatttgtacaagcatcaagaatattacatcgacaatgaagtgggaacaataaatcagctcgaaggccgctttgctttcattaaccaacttgacaagtacaacaataacattgtcaagatcaagagctttgaaaagaattcgattgaggagcagaaaaacctgggtagcgtgttccagactaagaaagagatttcaaagaccttcttcttcaaaaatctcaatagcagggagaaggagtatcagaagttcttgttctacaagtatttctacgcaaatccaaagccaatcatagtgaccgagggcaaaacagacgttagatatctaaaggccgcactgaaaaacttatacaaagagtatcccgatctgatagaaaaaaacgaaaatggctttgacttcaagatttccttcctaaataggttttccaacaggcaccagaagatcagcaagctgcattatttccttaatattgtgcctgacggggcagatactatctacaacatatacggttactatgactctaaaaacagtacatatcccaactttatcgagttctttaagaacatttcccagtcgtctcccgccaatcccgtcattttcctgtttgacaacgagctgaataacaagaataaacccttggctaagttctgcaagaaattaaacatgaaggaacaccaaaaggagaaactctcttccgacaataagatctacttaacagagaacttgtacctcatcacacaccagcttctggaaaattgtgatgaaaatgagctggaggacctgtttagtaagagtactctgagcaaggagatcaacggaaaaaaattcatcaaacgcgattccttcgataataagaagtattatgggaaggagatcttttccaactacatatcctctaattactctgtgcttgactttaacaactttcggcctatacttaacaatatcgtggatgtactgaagaaatacaagtcaatcctgtga

SEQ ID NO: 8615 - RNA, 954 nt, synthetic construct
  source 1..954: mol_type = other RNA
atggagtatgcattcatcaccgataagaatgactttttccaggcgctaaagatccctacacagaagatgaattaccttttgtacaacaaacaccagatgggcccggaaaacatgtatagcaccttcagcatctccaaaaaatccggtggggaaaggatcatccatgcgccttctgatgaactgaagtcagttcagaagaaacttgcaaaattgctcgaaaaccactactacgaatcgatccgcaataacaaaaacaaggacacatttctgcaaggattcctgcagaatagggggataattacgaatgccaaggtgcaccgcaacaagaaacacattcttaacattgacttggaagactttttccatacgatccatttcggccgggtgaaggggttctttgagaaagacaagacttttaaagtcccctccgaggtcgctctgatcatagccagattgacctgttataaaggcgccttaccacagggcgctcccacatctccaatcattagtaacctgatcggcaaaatcatggatttcagactaattaagctgtgcaagaaatataagctgtcctacactagatacgctgatgacctcactttctcaaccaatgacaatagtttcctgaaactggctgaccgattaattattgagatcaagaatgaggttcggaaaagcggatttaaagtgaatgaaaagaagactagggtgcagaactaccgcctgcggcaagatgtaacaaatataaccgtcaacaagaaactcaatgtgagcaagacatactttaagaacacccgagccatggcacaccatctctataagcaccaagagtattttatagatgacgagattggtaccctcgagcagcttgagggaaggtttgccttcattaaccagatagataagtacaacaacaagctgtctcgtgccgaaacttatgagaaaaatcattga

SEQ ID NO: 8616 - RNA, 1758 nt, synthetic construct
  source 1..1758: mol_type = other RNA
atgaagtatacgtacattaacaacaagtacgatttctttgcactgcttggagttcctagtaacaagatgaactacctgttgtataatagagtgaatatgggccccgagaatatgtattctacttttaccatccccaaaaaaaacggaggggaaagaactattaacgcgcccaacaaagagcttaagaacatccaaaagaaactcgtggtgctgctggaaaaccattataacgagctggttgagaagaagaaatttcgtgatagcttcctccacgcttttataaaggatcggtccatcattacaaatgctaggatccaccgcaacaaaaattttatcctgaacatcgacctggaaaacttcttcgaaactatacattttgggcgggtgaagggcttcttcgagaaggactttaattttaaggtgcctagcgaagtagccttaattatcgctcagctcacctgctataaaggctcattgcctcagggcgcccctaccagcccgatcatttctaacctgattggcaaaattctagaccttagactgatcaaactgtgcaagaagtacaaactcaactataccaggtacgcagatgatcttacattctctacgaatgattacagctttgtcaagaatttcaacaagatcctagaggatataaagatcgaggtcaataaaagtggcttcaaagtgaatgacaaaaagacaagagtccagaattaccgtttacgccaggatgtaaccaatctgacagtgaacaagaaaatcaacgttcagaagaagtacttcaaaaatactagagccatggccaaccatctgtaccgcaataatgaattctttattgacggggatctgggaacccttaatcagttggaaggtcgattcgcgttcattaaccaaattgacaagtacaacaacaagaacatcatccacaaatacaatagcagtaagaagaaatccaacaaagagtatatccacaacctcaatagtcgggaaaaggagtatcgcaagttcattttttaccggctattttatgccaatccgaatcccatcatagctacagaaggaaaaacagatattaggtacatcaaagccgcactgaaaaatttgtatgacgaatatccagagctgattgagaagaacgacaatcagtttctgttcaagatctcctttctaaacaggttccgaaagaagacagatgagatgaataaacttcaatacttcctgaaccttgccccacatggtgcagactctctcaagaacatcttcaagtattacaaggaaagcgaatcgtcttaccccaattacatggagtactttaaaaaactcggtaacaacatgccaaacaatcctgtgatcatactctttgataacgagctccacaacaagaaaaaaccactctccaagttctgtaccaatctgaaattgaccgatgacgacaagtcaattctgaaattgaacctgaatatctgtctcaaggacaatctgtatttacttaccaatcagctgattggaactagtaaggagaatcagctggaggatttatttcaagaagagactttgtccaagattattaacaacaagtccttctcaacctctgacgaatatgacaaatcaatctactacgggaaagaaatattctcccagtatataagcagcaattatgagacggagaatttcgacaattttaggccattactcgacaacattgtcaagataatcaacgactacaagatgaacaaatgcgaggataataattga

SEQ ID NO: 8617 - RNA, 1788 nt, synthetic construct
  source 1..1788: mol_type = other RNA
atggagtacaatctaatcgccgacaaatatgattttttcaacatgctgggcatcagcacaaggaaaatgaactacatcctctataatagggaacatatgggtaccgagaatatgtatgagacttttagtattcccaagaaatcaggaggcgaacgaacaattcatgctcctaaagccgaattaagaattatccagaagcgtctggcatctatcctggaaaaccattattatgagagcattgaggataagaagtatagtgacaccttcattcacgcattcatcaagaataagtccatcatcactaatgccaaaattcatcgcaacaaaaagaacatcatgaatatagacctggaggacttcttccacacgattcactttggtcgggtcaaaggattcttcgaaaaagactcaatcttcaaggtgcccagtgaggtggcgctgataatcgcacagcttacctgttttaaaggcgctttgccacagggagctccaacatctcccattatatcaaatatgatagggaagatcctcgatttgcgcctgttacacttgtgcaaaaagtacaatcttgactatactaggtacgccgatgatcttaccttctctactaatgataaagcctttgaaaagaacaccgacacaattctttccgaaatcaaaatggagatcgtaaagtctgggtttaaagtgaacgataagaagacacggattcagaattatcggatccgccaggacgtgacatcgctgactgttaataagaagatcaacactaagaagacctactttaagaatacccgggcaatggccaataacctgtacaagaatcatgagtttttcatcgataacaagctgggtactattgaacaactggaaggccgatttgccttcatcaaccagattgacaagtacaacaacaagatttccaagatcaaatcctttgagagaaatacgctggtccaccagaagtacctcgagagcatgtacctcattaaaaaagagaactccaagacacagtatttcaaaaacctgaacaaacgggaaagggagtaccaaacatttctgttctatagacacttttacgggaactctaaaccaataatagttaccgaaggaaaaaccgatattcgttatatcaaagccgctcttaagaatctgtacaaatattaccctgacctcatcgagaaagatggaaacagcttcatattcaaaatcaacttcctgaagagattcaaaagcaagcctagcaaaatgaataagctccactatttcttgaacattttgcctgatggagcagacgccatgaaaaacatctacaactactataacgagaacgattcctattacccgaactacatcaaaaagtttaagctgttgggcaagaatgtgccctataaccctgtgattttaatgtttgacaacgaactgcaaaacactaaaaaaccgctctcaaatttctgcaagcatgcgaagctgagtaatgacaaaaagaataagctcaagacagactactacatcaacctgattgagaatttatacctacttacccaccagttgatgccaaatagcaatgaaaatgaactcgaggatctatttgaccagcaagctcttagtaagaagattgggggtaaaacctttaagaggggcgacggctttgacacgaatcagtattacgggaaggagatattctctcagtatatcataagcaactacaagcgcattaactttgataatttcagacccctcctggataatctggtcgagatcataaaagactactccaagaaatga

SEQ ID NO: 8618 - RNA, 1788 nt, synthetic construct
  source 1..1788: mol_type = other RNA
atgaagtatagcttcataaccaacaagaaagacttcttcaatctgctcggcgtgtctgctaagaaaatgaactacatcctgtacaacaagcagttcaagggtccggaaaatatgtatacgacgttccttgttccaaaaaaaaatggcggcgagcgcaagatcagcgcacccaatggggagctgaagattatccaaaaaaagctggcaaccattctcgagaatcactattatgagacgtacaagtcacagaattactgcaataatatcacccatgcctttcagaaaaataaaggcattatcaccaacgccaaggtgcaccgcaacaaaaaaaacatcttgaacatagacctggaggagttttttcactcaatacattttggccgggtaaaaggcttttttgaaaaagactctacgttcaaggtccctaaagatgtcgctctgattattgctcagctgacatgttatcagggatatctgccacagggcgccccaacatcccctatcatctccaatctgattggtaatatcctggatatgaggttgttgaagctatgtaagaaatacaagctgaactatacacggtatgcggacgatctcacattcagcagcaatgacctaagcttcagtaaggtaaaagataagatcatccttgacatagagatggagattgagagatgcggatttaaagttaacaatagcaagactcggattcagaattacaaaattagacaggaggtcactgggttaaccgtgaataaaaagatcaatgtgaagagatcctactacaaaaacactcgcgccatggccaacaatttataccgaaacaaagagttcttcatcgacaataagattggaaccatcaaccagttggaagggcgatttagttttattaaccagctggacaagtataacaacaagatactcaagtacaagtcttttgaaaagaacagtgtgggtcatcaaaagaatctcgaatcactttacaagatcaagaaggaatccagtaacactcaattttttaagcacttgaacgcccgggagaaagagtatcagaaattcctgttctacaaatacttctacaacaatcctcagccgctactggctactgagggaaaaaccgatataaggtatctaaaggcagctctgaaaaatttatacatcgagtatcccgaccttattgaacaacaggatggaaagttcgtgtataaaataggattcctgaatcgtttcaactacaatgcaaaaaagatgaatcgtctccattatttcctcaatattcttcccgacggtgcctcggctctgaagaacatttactcatactacaatgagcaaaactctcattatcctaactatgtgaagttgttcaagaagttagatgacgacaagcccctcaaccctgttatcctgttatacgacaatgaactcgccaataaaaagaagccaattctgaacttttgcaatcacatcgatatgtctgagaatgaaaaggcaagtcttcagtccgggtcctattttcacattagcgagaacctgtatctcttgacccaccagctcatcaattctgcgaaagagaacgaacttgaagacctgtttgataaaaaaacactgagcaagatcatcaacaacaagactttttgcaaaaaggacaaattcgatacctcaaaatactacgggaaagatatcttttccaaattcgtcatttgcaactacaacaacatcaacttcgaaaactttaagcccctcctggataatatagtcagggtggtgaaggattacgaaaacaggtga

SEQ ID NO: 8619 - RNA, 1827 nt, synthetic construct
  source 1..1827: mol_type = other RNA
atgaattacaattttatcgtagacaagcagtcattctgtaatgaactgggcattagcgtgggtttgctgaattaccttctgtactccaacaaagaaaatggcattgagagcttctatattaacttttcggtacccaaaaagaacggggaagaacgccgtatacacgcacccaatgagcagttgaagtttgtacaaaaaaaggtgcaggagctgctgcagatccgaaatgacgagctttttgcaaagctgaacgtcgaaaataaaatcgtgcatggctttgtccctgggaaaaatatcataacaaacgcgagaaaacacaggaacaaaaagatcgtgatcaacattgatatccaggactttttcgaatctctgcactttggaagggtaaaggggtttttcgaaaaggataaattcttcggcctacctaaggaagtggctctgattatagcccaactgacgtgttacaaaggacacctgccccaaggagccccaacatctcctataatttctaatctcatcgctaagatcctggatattcggatgttgaagatgtgcaaaaaatacaatctggactacacgcgatatgccgacgatatgacgttttctacaaacaagtatctcaccactaagcagttggagaagttactcaaagatctggagaaggtcatcagcaatagtggctttagcatcaacaacaagaaaacaaggattcagcaaaacaatcttcggcaggacgttaccggtattacagttaatgagaagctgaacgtcaacaaggaatatatcaaaaagacccgcgccatggctcataacctgtattgcaacaacgaattctatattgagaacgagaaagggaccttagatcaactggaaggaagattctcattcataaatcagctggacaagttcaacaacaatatcagcaagactaaatcagttgagtacaacctgattaagaaccagaagaatttcagctacatttcaacttaccagaaaaaggttaacacaaaatctgaccaattcttcaaacagctcaattcccgcgaacaggagtaccaaaagtttattttcttcaagctcttctacggcaatccgaagccacttatcattactgaggggaaaaccgacatcaaatatctaaaggctgccttaaaatccttgcacaaggaatatcccggtttggtggagaagcagggagataaatacatctacaaagtgagtttcctggacaaaagttccagaaaaaacaagaagatcagcaaactccagtatttccttaatatttccgagcatggcggggacgtgatgaagaatatcttttcgtactatgatgtgcagaacaactactatccatcctattatgattacttcgacgaattacggaattttaccggtgcgaataagcccgtcattctcttttttgacaatgaagtggatagacggaagaaagatagtcctgtgaaatcctttatcaagcatgccaaaatctcttctaaggtcgacgagtttaagaagaacaagaaaatccacatcactaaaaacctctacctgcttacccacagccttgaagagggggcactcgagggcgaaatagaggacctctttgatgaggatgtgctaaatcacgagataaacggaaagatcttttcacgtaaggacgaggaggaaaccaacaaatatggcaaagagatattcagcaagtacgtttatagtaacttccagaacattaacttccataacttcaagcagattttggatgacatcgtgtacattatagagatctacgagatgtccaagaagaataggaaaaaggtggtcactgagtga

SEQ ID NO: 8620 - RNA, 1713 nt, synthetic construct
  source 1..1713: mol_type = other RNA
atgaggctgaaagacgtaaaaaatagaaaggatctagcccagctcctagacgtgaaggtgaaagtcctcacttattgtctgtatgtgctcccagaaacaatgcgttattccagcttcgtgatacccaagaaggacggctctgagagacaaatccttgtgccctgcgctcagctcaagaggattcagaagaaactggcggaagtcctgaacgaggattacttggagattaactccaataacgtagcacagggattcatcaagaataaggggatcattacaaacgcccggtatcatcgcaacaaaagagtcatcataaatgtggatatctccgattttttcggcaccatacattttggtcgcgtgaaagggtactttgagaacaacaagttctacaaactgaataacaaggtggctacaatgattgcccagctcacatgttaccaagggaaattgccacagggcgcccccacaagccctgtcattgcaaatatgattggccagattatcgactaccacatcttgaaattgtgcaagcaatacaagctgtattacacccgatatgctgacgacatgacctttagcactaacatcaactacagtttggttgaaatcgagaagtttatctgcgacttgtcagaaaccctgtccagactgggtttcgaaatcaacactaagaagactcgagtctgttttaactcaagcaagcaggaggttacgggagtaatagttaacaagaaactcaatgcggacaaaacctttattaaggaaactagagccatggctcagaatctttacagcaccggcgggtttgtgatagataataaaattggcaccatggaccaactcgaagggcgcttcgcgttcattaaccaattcgacaagtacaataacatcgtgaacaatacgtctaaaggtaaacacctcgagaagctcaatgttcgcgaaaaagcctaccagcagttcttattctacaagctgttcttaggtaatgatcgccctgtgatctatacggagggtaaaacagatagtaggtacattaaagccgctcttaagaagctgtatattcagtacgatgaccttatagagaaaaatgaaaacgggaagttcgaatataagatcctattcggaagtcggaacaaaaagtatgagtacttccttgactttatgcagtacggggcagattctttcaatatcatcgccctgttatacaccggacggaacggctatgctaatctgtgctcgatcctgaagtctaagatgcggcggaaaccgaacgcaccagtcattctgctgatggacaacgaacagactaatggaaaaccattaaacaagttcttgcagtcatatagggatgaacactacaaaaatcttactgatcatgagaaggccttcttcaatgactataattacattaggctggtggagaacctttatctggcaacctttcccctggaacctggagttgaggaaatggagatagaggatctcttttccaaagagtttctagatggcaagatcaatggcaaatcctttaagaggtcccctaagaagggagagacaaatgtaatgagcaaagacgagctgtctcgttatgtgctgagtcactatcgaagcattaatttttctggctttaaggggctcctggatgtcatctcagccattaagaaagactacgagaaatacatcaacatggacgataacaaatggtattga

SEQ ID NO: 8621 - RNA, 1791 nt, synthetic construct
  source 1..1791: mol_type = other RNA
atgaaatatttgaaagagctgaagagttgccagacccagaaagacttggccaacctactggggtactctgaaaaaaacttcactaggatcctgttctcccaaaatatttctcttaggtatcagagcttcgaaattcctaagaaaaacggggataaacgcaagatattagctccgacatctgaactgaaagtccttcagacccggttgtcaatactgttatccaattgctacgaggaactggagttaaaacggctcagtaccagctcttatattaagtgtatctcttcccacggcttccgaaaaaaacttatcgtgaatatcccggcatcgaaacagaatagaaagataatcgagtacaaggagattaactttggcatatacagtaatgctaagcaacacacagggaagaggctcgtgctgaatatcgacctaaaggacttttttgagagcattaccttttcaagagttgttggattcttcaccaaaaataaactcttcctcctgcccctggacatcgcggtactgatagcccagatcgtcacgtatcgtacaagtaccagccaagaggggtttttgcctcaaggctctccctgctccccaatcatcagcaacctcataggtaatattctggacgttaagatggtcaagttggccaaagagtataaattcacctacacacgttatgtcgatgacctgaccctttcaaccaacctcccccagttctccgaagacattatcgagtttgatggagaaaagtgggtgctgggatcggcacttaaccacaccattaactcttcaaagttcaaaatcaaccctaagaagacacgcctgacagataaatacaacaaacaggaagtgacgggcctgacaatcaataaaaaggttaacatcgaccggacgtattaccgctacaccaggtccatggtacagaaattctgtgccgagggggagttctttaagtctaaagtccatatggataagcagaagatttcccgggaggctctgaatggcatacttagtcacatctaccaaataaagaaccagcaggacattaattttccaaattgcgctcgcaacttttcagagcttaacagcttggaaaagttatatgccaagtttctctttcaccattattttgtgcacccacagcgaatgctcattattggtgagggttatacggacccactgcattttaagctggcgtgtcataagctatataaagagagcctcagctttcttaaattctccagtctcgaagggactaaaagatttagcaagattactggttacggcggaggaactggcctcttaaagatattcctacagaactataagcagttctataaagccagaaacatctgtttgaagccctgtctgattatcgtggatggggatagcgatggcgacgcagtgattagcaaagcatcggctgagttcaagacaacttttaaaaagatctcccatagttccatgacaactgccggactcctggactggtaccacattttcaacaatctctacatcctgcagttgcctaagaataaagtgatcgaagatttctacgatcctctgatcctgactattcccattggatcaaaaactttccattcagacgataagaagaagaataccaagtttgatagcaaaatccactacggcaagaaggtgctgctggagaagataatttatgaacagcaagacactatcgacttttctaagttcgatctgatcttcaatacaatctttcacattcagttctaccattacatctactgcaacatggaatcctga

SEQ ID NO: 8622 - RNA, 1779 nt, synthetic construct
  source 1..1779: mol_type = other RNA
atgaaatacctcaaacagctgaagtcttgtcagacccagaaagatttggcgatactcctcggctactccgagaagaacttcacacgtatcctgttcagcgaaaatattacgactaggtatcaggactttgagatttctaagaaatcaggcgggaagcggaggatattcgctcctacccctgaacttaaaattctgcaaactcgcctgtcaattctgttatccaactgctaccgcgaactggagcttaaaagactttctacaagctcctatgtgaattgcatatcatcacatggcttcagaaagaagctcaagattaacatcccgacttcgaaacagaaccgtacatcgttggaggccaaggaaatcaattttgggatctatagcaacgcccagaagcatacgggcaaacggctggtcctgaacattgatttgaaggacttcttcgaaagcatcactttttctcggattgtgggtttctttagtaaaaacaagctgtttagccttccatttgacatcgcaatcctgattgcccagatagtgacctatcgggaaagtactagcaaggaaggctttctgccccagggcagtccctgctccccaattatcagcaatctcattggtaacatcctagacgttaaaatggtgaaactggcaaaggagtacaaatttacttatacacgctatgtggatgatttaacattaagcaccaatctcccacagttcagtgaagacattatcgaattcgatggagagaagtgggtactaggatctgctttgaaccataccataaactcatcgaaattcaagatcaatcctaagaaaacacgactcaccgacaagtataataaacaagaggtaaccggcctcacagttaacaagaaagtcaatatcgaccaaaactattacagatacacaagaagcatggtccaaaacttctgtgccgagggagagtttttcaaatctaagtttcacatggacaagcataaaactaatagggaggcactgaacgggatcctgagccacatatatcaaataaagaaccagcaggacatcaaattcccgaattctacccgcaattttaatgagcttaactctctggagaagctgtataccaagttcctgtttcaccactattttatccatcctcaaagggtcttaattatcggcgaaggttacaccgatcctttacacctgaaacttgcttgtcacaaactataccccgattcactaaagtttatcaaattctcctccctctcaggcacaaaacgatttagtaagattatgggacttacgggggggactgggctgattcagaagtttctgaagaattacaacgtcatctacaagtcccaggtgatctcccatctcccatgcattattctggtggatggagattccgatggggaacacgtgatcaaatgtgcgaataaggagttcaatgactttattaagcacatcagcctgactgccctgaacaagtccgccattttggattattaccacgctcatcataatctttacatcatcaagttgcccaaaaatacggttatcgagaatttctacgaccccagtattctgctcaaaaccatatctggaaaaacctacaacagttctaacagcacattcgatttgaccaagttttacggtaagaaggacctcttcgagaaaattattttccaggaccagaacaccatcgacttctccaagtttgacttgatattcaacacaatcttccacatacagttttaccactatatctactgcaatatggaagagtga

SEQ ID NO: 8623 - RNA, 1776 nt, synthetic construct
  source 1..1776: mol_type = other RNA
atgaattttctacaccaactcaaaacctgccagactcaaaaggacctcgcagcactgcttggttactcagagaagaacttttctcggatcctctttagtcaaaacatcatcactcgctatcgcagctttgaaatacctaagaaaaacgggaataagcggcagattctggctcccacaagcgagttaaaaattctgcagacccgactggctaatctgctgtccaattgctacgaggaactggaagtcaagcggctttcatcgagttcctatgtcaactgtatttcatcccacggatttagacgcaacattactatcaacatccccacaagtaaacagaatagaacacctatcaagtctaagaaggttaactttggcatctactcaaatgccgaaaagcacatcggcaaaagactggttcttaacatagaccttaaggactttttcgagaatataaccttcagtaggatcgtgggttttttcaccaaaaacaaattcttcctgctgccactggacgtggccatattgattgctcaaatcaccacgtataggacctcaatatctcaggaaggatttctcccgcagggcagcccgtgttcgcctatcatctccaatttaatcgggaacattctagatgtgaaaatggtgaagctcgctaaggagtataagtttacgtatactcgttacgtggacgatttgaccctttcaaccaatttacctcaattctcagatgacattgttaaactgaacaatgagaagtgggtaatcggatctattctgaatcatactgttaatagcagtcgcttcactattaatccaacgaagaccaggctgaccaataaatacaataagcaggaagtcacaggcctgacagtgaacaaaaaggtgaatatagaccagacttattacaggtataccagaagcatggtgcaaaagttctgtagcgagggcgagtttttcaaaagtaaagtgcacatggacaaacagaaaatatcccgggaagccttaaatggtatccttagccatatataccagatcaaaaacaagcaggatattaaattccagaacataacccgtaacttcgacgaactaaatagcctcgataagctttatgccaaattcttgtttcaccactatattgtccatcctcagaggatgtttatcatcggcgaaggatacactgatcccttgcacctgaagctcgcatgccataagctgtacaaaaactctctagagtttatcaagttctccagcctccaagagacaaagaaattcagcaaaattatggggtattctggaggcactggcctgttacagaagtttctcaagaactacaagctgatttataaggggagtctcttgtccttgaagccatctgtaattcttattgacggcgacaaagccggagatgatgtgatcaagaccgcgaagaacgagtttaaggattctttccaggaaatcaagaactcttccatgaatgggtcctacatcctggagttcaagcatgtatttaaaaacctctacatcatccagctgcccaaaaacgatgtcattgagaacctgtacgatgtctccgtgattaacacaaaaattggtacccgaacatataatccctcgaacaacaaattcgacctcacaaaatactatgggaagaaagagttgattgaaaaggtgatctttccaaatcagaacacaataaacttcagcaagttcgacctgattttcaatacgatcttccacatccagctgtaccattacatttactgcaatgggaattga

SEQ ID NO: 8624 - RNA, 1791 nt, synthetic construct
  source 1..1791: mol_type = other RNA
atgaacttcctgaatcaattgaaaacttgccagactcagaaagacttcgcagccctcttgggatattcagagaaaaacttctcaaggatcctgttttcacagaacataaccacccgctatatcagttttgagattccaaagaagaacggcaataagagacagattctggcccctaccagcgagcttaagattctacaaaccaggcttgctaatctgctttccaattgctacgaggagctcgaggtcaagagactgagttccagctcgtacgtgaattgtacatcaagccacggatttcggaggaatatcaccattaacatccccacttcaaaacaaaaccggacacctattggttcaaagaaaatcaacttcggcatctattctaacgctgaaaaacacattgggaaaagactggtcttgaacatcgacctgaaggactttttcgaaaacatcaccttttctcgaatagtgggttttttcacgaagaataagttcttcttgctccctcttgacgtcgctatactcatagcccagatagcaacttacaggacctccacttcgcaggaagggttcctgccgcagggttccccatgtagtccaattatcagcaatctaatcgggaatatacttgacgtaaagatggtaaaactcgccaaggaatataagtttacatacacacgttacgtggacgatttaacactatccacgaatcttccccaattctccgatgacatcgtcaagctgaataatgagaaatgggttgtgggatctattctgaaccatactatcaattcgagccgcttcactattaatcctacaaagacgcgggtcaccaataagtataataagcaggaggtgactgggctgatagttaacaagaaggtaaacatcgacaaaacctactatcgatatacacgttccatggtgcagaaattttgtagcgagggggagtttttcaaatccaaagtgcacatggacaaacagaagatctcaagagaagcgctcaacggaattctcagtcatatctaccaaatcaagaacaagcaagacattaaattccagaactccacccgcaagttcaatgagctgaacagcttagaaaaactctatgcgaagtttctgtttcaccattactttgtctatccccagagaatgctgataatcggcgaaggatatacagatcctctgcactttaaactggcctgccataaactgtataaaaattccctgcacttcttgaaattctcttctctcgagggaaccaagcggttcagtaaaatcacagggtatggcggcgggacaggcttacttaaaatcttcctccagaactataagcagttttacaaggctaagaacatttttctgaagccgtgcttaattattgtggatggcgatagcgatggccaggccgttatatctaccgcacgctctgaattcaagtctacctttaagcaaatcaatcattctagcatgactaccaccggactgttggattggtaccacatcttcaacaacttatacatattgcagctgcccaaaaacgaggtgattgaggacttttacgatcccagtgttctgatgtatagtattggcagcaaggtgttccacagcgatgacaaaaaaaagaataccaagttcgatccaaacattcactacggtaaaaaagtgctccttgaaaagatcatctacgaaaagcaggatatcattgattttacgaagttcgacctgatctttaactccatttttcacattcagctataccattacatctacagcaatctccataattga

SEQ ID NO: 8625 - RNA, 1782 nt, synthetic construct
  source 1..1782: mol_type = other RNA
atgaataatctttttttgttacgtacctgccaaacgcagaaagactttgctaaagtcctgggatactctgagaaagaatttaccctaattctgttttctcagtccatccaaaataaataccagtcctttgacatccctaagaaaaacggaaataagcgcaagatactcgcacccacaccagatctcaagatcctgcagaccaggtgcctctcaacactgttgactaattgttatgaggagcttgagaaaaagcgattatccaaaagttcatacgtgcagtctatttcaagtcacggcttccgcaaaaagctgctccttgatattccattcaccaaaaagtcgaggacacccttcgagaaaaaggttatcaagctggggatatacagtaacgcaagcaaacatgtaggcaagaatctgatcctgaatatagacctaaaagacttcttccagtccattaccttcagcagaataatcgggttttttagcaagaacaagtatttccagctcaactttgacattgcggtgctgatcgcccagatagccacgtacagacccaatcaatctcaggaaggcttcttgcctcagggctcaccttgtagcccaattatttctaacctgatcggaaacatactcgatatcaagatgcttaaactggggaagaagtacaagtttacatattcgcgatatgtcgatgacttgactttaagcacgaatctgccaaaattcaacgaggaaattgttaagctggttgataatacgtgggttattggctcagaacttaaaaacgtggtgaactcatccaaattcaaggtgaatccccaaaagaccagacttacaaataagtataaccggcaagaggtgacagggctcactgtaaatcggaaagtaaacgtctctaaggagtattacaggtatacacggtccatggttcaaagtttctgcaccgagggcaactttgtcaaatctaaggtgcatatggacaaacagaagatctcccgcgaggcactgaatggcattctcagccatatattccagatcaagaacaaacagcagatcgaattcaataatcaaacccggaattttgacgaactaaactcaatcgaaaagttatacgccaaattcttgtttcaccactacttcattcaccctcagagaatgatcgtgattggggagggatacaccgacccgacacactttaagctagccagccataacctgtacccggatatccttaaatttctcaagttcagtagcctgcaggaaaccaaacgcttttctaagatcatgggctattccggaggtacaggtttgctgaacaaattcctgaagaactacaagctgatctataaagccaacgtgatcagctgtaagccttgtttgatcattgtggatggagataaagctggcaacgatgtgattaagactgctaggagcgaattctctaagacctttaaggctattaacaacgtcagtttgaatctgagcgccaaactggagttttttcacattttcgagaacctgtacatcctgcagcttcccaaggaccaggtgattgaggatttctatgatactactgtcactggtagtctgatcgggacacgaacttataattcctccaacaacaaattcgacctcactaagtactatggtaagaaggaactcctggaaaagattatctttccaaatcaggacaccataaacttctccaaatttaacctcatcttcaataccatcttccatatacagatttaccactacatctattgcaatctcaaaaattga

SEQ ID NO: 8626 - RNA, 1779 nt, synthetic construct
  source 1..1779: mol_type = other RNA
atggataacctattcctccttaaaacgtgtcagacccagaaggattttgcatcattgctcggttatagcgagaaagagtttactcgcatcctcttttctcagccaatccagaataagtacaaaagcttcaagattccgaaaaagaatggctcccgaagaaatattctcgcgccagtccctgatttgaaaattctgcagactcgtctgtctatactactcacacattgctacgacgagctggagcacaaaagacttagcaaatcctcttatgttcagtgtatatctagccacggcttcagaaaaaagatcctcgtagaaatcccaatcagcaagaaatcccggacatcattcgaatcaaaggtgataaactttggaatctactcaaatgctaagaaacatgtcggtaagaatctagtgttgaacattgacttgaaggacttttttcagtcgataaccttcagtagaatcattgggtttttcaccaagaacaagtactttcaactgaatttcgatatcgcattacttgtcgctcagattgccacataccggcctaaccaggtgcaagaagggtttctccctcaggggagtccttgctccccaatcatttcaaatctgatcggcaatatcttagacatcaagatggtgaaactggcccgaaagtacaagtttacatatacacggtatgtggatgacctgaccctgtccactaatctgccccagttcagcgaggaaattattaagctggatggcaaatcttgggttataggctccacattgaaatacgccatcaacagcagtaaatttgaagtgaacccccagaagactcgcctgaccaacaagtataacaggcaggaggtcaccggattgaccgtcaatcgtaaggtaaacattagcaaggagtactataggtatacgagaagtatggtacaaagcttctgcgccgaaggacacttcttcaaatcaaaagttcatatggacacggacaaaactaccagggaagccctcaatggaattttgagccatatcttccagattcgcaacaaacaacagattgagtttaacaaccaaacccgcaatttcgacgaactgcagagtacagagaaactttacaccaagttcttattccaccactactttgtgcacccccaaaggatgatcctcgtgggggagggctacacagatcctctgcaccttaagctggcttgtcataagctgtatcccaatagtcttaacttcctgaagttctcttcacttcaacaaaccaagcggttttccaaaattatgggctatcagggaggcacaggactgttaaacaagttcctgaaaaactacaaactgatctaccaggctaaaaatatttctctgaagccctgcctcattatagtggatggcgataccgcagggaatgacgttatcaagctcgccaaatctgagttcaaggagactatcaaactgatcaataagagcttactgactactagttccatcttgaaattctttcacgtgtttgagaatctgtatctgatccagcttccagagaataaagtgattgaggacttttacgactcctcgataaccggttcttgtataggtacaaggacctataatccgtccaacaagaagtttgatctagacaagtattacgggaagaaggaactgttcgaaaagatcatctttaccaatcagaacactattaacttctcggaattcgatctgatctttaacacgatattccatatccagctctaccactatatttacaacaacctcaaaacatga

SEQ ID NO: 8627 - RNA, 1779 nt, synthetic construct
  source 1..1779: mol_type = other RNA
atgaataatctatttctgctcaagagctgccaaacccagcgcgacctggccattctgctcggatacagcgaaaaggactttacccggatactgttttcaaaacccatcagcacgaagtaccagagtttcgatattcttaagaagaacggcaataaaaggaatatcctggctcccacttcggaactgaaaactttgcagacacggctcagcaaactgctcactaattattacgaagaactcgaacagaaacgactatccactagttcctacgtgaaatgtatttcttcccacggctttagaaataagatcagtgtgcagataccaatttctaagaagaacaggacatctttcgaatccaagattatcaacttagggatctactctaatgcacataagcacgtaggcaaaaagctggttctgaacgtggatctgaaagacttcttccagtcaatcacttttagtcgcataattggcttcttcaccaaaaataagcattttcagctgcctttcgatatagcgctgctgatagctcaaattgcaacctacagattaaatcagagtaaagagggatttttgccccagggatccccatgttcacccattatttctaatctcatcggtaacatccttgacattaaaatgttacgactagctaaagagtacaaattcacctataccaggtatgtcgacgaccttacgctgtccactaacctgccccaatttgacaatgagataatcaagctcgaaggcgatacctggattttgggcagcaccttgaaatacacaatccagagttcaaagttcaacatcaatagtcagaaaactcggatcaccaaccgggataacagacaagaggtcactggactgaccgtgaatacaaaggtcaatatcaaccagaactattaccgttacacaaggagcatggttaacaaattttgtacagagggtgaattcttcaagtccaaagtgcacatggacaaagacaagacatctcgtgaggccttgaacggcatactgtcccacatttttctgatcaaaaaccagcagcaaatagagtttccgcataccacaaaaaacttcaacgagctgaatgggatcgaaaagctatacattaagttcctgttccaccactatttcgtgcatccgcagcgcatgctgatcattggcgagggctataccgatcctatccatctcaagttggcctgccataaactttttcccaattctctcaacttcctcaaattttcatctcttcaggaaactaagagattttcgaagatcatgggttattcaggcggaaccgggctgcttaacaagttccttaagaactataagaccatctacaaagccaaaactatttccttaaagccatgcctgatcatcgttgacggggataatgccggtgatggagtcataaagactgcaaggggagagttcaaagagacattcagacctattaacaatccaccattgagctcaagcgggaaattcgagttttttcacatcttcgagaacttatacatcgtgcaattgcctaagaatcaggtcattgaagatctctacgatacaacagtgacgaccagcctgattgggaagcgcacatataattcttccaacaacaagttcgatcttacgaagtattatgggaagaaggagctctttgagaagatcatttttcctaaccaagacaccatagactttagcaagtttgacctcatcttcaatacgattttccacatccaggtatatcactacttttacagcaacctgaataattga

SEQ ID NO: 8628 - RNA, 1776 nt, synthetic construct
  source 1..1776: mol_type = other RNA
atgaaatacctggaacaactcaaatcttgcaaaacacagaaggagctggccatcctgctgggatattctgaaaagaacttcacaagaatcctgtttagccaaaaaattagtacccggtatcagtcatttgaaattccaaagaagacaggcagcaaaaggattattttcgcgcctaattctgagctcaagatcctgcagacgcgcctgagcattatattgtccaactgctatgaggaactggaaataaaacgactatcaaccagctcctattcacagtgcatcagttcacacggctttaggaagaaattgacattagacattcccattagcaaatctaacagggaatctttagggagtcagataattaacttgggtatatactccaatgcccagaagcacgttggtaagcgcttggtcttgaacatcgatctgaaggacttttttcagtcaatcactttttcgcgcatcgttggcttcttcaataaaaaccagagattcttgcttgagctggacgtgagcatcttaattgcacagatcgccacctatagggagactacagaggagggctttctgccccaaggctccccatgttctcccattatctcaaatcttatcgggaacatattggacgtcaaaatggtgaaacttgccaaagagtataagtttacctacactcgctacgtcgatgatcttacctttagtacaaatctgcctcaattctctgaaaagatcgtgaagctcaacgataataattgggtcataggaagcacgctaaagcacgttattaacagtagcaagtttgaggttaacagtcagaagactcggctcacaaataattacaacagacaggaggtgaccgggctgaccgtaaattcaaaggtgaacattaacaaggagtactatcgatatactcggtctatggtccagatgttttgtgctgaagggaaattcttcaaaagtaaggtgcatatggaccaggataagaatacgaggggagctctgaatggggtgctatcccatatcttccagataaagaacaaacaacagatcgagttcgatccgaagaccaagaactatgacgaactgcagtccattgagaaactgtacactaagtttcttttccacaattacttcgtccatccacaccggatggtagtgatcggagaggggtatacagatccaattcacttaaagttagcatgtcataagctgtacccgaatagcctgaactttctaaagttcagcagcctgcagcagactaagagattttcccaaattatgggttacaatggcggtacaggacttcttaataagtttctcgagaactaccaactgatttatcaggctaaatcgatctccctgaaaccttgtctcattatcgtggacggggataaagcaggagacggcgttatccggactgcccgtagcaaattcaaagatacctttcagtcaatccgttatacacctctgaattccagtagcatcctcaacttcttccacgtattcaagaatctttacatcatacagctccccaaaaccaaagtgatcgaagacctctacgacacctgcgtgacctctactctgataggcaccagatcttacaacccttccaataaagatttcgacctctccaaattttacggcaagaaggaactcttcgagaagattattttccccaaccaaaacacaattaacttcagcgaattcgacctcatcttcaatacgatctttcatatccagctgtaccactatatcttttccaactccaagaattga

SEQ ID NO: 8629 - RNA, 1782 nt, synthetic construct
  source 1..1782: mol_type = other RNA
atgaacattctcaagtttccgattagcaaacttgcgcttgctagcgataagaaagacctgtccaatctcctcaattacgattataaagacttctgttggatcctctattcacagcccatccacatgaggtacaaactcatcgagattccaaagaaaaatggcaagataaggatcattcacgctccagattcgcacctaaagcaactgcagaaaaatctggccattcaactgaataaaatcttcgaagagaagaatctgtacgagccagctttctcttttgcctttcgcagaaacaacaacaagcagaaatttggcatttacttcaatgctaaacggcatagaaatcgcaaattagtaatcaacatcgaccttaaagactttttccataccatcgagtttaaacgtatcgtcggctactttaagaggaataagtacttcaacttcccaattgacgtggcgattggtattgcccaaatcgcttgctataaggaccctaatacagggaaaaccttcttgcctcagggaagtccagtgtctccgattatttccaacctgattactgaaatcctcgacgcaaagttcactaagttggccaaaaagtataagttctactacagtcgctacgcagacgacctaactttatcgttcgacacaaataacatcccttctgaaatcgtcaaatgcaacgagaataattactccctgggtagggaggtcatcaaggccattaagtcttccgggtttaacataaataaggacaaggtcagctttaggaccaactttgatagacagcaggtaactggcttagtggtgaacaagaagataaacatccctcggaattattatgactttagtaagtccatggcatataactattgccaatacgctacattcaagaaatcaagctatcacacttttgcaaaaaagaactccaatcagggcgaaagcataataggcgtgctaaactacatctacaatatcaagatggagtataagaaccgaacaactgataaacccccttacatttacaccgaattcaaaatcgacaagcccaaaagccctgagcagttgttctggtcaaagaactcatttatccggctgcttttgcaaacttatttccaggagtcttttgtttatcggaagaaaattcatctgctttgcgagggaaagacggatccactccattttaagaattacatctcaacgcttcccattgagattcagtcttattacgactttaccgccttcaaggaagaggatctgacgatatttcagaaagagttgaatatccgatccggaacccccaatctgaaaagattcatcgagatttacagtactctgtacatatccaaaatgatctttgtgaaccccacaatactcatcgttgataacgacaaggcaggaaacgaagtttttcagtgtgccaccgggagatataaaaagacaaccaaaaacggcaaagtcattataaacagcatcgaaatcgaatatgcctatatttgtaagaacctgttcatcatcaagctgcccaaaataaaccctgaaacaacgattgaagatctgtatgataccaccctcacaagcacaatactgaacgggaaaagtttcacaaaggataatgtgtacgatccgaatatccactatggtaaagtggacttcttcaagaatgtgattcgcaagaaccggactaccatcgattacaagaattttgaggccattattgagattatcaaccgtatcttcaacttgaatttctacctgaacctgaccaatataaattga

SEQ ID NO: 8630 - RNA, 1752 nt, synthetic construct
  source 1..1752: mol_type = other RNA
atgcttgccacggataaaaaggacttggcaaactttctcaactacgattacaagcatttctgctggattctatactctcagcctattcacacccgctacaacataatagaaatcccaaagaagagtggtaaactaagggtgattcatgccccagactcccacttgaagcaactgcaaaaaaacctggccgtgcaactcaccgagctgttcgagcagaagaatactgggaaaccctccttcagctttgcgtatcgtagaaataacaaggaggaaaaattcgggatttattttaacgccaaacggcacagaaatcgcaagctcgttattaacatcgatttgaaagacttcttccacaccatagaattcaagcgcattgttggatattttacgcggaacaaccattttaagtttcccattgatgtggccatcgggatcgcccaaattgcatgctacaaggacccaaaaacaggcaaggtctttctgcctcagggttctcctgtgagtcctattatatccaatctgataacggagatcttagatgcaaagataaccaaactggctatccagtataagttctattatagtcggtatgctgacgaccttacactatcattcgatactaaaaagctgccgcaggagattatacagtcaaacgagaataacttcttcttaggagacaaaatcatcaaagcgatcaaaagctctggttttaacatcaacaacgacaagatttgcttccgtactaatttcgatagacagcaggtcacagggcttgttgtcaataagaagataaatatccccaggaactactataatctgtcgaaaagtatggcatacaatttttgtcagttcgccacatttgagaaatcatccttccacactttctccaagaataatagcgacaagggcaaaagtatcattggaatcatgacctacatctacaacattaagaacgaatacaacaaccggaccattaatgctgagcccaacatctacactgactttaaaatggagaaaccaaagtcacccgaacatttattctggtctaagaactccttcaataggctctttctccacacctattttcaggaattcttcgtgtatcgaaagaagattcacctgctttgtgagggaaagactgatcctttgcactttaagaattacatctctacactggataagaagatccagaactactacgaatttacggctttcaatgaagataagctcaccatctttcaaaaagagttgaatattcgcagcggcacacccaatcttaaaaggttcatcgacatatatagcaccttgtacgtaagcaaattaagctttctcaaccctaccatcattattgtcgataatgacaaagctggcaatgaagtgtttcagtgcggggtaggacgatataacaaaacatcacagcatggcaaaaccactatcaataagctggaagtggaatatgcctacatctgtaagaacctttttatcctgaagctaccgaaaatcctcaaagatactacaattgaggacctgtacgagccatctgtgacctccactctgctgaatggcaaatcgttcacaaaggacaataactatgacagcaatctttactacggcaaggtcgagttgctgaggaacgtgatcaagaaaaacaagctgtccattaactacaaaaacttcgagacaatgctggaggcaatagatagactgtttctcatgaatctgtatctgaatctcaccaattctatcaagtga

SEQ ID NO: 8631 - RNA, 1785 nt, synthetic construct
  source 1..1785: mol_type = other RNA
atgagtaagcagttaaatgctctcaaacagtgtcagacaagccgggatctggctaagctgctgggatattcttacaaaggattttgctatgtgctatatagcgccccaattcacaccaaatataggatggtaacaatccccaaaaagaatagccccattggcagacaaatactgatccccagcaatcgtctgaaaatcctgcagcaaagacttgcaactttgctgacaaacatttacctcgagattaatcagaacaatccgtcgtgttgctacgcctttattcccgacagcaatactcagaacttcggtattgtggagaacgccaaacagcacatcaataagaatatcgtcctcaacatcgatcttaaagacttctttacaagcataacgttcagtcgcattgtggggtttttcactaagaacatacagttccggttgaattatgacgttgctatcactctggcgcagatagcttgttatagagcaagtcctacttcccacgcataccttccccagggatccccatgttcccccatcatatccaacttcgtgggtcagattatcgattccaagattacgtttcttgccaaaaagtttcactttacatactccaggtacgcggatgacctgaccttatcattcgacaagaaccagattgacagcaagatactggaatatgatcaaaccacaagggaatacaaactgggaaaactgttggagaaagaaatcctcaagacaaatttccaaatcaactatcagaagttgtgtgttaggaccaaacgcgaacgacagcaggtcactggactagtggtgaacaagagtgtgaacgtcaataaggcatactattaccatacgaaaagtatggccttggagtattgcagaaatgggacgttcactcggtcaacatctcacgccaagaagataggccagccgaacttccattcgttgatggggtactttaactacatccactatataaagcgagagaacctcaaaagacatcagcctctccagcctaaaatcatcctgccagaattgacaaataacgacattcagcgcaacaaaaagattcctaaatctctgaactccttcgagaagatgatgatcaaagctatttttcactaccgtttcgtacattccgagaagattaaaatcctatgcgagggtaagactgacccacagtacctcaacctgtaccttaagataaaaaagtccaactgcttccatcctaccgcattttcagaccacacacccaccttttttcaaaatgagctcaatattcggagcggcacccaaaacctcaaaaggttcatttctgccttccagaacctgtatatcagcaagaatgaataccagctgccaaccattatcatggttgaccctgataaagatggcttcgatgtgttcaattatgccaagtcaaagagcaattcatacatcgaaatacagaccaactcttctatcaaggtcgctcatgtgtttcacaacttatacctgatctcacttccacagaattctagtatcaaccaacagcagatcaattccatcgaggatatgtttgacaaaaccctgcagcaacaaaagattgggaataagaccctctgcctggacaataagtgctcaggccaaaaacacaacaatcattatggcaaggttgaatacttcgaacacatcattaaatcccagaacaatcttagcttttctaacttcgatcgcttatatgaggtcattgagaacatctgttacctgcactttttcaagtgctttagtaagaccttccattga

SEQ ID NO: 8632 - RNA, 1698 nt, synthetic construct
  source 1..1698: mol_type = other RNA
atgagctctaatctgctgctcctccaaaattgtaagaataggcaagatttggctgacttactggacatagattacaaccagttctgttacatcttgtatgcccagcctatatccaagcactacaacaaagcacttatttacaagaagaacggcaaaccgagagagattctagcccccgataatcatttgaaatatatccagcagaggctcgctatattgctcgcaaaaatctacgacgaggttaatttcaggtctacacaactctgctattcttaccgaaaagacagcgagcaaaagttcgatttccatgaaaatgctaagttgcatatcggatccaaactggtgatcaatgttgacctgaaggacttttttaccaacattacattcagccggattgtagggtatttttcgaagaacaagaacctcaagatcaattatgaagtggctgtcacgattgcccagattgcgtgttacaaagaccccattagtaacaagagttatcttcctcagggctccccatgttctcccattatctctaattttatcggcaccatcctcgatgatcgtctgtttaaactagccaaccgaaaaaagtttacatatagccgctatagtgacgatctaaccttctcctttaacacaaactcctttccctccgatatcgtcactaagatcgaaaagaactgggttctgtgcaaaacaattcgcaacactatcaatctgtgccaattcgagattaatgaggagaagatagtgattcgggacaaatataagagacagcaggtgaccggactgactgtgaataaaaaggcaaacatcaacgctaattactacaagtatactcgggccatgatcgacaagtattgcaaaaccggtctttatgaacggtctaaacaccattccatcgggatcgacttcagtgaaaaatcactgattggtattgccaaccacatcaagaatataaagggcattaagtacaaccacacgaacattattgataaaaacctggagccgttacagatttaccagaacctgaagggcttcagtaaaagctacatcgaccttatgttccatatcaactttgtgcaccagtcaaaaattaagattatctgcgagggaaaaaccgatcctcaacatatctataactatttgaggaacaccgatctgttccacaaaaatcagttcgacatcatttcctttgaaaaacaccttagctcatttacacagccattaaatctttcagggggtaccgatcagctgtgtaagttcattaagatgtactcgcacctgtacaagagcatcgataagtcaaagtatcctaccatcatatttgtcgataatgacccagcaggaaattcaaccttcaatacagcgaagagctattctacttacaatgagataaagatcctgagagacagtattcgcgtagccttcgtctgcaaaaacctgtacattatacagtccgccaagcattgtcccggcatagagtacctttatccatctcatgtgctcgaggaaaagttagaaggaaaaacgctgaatttgagcaatgacaaaatcaaagatgacagcgagtacggtaagatcgtgttctttcacaagataatcaagcctctggggaagaaaatatacctgggcaaatttagatacctctgctttgggttctaccagatcgcacagcacctcaaaaacacttga

SEQ ID NO: 8633 - RNA, 951 nt, synthetic construct
  source 1..951: mol_type = other RNA
atgagttcaaatcttcagctgctaaaacaatgtcagaatcgccaagatctcgctaatctcctgatactggattacaagctgctatgtttcacgttatatagccagcccatccataacaactacaaaaaggctatcatctacaagaagaatgggtcaccccgggagatactcgcccctaacaagcagctgaaatttattcagcagaaactggcgctgttactgaatgatatcttcgacgaaatcaatttcaggaagactcagctgtgctactcctatcgtaaggattctgaccagaaatatggctttcatgagaatgcaaagctccacaccaaatccaagctggtcataaatatcgatttagaggacttcttcactaatatcaccttttctaggatcgttggattcttccacaaaaacaagaatctcaagatcaactatgacatttgcattgcaattgcacaaatcgcttgctaccgggacccgaatactaatgacagttatctcccacaggggtcaccttgtagccccattatttccaactttcttggtaccattttggatgaacgattgttcaaactgtccaagagaaaaaagttcatctacagcagatatagcgacgaccttacattttcctttactacaaattcgatccctcaggacatagcccagaagaacggcaacatatggacactcaataaaaccttgatcaacaccattaacagctgtcaattcaagatcaacaaggacaagatcattattagggatcagtatcagagacaacaggtgacaggattgaccgtgaacaagaaggccaacattaacaagaactattacaagtacacgcgcgctatgattgataaatactgcaaatctggcctgtacgaacggtctgcctaccacagtcttggtatggccctgttgcataaagatctgaaatataaagccccatga

SEQ ID NO: 8634 - RNA, 1806 nt, synthetic construct
  source 1..1806: mol_type = other RNA
atgtcctctctccaggcccttagaaaatgtgaagatcgtaaagacttagctactatactcggatattctctgaagcaattcactgccattatttatgcccaatctccccagtataagtacaacagctttacgatacctaaaaagacagggggcaatcgcaacatccttgcacctaaaagtgacctcaaacagctgcaacaaaagctcgccaccctattgtccaagtgctatgaggaaattgaatgtaacagattgactaaactgccaaaaccggttagtattctctctttcagcagtcatggctttcgccggaagatcgacaataagctgtcaagcgacaagttcaactttgacatttatagcaatgctaagtctcatacaaacaaaaagtacgtcctcaatctcgacatcaaggattttttcaagtcaattaccttcagtaggatagtgggatattttgtgaaaaatcgggacttcctgcttgacgtggatgtgtcagtcacaatcgctcagatcgcgacctacagggagacagactctactgaaggttatctgccccagggatcaccgctgtcccctattatctcgaattttataggaagtgtcctggacattaaaatcttacgcctcgccaagaaatataaactagattacacgcggtatgctgacgatatcaccctgtcgactaatctgaaagattttccataccagatagctgtacatagacaggatcgctggatcgtagggctgcaattggagaagattattaagtccagcggatttgaggtgaataaaagcaagaccaggctctacacaaacaacgaacggcaagaggtgacctccctgtccgtcaataagaaggtcaatatcagaaaggagtactatagatacactcgatccatggtcaaccagtattgtatgaccggtatgtacttcaaatcaagtgaacataggcgggccaacatcgccaacgataacagcctgaacggcatcctgtccttcatatactatatcaaacgtgatcgcaaccttgttgtcgacgatgggtatattaaatactgcgatatgaaggggctgcagaagctgtataccaagttcttattccactacaactttatctaccagtctcgcacaaccgtgatcggggaaggttttaccgatccaagacacctccgtatcgcctacaaagttatttataatgctcacaacacgtccattaagttcacttatctgggcaataccaaacgatttagccacttcacaggaatgaagggcggcaccggtttaatcaataagttcttgtcagagtaccagcttatagataagagcatcgccatttcgaagtttccctgcataatcctgctggacggcgacaaggcagggaatgacgtgattaaaatggccgaaaagctgtttaacaagacaatccggaaaattaacatcccaaaagtgggcattatgctattctaccatgtgtacaacaatctatacatccttcagctcgacaaagacgtagatgtggagaaactgtacgatagcaacgttcttcagacaaaagtggatcagcgaacgtttaaccctagtaataaaaagacagaccagaccaagttctatgggaagaaggagttcctggagaaagttattgagcccaataggtcttcaatcaattttagcaacttcgagatagtgttcaagacactcaatcacatccagttgtaccacttaattgcatacaggtctgaagcaggcttggcagcgaaaaccaatttgagcctgatctccgcgaagtcctctaacactacttga

SEQ ID NO: 8635 - RNA, 1761 nt, synthetic construct
  source 1..1761: mol_type = other RNA
atgaacaaattgagtaaccttcggagctgctccgaccggaagggtctagcttccctcttaggcttctctgaaaagcaactcacaaacattctgtattcctccaatatcaacgagaagtactacaagtttagcattcctaagaaatctggcggagataggagaatactggcgccccacgcttcactcaaactgctgcaatcgaacatggcaattctgcttagtcaatgccatgatgaaatcgagaatgagcgggtaactaaaactgcacagcagagcagcatcctaagcttctcatcacatggctttcggaaagctcttaagaccgataactcactggaaccatttagcttcaatatttacagcaatgccaaaaagcacattaacaagaagtacgtgctcaatattgatatagttgacttcttcgagagtatcaccttttctcgcattgtgggctacttccacaagaatcgtcactttttactcgacatcgatgttgccattttaatagcccagatcgcaacgtatagaccctccatcagcgtagaaggttatctccctcaagggagtcccctgagccctatcatcagtaacctcattgggagtattctggacgctagaattctaaggctcagccagcgatataagctggattacagccgctatgcggacgatatcaccctgtcaaccaacatgaagtcctttccaactgagatcgcctatcttaagaacgacgagtgggtcgtcggatcgaaactgaaaaaagctattgagggatctagattcacggtgaataagaaaaagaccaggctgtatactagaaacaagaggcaggaggttacctctctgaccgtcaataagaaggtcaacatcagcaagaagtactatcggtacactcgtagcatggttaatgaatactgtaagactgggtcctattctaaatcctccgagcaccgctatacagaaatagatagtgacaattcactgaatggcattctctcctacatttactacatcaagaaagaccgtaacgatatcgcaatcgaccacaaattcagggaatacgagaaattggtgtctatagaaaagctgtacgtgaaattcctgtttcactactacttcatctaccccgaaaagatgttagtggtgggtgagggcgtgacagacccgctgcatcttaaagtcgcctgtaaccagttatcaaagtcctcgcgaaaatatatcaagttcagttacctgggggagatggcacgcttttctaaatttatgcggttcagtggaggcacaggccatatccataacctcctgacaaactatcacacgatttttaaagctaagtccctgtctctgaaaccttgtataatcttggtggacggggacaaagccggtaatgacgtcgtgaagcatgcgaagtccttgttcaaagaacgccagctggtttttaagggagccaattgcatacgagcctatcacttggatcataatctttacatcatccagctgaataagggaaaagagattgaggatctctatcacccagacattaaaaaaaccaagatcgggatcagagaattttctagcgagaatgactcaaagaagctagacgtgaccaaacattacgggaagaaagaattttacgagaaaattgtcgtggaagagcaggatacaataaacttttctggcttcaacgatgtattggccacattgtatcacattcagatgtatcacttcatcctttggctcttctcagagaggaagatatga

SEQ ID NO: 8636 - RNA, 1779 nt, synthetic construct
  source 1..1779: mol_type = other RNA
atgaacatactggaacaattgaaatcatgcacagacttaaacagcctggccactcttttaggctactcccccaaggtgttctcttacatcctgttttcgaagtctatcaactatcagtacgagaaattcgaaatcgacaaaaaggacggcagtaaaaggataatccatgcccccaaagagaagttgaaggagcttcaacgcagtctggccaatgtgctcaatgagtgttacaacatcatagagaagaacagattgaaccttaccaataagtatcagtgcgtgctctcacacgggtttcggaacaaactggttctggatctgcctattagcaacaaaaccaacattaagctgaaaagcaaggagttcatttttggaattacttcgaatgcgaaggcgcacattaacaaaaagtacatcctgaacatcgatctgaagaacttcttccattctattacttttgggcgtatagtcggcttctttgagaagaatatcaactttaacctcaccaagaaggtagctatcctaatagcacagattgctacctatcgggattccacaaatatggtgggatttctgccacaaggtagtccttgttctcctataatcagcaacttaatctcaggaattctcgataagagactctatgagttcgccaaagaaaataaatgtacctacacaaggttcgccgatgacattacctttagcacaaacatcaagaactttccaacgaatctagcaatcttgagcaatgaaaaatacactccatccaatcagcttatccgaatcatcgagaaaaccggctttcttattaatcccaccaagactcgactgaatacattcgaggaccgccaggtcgttaccgggctggtcgttaacaagaaagttaacgtctcctctaattactaccggtatactaagtctatggtgaacaaatactgtcaggagggaatatattacaaatccaaactgcacaccaatgagaaaataacaacctccaattcactacaggggatactggacttcattttcaacatcaagaagccagctttcgtcaaccctacgaattacaaggaattttccaaacttgactcaatcgagaaactcagtctgaaactgaacttccataagaacttcattcacaataccgaaactagaattatctgcgaaggggtaagtgaccctatgcactttaaaaatgcttataagagcctctacaagtcaaacaaatacccattctttttcaaggtcttgacttctttcaactctctggtgaaaattaccggcattggaaatggcaccggcaatctcaagcacttcctgtccatgtataagaagatcaacacgagcaaaatcaataatatcaacccctgtattgtgttggtggatggtgataatgagggtgaaaaggtgttaacagcagccaaaaagatctttgacaagaattgctacaaggaactctcatttttttccccgttttataatcttgacgattttcaggtgctccattgcgaaaagaacttatatatcgttatgctgcccacaaatttcacaattgaggatctatacgacccgatttacaagacttttacccttggtacgaggaccctgaaactgagcaatgaagatctcgatcacactaagttctatgggaagacagagttcttcgaatatgtgattaaacccaatagtcatgtgatcgacttcacaaacttcaaaaagattttcgaggtcttgtttcacgtacagctctataacttttttcatagcaacctgtcctga

SEQ ID NO: 8637 - RNA, 1761 nt, synthetic construct
  source 1..1761: mol_type = other RNA
atgaatgaccttattctgctgaagaactgcaaaaatcttcaagacttggcctatcttctgggctataccccgagaatactgtcatacactctatttaaaaggagcatactacagccctacacaaaattcgaaatacctaagaaatccggcggtaaacgcgtcatcctggcgccaaacaaagacctgaaaaaacttcagtcagctctcgcagagctcctagactcctgttttaatataatcgagaagaaccgcttggagaacacgtcctataccacatgtatcctgagccatgggtttcgttcaaagttcaaaattgacataccgaaatcacacaagaatcgggaagtcctgaaaactatagacctgaaactcgggatttattctaacgccttcaagcataagaataaaaagtacgtgctcaacattgatctcaaggatttctttaccagtataacattcaaccggatcgtgggttacttctgcaaaaacgaaaatttcttgcttgacaagaaggtggctatcctgattgctcagattgcaacctacagagagattagatcttctgaaggatttctgccacagggctctccaagttcccctattattagcaacctgatagcaggaatcttggacaatagactgaacaatttggcccagcggtataaatgtacctacacgaggtatgccgatgatctcaccttttcaacaaatattagcacatttccaacggaattgtatgattacgagaataaggtaatcgggaagaagctgaataagatcataaaggactcgtggttcgagattaatccaagcaagacaaggctgacccataaccaaaatcgacaggaagttactggactgactgtgaacaagaaggtcaacatttccaaaaactattaccgatacagtcggtcgatgatccataacttctgcattaatggcacttttacaaagtccaaactccacaacaagcctcttgttttaaacattaacagcctcactggtatcactaactacatcttcaacatcaagaatcccaattttgagaagtcccgtaccctgcgggacctcgaggatttatcctctatcgagaaactgtacgtttcgttcaattttcacaaatacttcagcaacaacgaacagcctaacatcatttgtgagggaatcaccgaccccttacacctcaagaatagctggaagaacttgaataaagatcaactggagtacaagatcacgtctctcgaggaaattaaaagtcttcatgaagtgatgggacttagcaatggcgtgcccaatatgacaaaattcctgcgccagtatcacaaactgcacaaaagtaagtacaagaatcctcagccttgcatcctcctactggatggggatgatgagggggagaaactgttaacaaatatctcatctagcttcaagcagaaaaagtctttggacttttataacttccgcgatccctccaacagcctgctgagggtgacccacctgatcaataacttatatattatgcagctcccaaacggtaagtgcatcgaagacatttatgaccccagtgtgctgaccctgactcttaaaggcagaacatacaatcccagtaacaattcctttgataccaccacttactacggcaagaaggatttgatcaagaaggtaatcatcccccaaaagaattccattaacttcgactcattcaacatcatctttgacaccattctacacatcaggctctattcttttttttgtagcaaatga

SEQ ID NO: 8638 - RNA, 1872 nt, synthetic construct
  source 1..1872: mol_type = other RNA
atgaagaatctggaaaatctcaaatcttgccatacagcagaggatttgtctacacttctggacttcccgtataaacggttcttgatcattctgtatcacggccacatttcctccaagtatagcagtttcgagattacgaaaaaagatcagtcccttagatccattaatgcccctcataaagagctcaagatgattcaggagaggctcgccgatctgctcgaacaatgtttgagcgaaattgagaatgaccgtcttaagaaaaatctggaaaagtttcacgagaacagccctaataaatatcccaagtttcatctgacttcacacggcttcaggaaaaaactgtatatagatcccccctacaatatccataccatcacacctggcatctttactaatgcctatgtgcataccaacaagaatcttgtcctcaatattgacattaaggacttcttcacttccatcaagtttaatcggttggtcgggttcttcattcagaacaagtacttcgaactttctgaggaagtggcctttactattgcaagaatagcaacctttcgaaagaatgacgatgagatgggatatttgcctcaaggttccccgtgttctcctgtgataagtaacctgtttactagtatgctggattcacgccttgtgaaattatgtaagaagaacaaatgcgtgtacacaaggtacgctgatgatatcaccatatcaaccaatctaaagaagttcccccaggaaatcctaactatcatcaacgataaggtgaagttaaatgaccggctagagcgccagtttgaagcctttggttttaacatcaacaacaagaagacgcggattagtaataggaaacaacgccaggtagttacgggactcgtcgtgaataagaaagtgaacgttaaccgatcttactataaagccactagagccatggtggacaactattgcaagacaaacacatttgtcaaaagcaaataccacgtttttcatgagttgaagattgaaaactcccagagcctgaatgggatcctgaactacatctacaacattaagaaggtggagccatacaaactgattgaaaaccatgacgactacttaaaacaccacaatgacttcatcgataagaagaattgggagtcacgtctgctctatcaccatataaacactctgaacgggctggacaaaatctatgcgtcctatatattccacaagaaatacgtctacaacgaaaagaaaagcattatttgcgagggggtaaccgatgtcattcatttcaagaaggcagctgataaattaggcatcacgagcatcaaatttagctctttctcccccgattaccagtttgagaaactgatccacttggacggcggaaccgataaccttaagaagtttctaagcaacctgaagctgctctataaatcggaagtgagcttaaatctcctgaatccaaccattatcattgttgacagagatgatgcaggtaaaggcgttatcgctgaggccaagaaactgtttaagaacagttggcacgagcactcatcatctacagtgcctaacatgaagttctacaacttcttcaagaaattctacatcttccatcttccaatcgtaccctatgacccaaacaagaccgtaatagagttcctgtacaataatagtaccctgctcaatgacaccatttctatcaacggaaagacactgatctgtgaagctatcgcgacctcggaacaaataaagaaaaaggaggtctacagtaagatctcattcatcaagacaataatcccaaagcacgagccatccctggactataaatactttaaacaggtgctcgacgtggttgacgagataagcaaactcatgaaaaccgcttga

SEQ ID NO: 8639 - RNA, 1872 nt, synthetic construct
  source 1..1872: mol_type = other RNA
atgaagaatctggagaatctcaaaaactgtgaaaatgctagagatctggcgactctgctggacataccctataaacgcttttccataattctctaccgaggacacatctcatccaaatactcgagcttcgaaatcaaaaaaaaggaccagagtcttcgtaaaatccatgccccgtatgaatatttgaaaatcctgcagaagaagctagcaaatctactcgagcgctgtttaagcgagattgaaaatgaccggttggctgagaacctgtctaagtttcaggaaaatcgaccgaataagtatcctaagtttcatctcgcaagccacgggttcaggaaaaaactgtacattgactccccatataacgtacatactatcactccttccatttttaccaatgcccacactcatacaaataaaaacctcgtgctgaacattgacattaaggactttttcacctccatcaaattcaatcgcttggtcggtttctttattcagaacaagtacttcgaactcagcgaggaggtggcctttacaatagctcgaatcgctacctttagagagaatgatgacgtcatgggttacttaccacagggctccccttgtagcccaatcattagtaacctgtttacagcaatgcttgatagtaggttggtcaaactctgcaagaagaatcagtgtctttatacccggtatgccgacgacatcacgatcagtactaatctcaaagaattccctcaggagatactgacagtggtaaacgacaaggtgaaactgaatgatcggctgcagaggcaatttgaggcctttggcttcaacattaatcacaaaaagaccagaatcagtgaccgcaaacagaggcaggtcgtcacaggtctggttgtgaacaagaaggttaacattaaccagagctattacaaagccaccagagcgatggtggataattactgcaagacaaatacattcgtcaaatcgaaataccatgtgtttcatgagcatcagatagagaattctcagtccctcaatggcattttgaactacatctacaacatcaagaaggttgaaccttataagctgctgaattcccacgacgattatctggataaccacaacaacctgattaacaaacggaattgggaaaaccggttactgtaccatcacattaatacgctgtctgggcttgatcgcatgtatgcactgtttatattccacaagaagtatgtgtacgaccacaaaatctctatcatctgcgaggggattactgacgtactgcactttaaaaaggcttcagagaagcttgggatcaataacatcaggctatcttcattcaatagcgagtatcagttcgagaaacttcttcacctggacggcggcaccgataacctgaaaaagtttttgagcaacctcaaactcatctataagtcagagattcccttaaaggatctcaatcccactattattatcgtggatcgtgacaaagctggaaaaggagttattgaggaagcaaggaagctattcaagaatagttttaaggagcacaactcttcaagcgtcaaggacatgaaattctacactttgttccaaaagttctacatcttctgcttgcccatagtgtctatcgacagcaacaagaccgtgatcgaattcctatataacaacagagatctccttaacgaaaccatgtctgtgaacggaaagcccttaatatgcgaagccatcgccacaaaggagcaaattgatcaaaagaaggtataccccaagatactgtttatcaagaacatcctgccaaaatacgaatccatcctggattacacctacttccagcaagttttcgatgtgattaacgagatatcaaccttgatgaagacggtgtga

SEQ ID NO: 8640 - RNA, 1872 nt, synthetic construct
  source 1..1872: mol_type = other RNA
atgaaaaatttggagaatcttaagaactgcgagaatgcccgagatctggctaccctcttggatattccgtacaaaaggttcagtattattctgtatcgccatcacataagtagcaaatactctagtttcgagatcaagaaaaaggaccagtctctgcgtaagatccacgcaccttacgagtacctgaagatattacagaaaaagctggccaatcttctggaacaatgtctgtctgagatcgagaatgatagattaactgaaaacttggccaagtttaatgaaaaccggccaaaaaagtatcctaaatttcatctcaccagccacggctttcggaaaaaaatttatatcgacagcccatatgaggtccacacaattacccccggaatatttaccaacgcttatacccataccaacaaaaatctggtgctcaatatagacatcaaggactttttctccagcataaaatttaaccggttagtggggttctttattcagaataagtatttcgagctcagcgaagaggtggccttcacaatcgttcgcattgcaacatttagggagaatgatgatgagatggggtacctcccacagggctcaccctgtagcccggtcatttccaatttatttgcctctatgcttgactcccgcctagtgaagctctgcaagaagaatcgttgtgtttatactcggtacgctgacgacataaccattagcacgaatttgaaggaatttcctcaagacattctgactatcgtgaatgataaagtgatcctcaatgatcgcctgaaaagacagtttgatgcattcggctttaacgtgaataataagaagactaggctctcttcaaaaaaacagcgacaagttgtgacaggtctggtggtcaacaagaaggtcaacattaacaagaattactacaaggccactagggcaatgaccgactccttctgcaaaaccaacacattcattaaatccaagtaccacactttccatgagtctgaagtatctaacagccatagcctcaatgggatcctgaactatatctacaatatcaagaagatcgagccttataaactgctagagtcccactcggactatttgaaacaccacaacgaactaatcgacaagaaaaattgggaaagcagactgctatatcatcatatcaacacgctgtccggtctggataagatgtacgctctgtttatattccacaaaaagtacgtgtacaacgagaagaactccattatctgtgagggaatcaccgacgtgcttcatttcaaaaaagcagctgttaagctcggtgtagataatctgaagtttagttctttccactccgattaccaattcgaaaagctgttgcacctggacggaggcacagataaccttaaaaaattcctgtccaaccttaaactgctctataaaagtgaagtttcactgaaggacctgaacccaactattatcgtcgtagatagagatgacgcgggcaaaggggtgattgaagaagctaaaaagctcttcaagaactcacttgaagaatatagttcgtcaagcatctccacgttgaagttctactgcatcttcaagaagttttacatattccagctgcccattgtgccctacgattctaagaagacagtgatcgagtatttatacaataacagtaccctcctaaacgaaacaatgactatcaacggaaagacgttgatatgcgaggccatcgcgactgccgagcagatcaagaaaaaagaggtttacagcaagattgccttcatcaaaaacatcattcccaaatatgagtcaacccttgactacacatattttaagcaggtctttgacattgtcgacgaaatttcaacactgatgaagaccgtatga

SEQ ID NO: 8641 - RNA, 1872 nt, synthetic construct
  source 1..1872: mol_type = other RNA
atgaccaatcttgaaaatctaaagcgatgtgagactgccagagacttagctatcctcctggatataccttacaaacgcttctctataattctttaccggggccacattagttctaaatactccaccttcgagattaaaaagaaggatcaaacatctcggaaaataagcgcaccttacgagtacctgaagattgtgcagaagaagctgagtgtgctattagagcagtgcctctcagaaatagaaaataataggctggctgaaactctgtccaagtttcaagaaaacaggccgaataagtatcccaaattccatttggtgtctcacggatttaggaagaagatctacattgatagcccttataactttcattcaatcacccccggcatatttactaacgcacacattcatacgaacaaaaatctcgttttgaacattgacatcaaggacttctttacctctatcaagttcaacagactcgttggattcttcatccagaacaaatactttgagctgtcagaggaggttgcgctcacgattgcccgcattgcgacttttagggaaaatgacaaagtaattgggtatttaccccagggatccccttgcagcccagtcattagcaacttattcacagccatgctggactcgcgattggtaaagctctgcaagaagaacaaatgtgtttatacccgctacgccgatgacattacaatcagcaccaatctgaaagaattcccagaggcaattctcacgatggatgaaaatttgattgtactgaacgagcgtctcattcggcagtttgaaaccttcggtttccacatcaataacaaaaaaacacgcctggcaaatcgtaaacagagacaggtggtgaccggccttgtggtcaacaaaaaggtcaacatcaaccggcactattataaagccactagagccatggttgactccttttgtaagacaaatacatttgtgaagtccaagtatcatgtgttccatgagccacagatcgaagattcgcagagtcttaatggcatactgaactacatatacaacatcaagaaggtggaaccatataagctgcttgagcagcatgatgactacctgaagcatcacaatgagttcatcgataaaaagaactgggaaagtaggctactgtatcaccacatcaacacactgaatgggttggacaaaatgtatgggtctttcatcttccacaaaaagtacgtatacaacgataaaccctcaattatatgcgagggtattacagacgtgatacactttaagaaagccgctgagaagcttgggatcactaacatcaagtttagttccttcaattccgactaccagttcgagaaattgctacatctggatggtggcacagaaaacctgaaaaaatttctgagcaacctcaagattctctataaatccgaggtccaactgaatttgctcaatcctaccatcatcatcgtcgatagagacggagccgggaaaggcgtgattactgaggctaagaaattgttcaagaattcctggaaggaacactcatctaccactgtccctacaatgaaatttcttgctctgttcaagaagttctacatctttgaattaccggtggtgccctttgaccccgagaagaccgtcattgagttcctgtacaacaatagcaccctcctgaacgagacaatgatgatcaatggaaagcatctgatttgtgaggcaatcgctagcaaagaccaaatcgataagaaaaaggtgtacagcaagatcagtttcatcaagaatatcatcccaaaacacgaaagctcactggactatacctattttaagcaggtttttgatgtgattgaggagatctctacgcttatgaaaactatatga

SEQ ID NO: 8642 - RNA, 1098 nt, synthetic construct
  source 1..1098: mol_type = other RNA
atgaaaaatctcgagaacctgaagaaatgtgaaacttcaaaagacctggccattcttcttaacgtaccatacaagatattcctgatcacactctacaatggacacattagcagcaagtatagcaacttcgaaatcaagaagaaagataataccctgcgcaagataaaagcgcctatccagaacctaaaggacattcagaagaaattagcagatttgctggaatactgcttgtctgagattgagaatgaacgactgaagaagatacagttaaactttagtgagcattcccccaataaatatcccaaatttcaccttacctctcacggcttccgcaagaagatttacattgagtcaccctataacgtgcatactatcaatctgggtatcttttccaatgccagtgttcacaccaataaaaacttagtcctcaacatcgatatcaaggacttcttttcctccattaagttcaatcgactcgtgggattcctcatccaaaacaaatactttgagcttaacgaagagatcgcactgactattgcacaaatagccacatttcgtgagaatgatgatgaggtcggttatttgccccaggggtcgccttgtagtccggtgatttcaaatctgtttactgctatgctagatagtagactggtgaagctttgtaagaagaacaagtgcatttatacgaggtatgctgacgacatcaccatttccactaacctcaaagaatttccaaaagagatcctaacaatcgacgaagaccggattgtcttgaacgaacggctgatcaggcagtttgagacattcgggttcaatatcaacaataaaaagaccagactggccaaccgcaaacaaaggcaggtggtcaccggcctcgttgtaaataaaaaggtgaacatcaatcggtcatactacaaagccacaagagctatggttgattctttttgcaagaccaatacgttcttcaaaagcaaatatcatgtgttccacgagctgcagattgaaaatagccagagcctgaacggcatcctgaactacatatacaacataaagaaggtggagccatataagttgctctctcctcatgacgactactga

SEQ ID NO: 8643 - RNA, 1833 nt, synthetic construct
  source 1..1833: mol_type = other RNA
atgaacgccttatccagattgaagaattgcaacagtatcgccgacatcatcagctctttctccttaaacataagccccaaaaacttcagttatatcctctacatcctttccgacaatgacaaatataaggaattcaccatcccgaagtcagattcatcgatccgcactatctcctgtccggagcctaggctgaaatatctccaaaaggagtttagcaagatcattaatgactgcgtgattgaaattcagcacaagaatccatcatatctcatcgggaatcacgcctttgagaaatataaatccattgcaagcaacgcctacaaacatgagaagcagagatacatcttaaacattgacatcgagaacttctttagtagcatacattatgggcgtgtggtcggctttttacagaatgaccggtatttttccctaagcgaaaaaacctctaagatcatcgctaaacttgcaacacacaagggagttctccctcagggctcacccctatctcctatattggcatcactgattggcaatatagtggattctaggctgatgaagctggctagaaaatacaaactcacctacacaagatacgcagacgacattacattttctagtaaccgcaatttcagcactgatctgctgacctttaaggacggtatctgggtagcgaataagaagctgatcagtgccatcaatcattgtggtttcaagatcaaccacaaaaaaacccggtttagtgatcaaaatcataagcgagtcgtgaccggcgtcatcgtcaacgaatttctgaatacggacaaaaagtaccggaagaatactcgcgcaatggtgaattctctactgagcaaaggggagtttaaaatcctggacagggacaataatgaaatacagggcacaattgaacagctgataggtcgccttaatcattccatttctattaagtatcgcgatagggtgttaaatccacggcttccacgagatgtccgcattgaagtgcagaacaagatcaaagagaacctgatcaagataatccaatacaaggagaacacgacattccttccaaaaaatatcggactggacaagatcgaaaaagcgtttaacattgagaaggacgaagctaaatatctcctctcttttgtgcaaaaacgtgatgaccgtctgatcatccctgattgtaacatacgactgcttcggaacgtgctgttctacaaatatttcttgagcatggataagcctgtgattatcacagagggaaagactgacgctctgtacttcaaagccgccatgaaaaaactgctgatttccaatgatttgtacttcgtcaagcacaaaaagaatggcgagctggacaagttgggacttaccgggggtaccgctcccataaatgccttcttcaagtacgtgtacaatgataacaacttcgtggattttcacaagattaatgttaagcccaagtctcccgtcatcttcattctggactatgatgatgggctggataaggtgaaaaacctcctaaaaaagaacttcagcgagggcaaaagattttcccagattaagcggaacatttatatactcctcctgaacaagtttggcgatggggaggatttcaaaaaggacaacaaggtatgcatagaaaacttgattagtttcgatggagagaagattgctgtttcaaatgaaagagtttcctttcagggaaaagaactctcgaagaacgaatttagcaaaattgttttggaggagtacgagaggttcgactttactaatttctcaatcgtattctcggagatcaacaacattattaaccacttcaactacaacagggactga

SEQ ID NO: 8644 - RNA, 1854 nt, synthetic construct
  source 1..1854: mol_type = other RNA
atgtcgacactaaataaactcaggaaatgcgacagtattgaggacctgatctcatccttttcactgaaaattaccgctagccagttcagttatatagtgtaccgtgtccaagatagcgacaaatatcatcagtttacgatccctaaatctgatgggactacgcggatcataagctcacctcacaagaccttaaaatatcttcagaaggagttttccaagatctttatgcagtgtatcaccgagattcaacagaagcaccctagttacttagccaagaatcacgcatttgagaaatacaaatccattgcctcaaatgcctccctgcacaagcgtcaaaagtacctcctaaacattgacatcaaggacttcttttcttcaatacactacggtcgcattataggcttcctgaagaaagacaaatacttttgcctgtctgaccgaaccgcgaaaatcattgcgaaacttgctacatatgacggggtcctgccacagggaagtcccctgagccccatccttgcatccttgattggcaatatcatcgatacacgcctgagcatgattgctagaaaataccatctcgtatatacacgatatgccgacgatatcactttcagcagtaatagggatttttctaagtacctgctcgacaacaagaataatatttggcatcccaataacaagctgatatcggctattaacaagtgcgggtttagcatcaacatcaaaaagaccagatatatcaacagataccacaaacaggttgtgaccggtataatcgtgaaccattccctaaatgtggataagaagtacaagaaacacagtagagctatggttaataatctgcttaggacatcacaatttcaaattcataagggctacaactacaaatacaccggcaatatcgaccagttgattggacgccttaaccacgcaatctctatcaagtatagggaccgcattctgaacctgaacctcctctcggaaattcggaagtatatccagttcagcattaagcggaacctgatcaacataattaaatacaatgggcgcactgacaaaatcaaaaaacatatcggcattgatcggctggaaaggacctttgatattaacaacgaacaagtgaagaagtacttaacattcatccagaagaaagacgacactctctatccatccgacaatcagatcaagttactcagaaatgtgctgttctacaagtacttcatagggatagagagtacgtatatcttcaccgaagggaaaaccgatcacatttacttgaaatatgcattccaggccttgaacttcaccaagaacgtaaagatcatcaaacacaactctaatttggagaaactgggcctgtccggaggtacagaacctattaaccagtttattggacgggcctatactgataatttttatgtcgacttcgacaagatcaatatcaagccaaagcatcccgttatatttttgcttgactatgatgatggcctcaaaaagatagagagctatatcaaacggtgtttcaagacaggagatcagttcgcccatattaaagagaacatctacatcctactgctggaaaagcttactccgcagcaggacaagtacaattataccgaaaagaacaagcagacttgcatagagaatttgatccactacaatgactccaagataatgatttcttctaacaaccacgattgtgtgattttcgatggtaaggaaatcagcaaaaacgacttttcaattaaggtgcgagagaacaagaactcctttgatttcaacaatttctctagcctgattacagccatcagggatatcgagaatcatttcaaaactaaggtcaaactcgattga

SEQ ID NO: 8645 - RNA, 1842 nt, synthetic construct
  source 1..1842: mol_type = other RNA
atgaacaccctaagcaagctccaaaaatgcaatagtatcgacgagctgatttctagcttcagcctgaatatcactccaaagaagttttcctacatcctctatgtcttgcaggacaatcagaagtataaggattttacaatccccaaatccggcggcggaatacggacaatttcttgccctgaaccaacgcttaaatatcttcagaaggagttcaacaagatctttatttcctgtatcgacgagatcaaacagataaaccccagctatctgatcagcaatcatgcgtttgagaaatacaagtcaattgcttctaacgcctacaaacacaagaacaagaagtacattctcaatattgacatcaaggacttcttttcaagcatccactacggccgcatcatcgggtttctgcaaaaagaccggtatctgaaactgagtgaaaaaaccgccaaaatcattgccaagttagctacatacaatggcactttgccccaaggcagtcctttatccccaattctggcctcactaatcgggaatataatagatgccagacttttgaagctcgcaaagaagtataaattgacatacacccgatacgccgacgacataactttcagcagtaacttggatttttcctccttcctgcttgaaaaggaaaataatatatgggtcccaaacaaaaaccttattagcgccgtcgaatccctcggttttaagattaacaacaagaagactcgctatacagacaaatatcacaaacagattgtgactggactcgtggttaataaattcgttaacaccgacaagaactataagaagaaaaccagagcgatggtataccagctttttaagatcggcgagtttaaactgactggaaagaataaagacacgattacagggtctattgaccagttaattggccgtctcaatcactctattagtatcaagtacaaggataggatcctaaacccttttctgctgaataacgtaaggtccgaagtcaaaaataaacttcgggataatctgatcaacattattcagtatcggggcgaatccaatctgttgccaaaagatgtgggaatcaataagctggaggaatcgatcttcatagaaattgaggaagctaaaaagctcctgtctttcaacaagaacaagaacgataagctaatcattcccgacgatagtataaagcaactgaggaacgtgctgttctacaaatacttcataagcttcgcaatgaatgggccggtgataattacggaaggtaaaaccgatttcttctactttaaagcagctatgaagagtctgtcaatgaacaacaactttaagttcatccgacagaataatagaagcctggagaagctcggtctgagcggaggcaccgaccctattaacaagttcatcaagaacgtgtatcatgatgagaaattcgtgaacttttctaagctgaaggtgcgcccgaagtaccctgtcatctttatcctggattatgacgatggattggataaagtgtcccacattattaaagagaagttcaaagacgggacccagtttgcacagattaaagagaacatctacatactcctcctgaagaaaattacactcaattcttcagggaaaatggattataccaatgagccctcgaaagtttgtatcgagaatcttatcttactgaacgggaacaagataaatgtaatcaacgatgaggttgattacgagggtaccaggacttcaaaatcttgctttgctaaggaggtgtcaagcaatttagagaagttcgacttctccgaattcaagaatatcttcgacaaaatcgaagacatcgtgacccattttcatacatga

SEQ ID NO: 8646 - RNA, 1845 nt, synthetic construct
  source 1..1845: mol_type = other RNA
atgaatctgcaaaagctgcgaaactgtcaatccattgaggaccttatttcctcatttagtatcaagactaccccgagaaaatttgcctacgtggtatacaagatcccagataaccagaaatacattgagttcgagatcaaaaaggcaaacgggagcctacgcaaaattgccgctcctaactctactctcaagtatctgcagaagctttttgccgacataattttaaactgcgtgctcgagattcaacagaaggataagaactttctggttactaatcacggttttgaaaagcacaagagcataataagcaacgctcgtattcatcagggaaagaagtatctcctgaatctcgacatcaaagatttcttcgagtctattcatttcggccgcattaaaggatttctttctaacgaccagcactttttactgcacaataagacagctgaaatcatcgcgactttggccacttacggcgaaagaaaaactctgcctcagggatcccctctgtctccaatactcagcgtcctcatcgggtccatccttgatgcaaacctcatgaaaatcgcaaacaagtacaatttgtcctacacccggtatgcagacgacataaccttctcaagcaataaggatttttccaaattcctgctgagaaaagaccagaatggcaattggcagctaaaagggaagttcgagaagtacattaacaaagtggggttccatatcaacaaggaaaaaaccaggtatacgaacatcaataacaaacaaatcgtcacgggtttgatagtgaacaagttcacaaatacagatcagcggtaccggaagcagtctagggccatggtccacaaactgtttcaaactggtaccttcacccccgattcaaaaaatgatggcagactgtacaatgaggattaccttattgggcggatttaccactctatatcagtgaagtacagggaaattgtgatcaatcctaatttgctgaccaatgacatcaatatcatcaacaaggaaatcaacaagaagatttccaacctgattcgctatgataaggtttgtgcccccgactataaacctaattacacagccaatgacatactgaataaattaacaccaccctttacggatggattaattgaaagtctcagcaaatctctagtgaaacgtaatatgccgatagacagtgacaatcagattaaactcctgcgcgatatcctgttcttcaagtacttcgttaatatcaactcccccgtcataattccagaaggtcataccgatagcaaatatctgaaaatcgccatgaagatgttaaacatcaacatcgaccttaagttctacaacattaaccccagtctggataagttgggcctcaatggcggaacagctaaaatcaacagctttatccagaactgctatagcgacaacaattttgtttcgttcaataagctgaagatcaagtctaagcatcccatcatatttattctagactatgacgaggggcttaagtcatgtgacgaaattctgaagtatttcaaagatggcagcaattatgcgaggattaaagaaaacatcttcgtgattctgctgaacaaatacaaaatcctggaggataagaagaagaaggatttcaatatcaaggatcatcaggtatgcattgagaatctcatttcacacaacagtcagcgaatcaacgtggacaaagacaaccatgacaaagtgtcgtttaacaacgagttgatatccaaatccaagtttagcgagttggtcgagaataatacccacctttttcagttcctcaactttagtaccatcttcgacacaatcaagaaaattatccacgagtattga

SEQ ID NO: 8647 - RNA, 1749 nt, synthetic construct
  source 1..1749: mol_type = other RNA
atggccaagtatatagatcgactaagaaagtgcacatgcattgcggatctggtaagcgagtttaagctgaaagtaactgcaaaggaatttggttacgtggtctatcatctttccgatgatctgaagtacgaggagtttgatattcctaaaaagaacggcaccctgagaaggatccattccccgaagcccacattgaaatacattcagaaggaattcagcctgatcatttttaactgtatcaacgagatcaggctggataatgccaattatttggcttgtaaccacgccttcgaacgtgacaagtccattcttagtaacgcagacctgcataagaacaagaagttcatcctgaacatagacatcaaagactttttcgacagcatccactacggacgcattaaaggttttctggcaaatgactcacacttcaaactgaatgagaaggtgtcccaaataatagccaggttagccacctatcataaaattctccctcaaggctcaccactctctccaatactggctaccctgataggaaatatcatggacgtgcgctttcttaagctagccaagaaatatcgatttacctacagtcgttatgctgatgacattaccctatcatctaataaggccttcgataagaatattgtctactggtgcgaaaacaataaaaaatgggtggcgggcgaaatagtgatcaatattctgactgacagcgggtttactatcaattcagagaagacccgcgtgtcttatagcaacgatagacaaactgtaacagggatagttgtcaacaaacagcgcaatgttacacttgagtatcggcggacaaatcggagcatggtttactctctcttgagcacgggctcctttagattaaacgataatgtcgggaagattactcagttgatgggccggctcaatcacagtatttacattaagtactacgacagcaagttctcaataccattggatatgaacgagcgcatcaagtacaaggaaaaaaagcagaaagagctcatcaagattattaacgacaattggaagagtgacaaaaataacatcacgtgcgcagatcatcagatgaagctgcttcggagtgtgatctacttcaaatatatcatcaacgtggaccagaccaccattttccccgagggctttacagatcctatctatttctcttcggcaaaggagaaattgaacatcaattccaacatcaagttccagaaaatcaacaacggactcaaaaaaattggcctgctcggatgtgcctcttctgtcaataccttcattcacaatgtgaaggaaaagattgacaagttcatctcgtataaacaaatcggtgtcatccctaagcaccccgtgatttttatactcgactatgatgacgggctcgacgattgcaggttcatacttgacaaaattcagatcgaccagcagtatgtgtttattagagacaacatctacgttttactgctggagcccaaaggcaaatctaaaaatcatcacaagacgatagagaacatgtcctgtatcgaaaatctgatctcattcgaagggaaccgaattgaggctgttcagggaaagaaagaatacatcaacttcaagggtattgagtttaagaaaggaagtttcgccaattacgtgaaagaacactccagcgattttgattactccgggtttgataaaatcttcaagaagatcacagagatcgaagaggactacgctaaaaggatgatcactaacgcttga

SEQ ID NO: 8648 - RNA, 1794 nt, synthetic construct
  source 1..1794: mol_type = other RNA
atggaagtgttcatcagtatgtccagctatttggaaaaattgaaatcttgcacgtcaatttccgacctgataagcgaatttgagcttaacatcactccccagcagttttcttacattgtgtacaaggttgaggacagcaagaaataccagacgttcactatcctaaaaaaatcaggcgacgatcgtatcattcagaagccccataactcacttaaagaaattcagaagtcgatcgccaacattttaatgcactgtgtggacgacatacggaaggataagcctaattacctcaagtgttctcatgcattcgagtggggtaagagcatcgtcagtaactccgagatccacatcaacaaaaagttcgtgctcaatattgacattgcagactttttcgatagcattcactacggtaggattaagggcttttttgtgtctgactactacttttctctgaacgaaaccatcgctcgggtgatagccaaagtggcaacttgtaacgggacactacctcagggaagcccgctgagccccatcatcagttcgctgatagggaacctgatcgacataaaattcctcgaactggcgaaaaaatatcgtttcacttatagccggtatgctgatgacattacattgtccagcaataaagaactgtcagatgagctggtgatttgggacagagaaaataatgtctggaaagtcaccaatacaattgagagcttgttgaacagaaagagtggattcaagataaacgagaaaaagacccgatataataggttttcctccagacagctagttaccggtattgttgtcaacaaggagaaaaatgtcgtgagagagtataagaagcagaaccgctctatggtgaattctctcctgaatacgggagagtttttcatcaaagatatttccgatgagcacatcaaagggactatcgaacaactgattggccgcctcaactactgcatctatgtaaagtactacaagccaaataaccttacaaagctggacttggactcaaagattgacaacaaagaggataaccgcaagaatataaggaaaatggtatcactccggattgataagaatgacgaaaatttcccgttacagaagccagatcaccagatgtatctccttcgaagtgtcctctttttcaaatacttcaccaatatcacacagactaccatataccccgaaggctatacagacccaatgtacttttctatagccaccgagaagctgaacaaaaaagggcttttttacttccaaaagatcaatgattccctgaagaaactcggactgagtggaggggcttcatccgtgaattactttatttccaagttcgttgagcattcctatttcatcaggttctcgtctattgtacctacccacccagctatcttcgtcttagattatgacaacggccttgatggttgccaatatatcctgaattccaaacgctttggcttcattaagaagaagaacattcagttttcccatatcaaggataacgtgtatgtactcttactgagccctatcagtaacgagaaaagttggaagaaaaaggagaactataagtgcatcgagaattttatcacctatcaggggaagatcattcaagtgagcgatgaggagggcgaatacgttagctttaaggacgacaagatcaaaaagtacaattttgcccaatacatcatgaataagcccgatgaattttctttctcagaattctctaacctgttcgatcagatatcactgatcgagagcgactacaaagaacggctggccatgaaatga

SEQ ID NO: 8649 - RNA, 1773 nt, synthetic construct
  source 1..1773: mol_type = other RNA
atgaataagaccacaattgacagactgcggagctgtacttcgattgcagatcttattagcgaattccagctgaagatcagcccttcaaagttctcatacattgtttactgcctcagagacgaggacaaatacaccaagtttgagatccccaaaaaaagcggtggggtgcgtatcatccacagtcctaaagacagtctgaaatacatacagagggaggtcgctactatcttgttaaactgcattgatgacatcaagctgagtaaccctaattatctccgatgcaatcacgcgttcgaaaaagataagagcattgtgtccaatgctaatctgcacgaacataaaaggtttgtcctaaacatcgacatcaagaacttcttttccagcattcattacggccgcatcaagggcttcctgatatctgacgccaattttctcctgaatgagaaggttggacaaattatcgctaagctcgccacgtataatgggtatctgccccaaggagctccaacttcaccaatactagcctcattgataggcaatatcctcgatatccggcttctcaaattggcgaaggaataccgtttttcatacagtcggtacgccgatgatatcactctctcttctaaccaggaactgcctaatgagcttatctattgggaaaaggaggaaaacatttggatagcaggtaacaagatcacaaaggtcattaagaaatgtgggttcgaactgaacccgctgaagactaggtatattcgcaacaccaaccgacagattgtaactggcattgtggtgaataaaaagcggaatgtggtgagtttataccgaaaaatcaatcgcgccatgacgtatagtttactttccacaggccaatatactattcgggatgtgtctggtctgttgtccaatggaacaattaatcagctgatcggccgcatatcccattgtatttacgtgaagtatcataacccccccatgatccatccgttaaactcccaaagggcagatctgaggaagaaaaattctgagagagtgacaaagattatcagtgataactggaatagagactcaaagtccaacatcaattattattccgaccaccagacgatgttgctcagatcggttctgttctttaaatacttcataagcaacgagcgcaccacaattatacctgaagggttcaccgatccaatttactttaaaaccgccctgtctagccttgagattaacttgaaccttcactttcagaaactgaacagagagctgaaaaaaatcggtatctatggcggggcctcattcgtaaacagcttcttatgtaacatcgaaaccgaaaagaaagggttcatcagctatggaatgattaagcaaaccccacagaaacccgtcatctttattttggactacgattccggcctcgaggactgcaaatacctgctgtccaagatgaaagacggagagcagtatatcaacatcaccgacaatatttacatcctgctactaagggtcaaacacaataaggatcacaagaacataaacaaccatatctacaccgaacggcttattagctaccagggaaataaaatacaggcaaaagatgacaaccacgagtacatcctctttaagaacgaggagtacaagaagtacaatttcgcaaagtatatctctcagcacaaggatgagtttaactttgactctttcaaggacatattcgacaagattaaggaaatagaggatgactatcaggccaaactcgctacaaagaatatcaaactgtga

SEQ ID NO: 8650 - RNA, 1761 nt, synthetic construct
  source 1..1761: mol_type = other RNA
atgactttatacctggagaaattgaagaagtgcaattctattagtgactttatccgcgagttcaatttgggtctgtcagccaagcagtttggctacattatatacgggcttccggaccacaagaagtacgattccttcgaaatacttaaaagtaacggagatcttcgaactatacacgcacctaagaagagcctgaaattcctgcagaaacaattcgcttctatattcctccagtcaattttggacattcagaaacagaaccatcattatttgcgttgtaaccacgccttcgagaagaataaatcaatcatctcgaatgcccgccatcaccagaaaaagaagttccttctgaacattgacatttccgattttttcggaagtatccattacggtcggatcaagaactttctcatcaacgacaaatactttagtatgactgagaaaggggcctctattatcgccaaactcgcagtgtatcagggtaaactgccacagggcagtcctctcagtcctatattagcaacactgattgggaatctgattgatgttaggctgactcagatcgctaagaagtatcgactgacatataccagatacgctgacgacatcagcttttcttccaattttcccctgcctgagaaactggtttattgggacgactcacaacaaatctgggtagccggtaagatcttagagaaggtgattctgaagaccggctttctaatcaatcccaaaaaaacccgctataccacaattccatttagacagctcgtcaccgggattgtggttaacatccatacaaattctccgtccccatataagaaacaaaatagggcaatggtgaattccctactgaaaaccggcaaattctatatcgagaagaatggcatccagacgaaaggaaccctcaatcagttaattgggcggttgaatcatactatctacgcgaagtatcacaaacccacaaccgacatcaagcttgaccaggaggaaagggagaagtttaaagaggaaaacaggaactacatcatcgagattctcagcaaaaaatggcacaagggcaagtccagctactcagaagccgatcaccaaaccaagctgctaaggaacgtgcttttttacaagtactttaatagcctggacaagacaaagatctttacagagggtgtaaccgatagcatatatttccagatcgccgctgaaaaattcaacctcaaagacgacctttcttttcaaaagacgaacatatcactgaagaaactagggctgaagggcggcgtccccactattaagagcttcttcaagaacataaaggacaacaactttatcaacttgaagcagttcaagactaactccgagtatcccgcgatctttattctggattatgatcagggactcgatggatgtccagagatcattgagaagttctctaacgggcgccagtactgtcacataactagaaacatatacgtgctgttgctcaaaccttacaacggcaaaggggactataagaaaaacaagatctgcatcgaaaacctgattagatatgaaggcggacaaattgaagtcgatggagccaaaaatgaaaatgtgtgctggaataattcgctgattagcaaaatggctttcagcaagtacatttccaatcacaaaacggactttgatttcaccgaattcaagaagatcttcaatctcattcaggatatcgaacgggattacttccgtcggctgacacaggcacaagctcaggatgagtggtga

SEQ ID NO: 8651 - RNA, 1776 nt, synthetic construct
  source 1..1776: mol_type = other RNA
atgttcaatcatctgattaagctgaagttatgtaacaatgggatcgatgtggtcaacaacttccacaactatcttggtattagcgtgaaagatttttggtatatcgcctattctcttaaccatttcagtcagttcacaagctttactattctgaaggcgtcaggaggcgaacggacaatactaattccgccacaacccctcaaggatctccagaagaaatttgccacaatcctaaacttctgcatcagggaaattcagcaagagaatccaaactacttaatctgcaatcatgcattcgagattaaaaagtcaatcctgactaacgctcagatccataggaacaaaagatacgtcctgaacattgatctcagcgatttcttcggctccattcattatggccgcatctccaatttttttaaggccgataagtacttcagacttaatgacaaggtggctaaaacactggctcaattggcctgttttcgcgacgagaataacaaaacatttctccctcaggggagccctctctcacctatcatagccagtctgattggaaacctgctggacatacgcttggttaagataagtaaggagtataagctgacttactcccgatatgcagacgacttgaccttttcctcaaacaagcccattcctgaagacctggtgcggtggaattccgaaaatttcatttgggaggctggagatagattgcggagagtgatcgaagattcaggctttaaaatcaacgataagaagacccgtttattttccgcaaagaagcggcagacggtgacgggaattaccgtcaataagacgctgaatatatccgaatattaccagaagcacaatcgagctatgctttattccctgttcacctctgggaaattcctgatcggagataaagagggtaccattaaccagttaatcggtagactgaattatgtcgcttctgtaaaatacctcaaacagcatcacgacatgagcattcaagagtgggaggaggagcgaaagaaattcgcctacttgtgcgcgggcaattttgacaacaaagagaactctaataggagcatccgcctcttgaggcaagccatattctacaagtacttcattggcaataacaaaccgatcatttttcccgaaggcatcactgattctatttacttcaagctcgccaataaaatactgaatcccaatgaacacaaggaaaactacatcattcagtctattaacagcgagcttactaaaattagcctaggaggtggcaccgcactgatcaatagttttctactccacgcatacaaagactacttcatcaacctgaaaaatctgaagataaagtcgaaacacccagtcatcttcgttctggactacgaccaggggctcgacgtgaaggacaagaacgagaagtcaaaaaataacatccccgagacacatcatatgaaggacgggcagcagtgggtgcacatcagagagaatatctatctcgtactgttgaggcctttagctcttgaaaacaaaaagccaactttccggaatgcgcttgaaatgacctgtgttgagaacctgctgagtcacgtatcgatagggaaaatcaaggtggatgatgaaaaccacgaaaacatcaaatttcgcaataggagctatccaaagaccgtgtttgccaaatatgttgccaagcgttctacacactttgacttttccgagttcaaaaaaatcttcgagatcattgacgagataaagaagcacttttaccagaacagtatctctatttga

SEQ ID NO: 8652 - RNA, 1860 nt, synthetic construct
  source 1..1860: mol_type = other RNA
atgaaggagaaactgtccaagttgaagaaatgtaccaccaggatcgacttcttaaacatattatttcctggggaagggagcaaaaacgaatacttgaaggtgatcttctccgtgcctgatgagaagaaatatagcacctttaagatccccaaaaagtctggaggcacccgtgaaattctcgcccccaaagaggacctcaaaaagatccagaagaaactcggggattttttgagcgattgttaccaggaactttacggagacaaaaataattactccaacgcttacctgaaggagaagtctattatcaccaatgccaaaaagcatcgtaacaagcgctacgttctcaacatcgacctggagaatttttttccctcaattacctttggccgggttcggaactacttcatcaagaacaagtattttgagcttacagaggaaatcgcgactctgattgctaagattgcatgctacaaaggcatcctcccacaaggttctccatgctcaccaattatcagcaatttcatttgccaaatcctggacatccgattaggaaagctggcaagcaaaaataagtgtcactattctcggtatgccgacgatataacctttagtacgaacctcatgatgtttcccgaaaacatcgcccactggaatggcgacaagatcatagtgggccaggaactaggctccgaagtgacccgggctggattcaattgccaacattcaaagacaaggatctacggaaaagacaaaaggcaagaggtgacaagtctcactgttaatagaaaagtcaatgtgtcaaggaagtattttgattccactaaagcaatggccagaaagtactatctcacagggacatgtgagataaacgggcaggaggccacttacaagcaaattctgggccgctttaactacattaatcagctggagaagtacaacaacaagatttttttcaagcagaacgaggctaaggaacccgaaaacatttttacccccgccaatgaaaaaccactggaaaccaatcagaaagatagtgtgatcgcaccagtacagctaacttacaattctaagtaccacaccttcgcagtcaatggctccaaagagaaggagttagggaaatatggttacaaggttggatacgattatctctccgcgcgcgaacaggcatactcgaagttcctttattatagtacgttcatagctaaccagaaacctattattttgactgaggggaagacagatatattgtatctgaaagccgcgatcaaaaacctctatttggagttccctaatcttgtggagaaagtgcaggataagttcaacttcaagatcagtttctacaactattccaaacttaacaggtacctgctgaacatcattccgagcggtgggggaatcctgagagtcctgtctccgcagtatttatttccctctgactcactgatcagtaaacatcctacaattctgctgctggacaatgaggaaaagaagggtaagccactggctagacttctgggcaatggaaagcttaagaaggagattgtcaaaaaagatttcgccagcctggacaaaactaaaatcacgctaaaagagtcagatgagctgttcaatcgagtcaagggcgtggataagttttttctcttgactattccgcggatcgagtctgataaggagtccgacattgaaaacctgtttacagaggatttcataaaggagcaggaattcgacaaagaaagcaaaggtgctaaaaacgagctgtcgaaaattgtaagccgcgactataagaagatagacttcaccaatttcaagcctcttctcgaaaatctaacaaacataatccgcgccaacgacaataaatga

SEQ ID NO: 8653 - RNA, 1353 nt, synthetic construct
  source 1..1353: mol_type = other RNA
atgcctattgcacctcagcttaccatcgtgaaaaacaagacgaaaacaatgagcaagaacaacaagctgtctgagcttaagagcgcaaaaaacattacagacttggccaagatcatcagtgtgccacgacagtctataacatacgtgttgtatggcatcaacaggctcaacctggcaaagtaccacacctttaaaatacccaagaaggacggatcagaaagaaccatcaatgcccccgtcaaagagctaaaagacatacaaaaaaaggtgtctagccttctgcaggagtgtttccgtatcgtctgcattctggaaggtcacaggaaccatctgaaaaagattaattccctgtcacacgggtttatcaaagggaagtcgatcattactaacgccacacctcacaaaaataagcggtttgttctcaatgtcgatttgaaagatttctttggccagatccactacggacgggtctacgggtttttcaaaaataacaagcacttccagctgtccgatgaagtggccaaggtgctggccaacatcacgtgttaccagcagggcttacctcagggcgcgccaacgagtccggtaatcagcaatctgatcgccgggattctcgatatcaaattggctagcctggctaaaaagtacagctgctactatacccgctatgctgacgaccttacattctccacaaatttgaaggagtttcccccccgtatcgcttctatcgaaaatggtgacgtaaggattggcagttctctcgaaggaataattaaaaaatgcggcttcgacatcaaccataaaaagaacagactccaattctgcaatagtcgacaggacgttaccggtatagtggtcaacaagaaagtgaatgttccctatgattatcgcaataaggctagggtgatctggcacaagttaaagaatggcaaggagatatatgcaattaactctcagccagagataaagaaggacatcaactatctgattggaattctctcccacatccataatgtgcggcgcgagcatagagtgactactaaagaggagtacattattccaaagaaaccgaacaagaagacttttgatgacatctttgatgcggattcacgcatgtacagggacgttctgttcttcaagaatttcgtgaagaacaagaaaccagttatagtctgtgaagggaaaaccgatattacctacttacaatgtgccctggaatcacaggccgcaaaacatagatcgctgattatcaagaaagagctccaaattagcttttttcggcctacaaaaactatctccgaactattcaaggtaactgggggaaccggcgatattggaaatcttatctcctga

SEQ ID NO: 8654 - RNA, 1731 nt, synthetic construct
  source 1..1731: mol_type = other RNA
atgtctaagaataacaagttgtccttacttaagtcagctaacaatacaaaggatctcgcagaagtgctctcggttccatttcaggcgataacttacgctatctatggcatcaataggctgcgcctgcctaaatacacgacttttaccataccaaagaaagatggcaccgcacgccggatcaatgtccctgtgaaggaccttaaggacatccagaagaaagtggccgcgttattgcaagaatgcttcaggattatttgtatcctcgaaggccacagagatcatgacaaagagatcacaagcatttcgcatggcttcatcaagggaaagtctattattaccaatgccatccctcataagaatagccggtatgtgttaaatctcgatctgaaggacttttttggtcaaattcacttcggaagagtctacgggttcttcaagaataacaaacactttgagcttgaggatgaggtggctaaggcactggccaacatttgctgttaccagtctggcctgccacagggggcacctacaagtccgatcgtgtcaaatttgattgccggaatcctggacatccgcttagcaagcttggctaaaaaacacagctgcttttatactcggtacgcggatgacctgacattttctacaaatctgaaagaattccccaaagaactggctattttcgagaacggaaatgtgacgattgggacaagtctgaacaaagtgatagacaagtgtgggtttgaagttaatgtcaaaaagaacaggcttcagttctgtgactcacggcaggacgtgaccgggctaatcgtcaacaagaaggtcaacgttccctcagattaccggaaccgagcccgagtaatctggcacaaaatgaaatccggaaaggagatatatgccataaacgccaaacctgagaagaaagagaacatcaactatgtaaccggcattctgggccatatacataatgttcgtcgcgagcatagaatcactaccgccacggaatacgtaatcccgaaaaagccaaccaaggccctgatggactccatcttcgacgcagattctaggatgtacagagacatgctgttttttaagaacttcgtgtccggcaaaaagcccctgattgtgtgcgaagggaagaccgatatcgtatacctgaaatgcgctcttcacagtcaagctgcgaaacaccgatcactcattctgagtaaagagttgaaggtggattttttcagaccaagtaagaccatcggagagctgttccgtgtgactggtggtactggggacattggcaatctcatttctaattactcaagctactgtgatgagtttaaaaggttcagtctcccccagcccgtcataatactcattgataacgattccggagcaccaagcgttcgcagcctggtttcccagatcacaaaatctaagtttgataacacagacaccttcacccacattatcaagaacctatacattctacagactcctctggtcatgggcggcgatagcgccatcgaagacttctttgacgctaagactttgaacgaaaagcttggaaagaagtccttttcctataagggtaatttcgattcttcaaagcactatggtaaaaatcacttcgccgagtatgtggtcaaagtgaagaaaaacagcatcgagttcaaagggtttaacgtgctcttcgactccataaaagccattatcaaggactataaaagcaagccccattga

SEQ ID NO: 8655 - RNA, 1734 nt, synthetic construct
  source 1..1734: mol_type = other RNA
atgtccaccaattccaagctgaaagaactgcaggaagcaagatccctcgaagacctagcgtcgatcttgtccactcctctgcagctgctcacttatgtgttacacggcagacaccatcacgggcttgtgaactacaagagcttcaacattataaagaagagtggagggattaggacaatcaatgctcctatcgatgaactcaaatccattcagaagaaacttagtactgtcctgcaggattgccagaaaacaatcaacattctggagggacaccggacacacgataaaaagctcgttactatagcacatgggtttataaagggaaagtccattatcaccaacgctgagccccacagaaaccggaaatttgtgctcaatatcgatcttcaggattttttcgacagtattcattacggtcgcatttatggcttcctggtgaacaataagcacttcaaactgaacgagaatatagctagagctattacgaacctagcctgtcacgacggtaaactgccacaaggagcaccaaccagccccataatcagcaatttaattgcgggcattctggatattcgcctcgcagctttggcctataaacacaaattacattacacccgttacgctgatgacatcactctgtcaactaacctgaacgaatttccctcaagcattgcttacatagataatgcccacgtcgttattggtaataaactcaggacatcaatcgagaaacagggtttctcgatcaaccctcagaagagcaggctccagtttaagaatagccgccaagacgtgaccggcctgatcgttaataagaagattaacgtgaagaacgagtataggaatcgagcccgggtgctgtggaacaagatccaaaatgggaaggaaatatatgccatcggatctgagcccgagaaaaccaagaacataaattacctggtaggcgtgttgagttatatttatcatgtgcgcaactctaatctcgttcgtaatggaattccttccattacacacaagaaaccaacaaaaaaagagatcgactctaccctcgatgccaatgcccgcatgtatcgggacgtccttttcttcaagtatttcatcgccaacaaaaaacccattattatctgtgagggcaagacagacatcatttatataagatctgccttgctgtctcttgcacgaaagcaccggtcattaatcgacaagaaggaagccaagatcgactttctgagggtaagtaagacgattaaggaattgttcaagatctcaggcggcaccggcgacatagggaatctaatttccaattactcaagctactgcgaacattttaaacggttttctcccatggcacctgtcatcatccttatcgacaatgactccggggcagccccattgcgatccctaatcaaggagatcaccaaaaccccgttcaagaaagaagacgactacaaatacataatcaacaacctgtacatcatccagactccatcaattgatgggaaagatagcgctatcgaggaccttttcgataagaagatactgcaaacaaagctggatggcaaatcttttatccataaacagagcacgttcgatatcaagaagcattacggaaaaaaccattttgcggagtatgtcgtgagacaacaccagaaagagattgattttagtaggtttaacctgttgttcgactctatcaagaagattatcaaggactacaaaagcaagccgcattga

SEQ ID NO: 8656 - RNA, 1734 nt, synthetic construct
  source 1..1734: mol_type = other RNA
atgagtaccaataataagttgaaagagcttcaagacgcgaaaaccctggaggacttggcgaccctactagccatacccctgcagatgctgacatacgtactgcacgggagatacaaattgaagctcgagaattataggagcttcactttaacgaaaaagaacggcggagaacgactcattaatgcccccattaacgaactgaaaactatccagcggaagttaagcattctactgcaggactgccagaggattatctccatcttagagggacacaggacacatcaaaaggagataaagtctattgctcacggattcatcaaaggtaaatccatcatctccaacgctactcctcaccggaataagaagtttgtgctgaatacagacttacaagatttcttcggctccatacactatggccgggtttatggcttcttcctcactaacaaacattttcagctgaacgaggacgtcgctcgggccatcgctaatctggcatgtcacgagggaaaacttccccaaggcgcacctaccagccctgtgatttcaaacctgatagccgggattctcgacatcaaattgtccacgctcgcatacaagcacaaactctattatacacgatatgcggatgatcttactttttctactaaccagaaggaattcccatcaagtatcgcttacgaggaagaggggattgtggtcataggtcacgccctgaatagtatcatccagaaacatggcttcgagattaatgcatcaaagaacaggcttcagtataagaattcccgccaggatgttactgggctgatcgtgaacaccaagattaatgtcaagaatgaataccgcaaccgagtgcgtgtgctttggcacaagatccagaatggcaaagagatccatgccattcaaggagacaaggacgacaaaaagaatattaactatctggtgggtgttctctcttatatctaccaggtgaggaagtccaataaaaccaggacaaacaccattaccaatctggggaaaaaaccacagaaaaaggagatcgattcaattctcgacgctgatgaaagaatgtatagagatgtgctcgtattcaagaatttcattactaacgccaagcctctgattatttgtgagggtaagaccgatataacatacctgcgtagcgcactgctgtctttgagcaacaagcatcggtctttgatagaaaaaaaagagatcaaggtcgatttcttgagaatcacagcaacaattcaggagcttttcaaaatatcgggaggcacaggcgacatcggaaacttaatatcgaattacagctcttactgcgatcattttaagcgctttaccccagcttcaccggtaataatcctgatcgataatgactccggggccgctccactgagaagcctgattaaggagatcacaaagacgccgtttactcgcgaaaccgaatacgcccacatcatcaacaacctttacatcattcagacccccctgatcgacggtaaagatagtgccatcgaggacctcttcgaatctaaaacactgaacaccaaactagaagggaagacgtttgtctacaacaaggcaaattttgataccaagaaacattacgggaaaaaccattttgccgaatatgtgattcgccagagtagaaaggacatcaactttaacggctttaaccccctctttgaaagcgttaaaaagattatcaaggaccacaagaagaagcctcactga

SEQ ID NO: 8657 - RNA, 1737 nt, synthetic construct
  source 1..1737: mol_type = other RNA
atgtcacattccgataaattgtcgaaattgaagaatgcgaagaccctgcaggacctggcagacgtgattaatgtgccactgcagtcccttacctacgcccttcacggtatgcataggctggggattaataagtacaactcgtttccaatacctaaaaaatctgggggggtcaggatcatcaatagccccgttaaggagctgaaagacgtacagaagaaactgagccaaacactctatgattgttacaacgagatgctgatcgtcagtggttatcgggggctggacaaaaagggaattaccatttcccatgggttcattaagaacaagtccatcataacaaacgcagagtgccacagaaatcggaggttcatacttaaccttgacctcgaagattttttcggctctattcattatggccgcgtctatggattttttaagacgaacaagcacttcggcctgcacgatttaatagctcatgcactcgcaaatcttgtatgttacacccacggactgcctcaaggtgcgccgacttcccccttggcgtctaattttattgctcatatcctggacatccgattggccagcctttctaagaaacacggcctatattatacacggtatgccgacgacctcacatttagcacaaacaagaagatttttccagcagatattgcctatctcgaggctggcaaaacggtgatcggatttgagctgaacaagattatcaacaaacacgggttctctgtgaacagcgccaagactcggctgcagtttaacgattcacgccaggatgtcacaggcctaatcgtgaacaaaaaagtgaatattcggaaagagtacgtaagggccgccaggatactcgcaaataagctcttcaacaacaaggtgatttatcgcatcgagtccaagaagactgaagatgacatctgcgacataaattacttaataggcgtgatggctttcatttacaatgttcgccaatcacagctgattcgtgtgagtggtgacaagagtgccgaactgaaaaatttcactaagaaggacatcgacagcagtctcgacgctaatgcccgactctacagagatctcatcttcttcaaaaagtttatcgtgtcagacgaaccactcattatctgtgagggcaaaacggacgtgatctacctgcgtactgccatgttgtctcttagcgctaagcataggtctttggttaccaaggggcgtgttaacgtcgcttttctgaaccatacccagactatcaaggagttattcaaaatacgaggcggaaccggagatctcggcaacctgatcagcaactactcttcatattgcggaaagttcgccagatttaaacccaaaagccctgtgattatcattatggataacgatagtggtgcccccaaaataagaagtttagtcaaagctatcaccggaaaagtatacgacaagaatgacgggttcagacacctgacaaacaatctgtacctaatccagactcctcctctggcaggaggcgcggattcagctatcgaggatctattcgacaagaagaccttagacgttagattgtccaataagaagttttcctacaaaggtgaattcattaagtccaaacactacgggaagaaccacttcgccgaatatgtcgtgaaaccgcgccggaaagatatcgattttaatggcttcaatcccctgctggatgaaatcaaggcagtgattaagcactacaaaaaaagctga

SEQ ID NO: 8658 - RNA, 1767 nt, synthetic construct
  source 1..1767: mol_type = other RNA
atgagctcagctgacaagtttctgaaactaaaacaagccacaaccttaagtgagctcgcagagatactgggttacaagcataactccctgagttacatcttatacggaaagtttcgacttggcctatccaattactccacattctccattcccaaaaaaaatggtggctatcggactatctcatcccctgccccagagctgatggagctgcagaggagagtatccgacctgctgcacgattgctttgtgcagatccagattattaacggattccgctatcgaaacaagaatatcaagacgatctcacacggcttcatgcggggaaaatcaatcgtgactaatgctgaaacgcataaaaagaagaagttcgtgttgaacattgatattgagaacttcttcgattctatccattttggccgtatttacggctactttctgagtaataagaacttcgaactgaacccgaccatcgccaaaatcctggccaacatcgtttgccacaacggaagcctaccccagggtgcccctacatcgccaatcatctcaaacttggtcgctcacattttggacattaagctcgcaaagatagcacaagagaattcctgtcagtatacgcgctacgtagacgacctgactttttccactaacaaaaatatcttccccattggcctgggcacaattgatgaaaagcacgactgtaagataaatgaaaaactcatcggcctgattaaacatagcggctttaccatcaacaataaaaaaacacgggtgcagtataaggatagccggcaggaggtcaccgggctgatagtcaataagaaggtcaatgttaagtctgagtacaggaataaagccaggattctggtgaataagttgtattcgaataaggaggtgtataagataaactctaccactaacgaacctgcaacaatagagtacatccagggggtgctcaactacatatatcaagtacgtctgcacaatagtattaagcataccgaaaacattctggagagtcagcgcaaaaaatgtgtttccaaggaacaaatcgataccaccttagatgctgacgccagaatgtacagggacttccttttcttcaagaacttcgtgatcaacaattctccccttataatatgtgaagggaaaaccgacgtgatttatctccgcgctgccattagtgtgttgtctaaagaatttccaaaccttagcaatagtgataatggacaccaactgagcttctttaacaataccaatacaacatcacagctgttcaaaatcaacgggggtactggagacttaagaaacctcattagcaactacaagaagtactttacaaagtttgagagattcacacccgagtctccggtcataattcttatcgacaatgatagcgggtccgcgacaatcagaagcattctcaaagaagttacgaaaaaggagttcaccaaaaaagataacttcattcacatcgagaagaatctgtatgtcatgcagaccccactccagaagaatcagactgagtcagagatggaagacttttttactaaggaaactttgtctctcaagctcaagaataaatctttttgctacaagggagaattcaacaaaaatagccattacgggaagaatcactttgcggagtatgttatcaaacctcagaagaaaaccatcaactttagcaacttcaaggtgatttttgacatcattaaccttatctgcgatgattataagcagaagatcaaaaaccccatcaaaaccaggtga

SEQ ID NO: 8659 - RNA, 1956 nt, synthetic construct
  source 1..1956: mol_type = other RNA
atgtcttggttttgccagagtattggatcatcctttgttaccttcttctcacagaaactgtttaataagctggaactcttactgcaatcttttcagagcttttctcagctcttgacaggaattaagaacatgagtgaaaatgatctggaaagactgaggaattgtaaggacttacaggattttagcaagcttatcggttacaagaaaacgaagaaccttagctacattatttacaagatcccggagaatctgaggtacaacgagttcaagattaagaagaaaaactccgagtttcggatcatccacgccccagtggagaaactcaagaccgtacaatcacggctttccagtctgttacagaattgttatgacctcataagcgttgatctgaaatccaaggaaatcctttcccacggctttatccgtggaaggagcataatcaccaatgccttgatccacaagaataaacgcttcgtcttcaatattgacattgagaacttctttggaagcataaatttcggcagagtgagagggttctttatcaaaaacaggtatttcaagctgaacgagaatatcgctaccattattgcaaaaattgcctgccataataacagtctgcctcagggttcaccttgctccccaataataagcaatctaatcgcgtctattctggatatctaccttttcaagctctgtaagaaatacaaactctattactcccggtatgtggacgatttgacgatatcgactaatctgaactattttcctgagaacatagcttacaaaaacccaagttcaaaaaacgagtgggtcattggcaatgaattgacgaaaatttttgagcgcgttaacttcaaattcaacttcaagaagactcgaatgcagttaaagaattctcgccaagaagtcactgggttaatagtgaataagaaagtgaacgtgaagtatgagtataaaaagaaggtgcgggctatgatacataacctgttcatgaatgggaagattttcatcaagaaagaggacaaagagaaaaatgtcgaggtcgagaaaaaaattaacagcctccatggaatgattcaatttatcgggcatatcatagagtatcagctggaaacttttaatctgtctaaggtggacaaaaagaacgagaatgcaatttctaacatgaattactggctgaagatgtacgaaaatttcatcatctacaagtacttctacggcatcaaggctcccacaatcatcaccgaaggaaagacagataccatataccttaaatgcgcaatcgagaggttgaactttcaattctgtaccaattctttctccagcctgagtaaagcgatctgtttccacccacacacccaccgaaataacttccagaacaagatcaagaacaaagacaactacaagaaaagctttgataagaagctgaaaagaaagcccgtgtttcttggcgggaatagtggcgccacatttctcatgaagaactatatccccaacaacaaactatttaagaacgcagacaagattctgtctgcccccctcatctatattattgataacgatgaaagcggcaaaaaatcactaaacaacttcctgtccaacaaaaaattcattaaccaccgcctcaatgacaatacctgctttgtgggcctcaacctatatatcattaagttgcctcagataagctcggaaaacaatgattacgaaatcgaagactacttcgacacagatacattgagctctattattgacgggaagtcatttaacaaatcaaacgattccttcgacatcaaagacgtttactttggtaaaatggatttcgccctgaagatcatcaagaacaataagaacaacatcgacttttccaagttcaataaactgctggacgagatcaactttgtaattcaggatttctacaacaacaagcgtcatcagaatagtctcgtatccaattga

SEQ ID NO: 8660 - RNA, 1674 nt, synthetic construct
  source 1..1674: mol_type = other RNA
atgttcctgattttcgagaatatgtataagaaggaagagattgaacgggccgtcaaaaagttagaggaactggttaactgcaaatctaagaaagacttttcagattggctagatatcagactcaaaaccatctactacatcttactcattaacaaggaacctctctataacgagttcactatcccaaaaaaaaacggaagtatgagaaacatctccgcgcctaatgagcacctgaaacggatccagcacaatcttaagaagaatttggacatgtgttacatagccataactcacaacaatttcaacaaacggctggctcatggctttattaggaagaagagcatcattaccaattcacagtatcacaagaataagcgatacgttctcaacatcgacttaaaagattttttcccctccatcaatttcggaagggtgcgcgggttcttcatcaaaaataaatacttccagctgaacgaagatattgctactttgatcgcacaaattgcctgccataataatcagctcccccaagggtcaccgtgtagcccaatcattagtaatctgctggccctgtctctagataaataccttttctccctgagtaaaaagtaccgctttacatataccaggtatgctgatgatattacaataagcaccaatctgagagaatttcccaagggtattgcatatttcgatgaatatgaggagaaatggtttttgggaaacaagattatcgaggtcattaacaacaaccatttcgacataaacttcgaaaagatccgtatgcaatacaaaacgagcagacaggaggtaactggcctcattaccaataagaaggtgaacatcaaaaggtcttatataagagcaacccgagccatgctagatcaccttgtgttatacccctccagtgacgattatattagcaggcgaaaaatcgtggaagggcgtatagcctttatccaccaaattcggaagatcaatattgaaaacaaccgcgacctgtcccttaagatgcttgagaatttcttttgcttcgacaatttcatcaacaacaacaatatcacgatcctcgtggaagggattacagataagatttacatcaagagcgcattcaagtatttcaagtccgagtataagttcaagctgaaaatcataaccaagaatcctttttctcgcactaattctcagaagaacagtggagagggctccctgaatcagctcttgtctcggtttaaggagacaaaattcctggacagaattaacatgtttcttaaacgcagcaaactcgtcaagcccaagaatccaatcatcattatattcgacagggataacaaaaagttcgtgaatgactttgagcagaagaatgcgcagtacttgtttctggagcctaacgtttattatttccctataccagaactccccgacaagaaatacatcagcatcgagtactacttttcagacgaggtactgaatacaccgtttaaaggccataagctggaattggatattcagaacaaggacaagaagatcttctacaaaattggcgagaaaggtctgtcgaaaaacaaatttgccattcatatagtgcggaaactggctgaatcagagttcatcaatttcaagaagatcttcgacatcataaacgagatcaacattgactacaagaacaaatga

SEQ ID NO: 8661 - RNA, 1692 nt, synthetic construct
  source 1..1692: mol_type = other RNA
atggacaccttagacaagctcaaaaattgcaaaagtaagtttggcctgtcgaagattattgggatcaaactcaagaaaatcacatacatcctctttgtcaagaaatataacctatacacagagtttcagatccccaaaaataacggaaaattccgaaacattagcgcccctaacaagtacttgaaaatcatccagaagaaactgaaaaaggtgctagaagagtgctacaatgagattcagttaaataagaacgcttcacatggtttcctcaaaaagaaaagcatttacacgaatagcaacttccataagaataaaaggtacgtgctgaatatagatctgaaagacttctttccaagtattaactttggtagggttcggggcttcttcataaagaacaagaatttccagttgaacgaagaggtggccaccctgattgctcagattagttgttataacaatcagttaccccagggcagcccatcctcacccattatttccaatttgatcgctatatctctggacaaaggactgtcaattctctccaagaagtacaagttcaactatactagatacgcggatgacattactatctccaccaacctgaagaatttccctatagcaatcgcatataaagacgatgatggcaattggaagcttggcagcgaaatcattaagatgatcaacaacaaccacttcgacattaattttgacaaagttcggatgcagtataagtcatctcgccaagaggtgacagggctaattgtcaataagaaggtaaacgtgaagaggaattatatacgcaaaacccggctgatgctgtacaatctgatcaaaaatccaaattccgacgattatcagagtattcgtaactgtatagaagggaggatagccttcatataccaaattcgcaagatgaacttcgaaaataacaaacgggatatcgccaagaaaatgaaagacatgttcttctacttcgataagatcattaacaaccagaagataaccatcataacagagggaaaaaccgataaggtctatctgtcttcagcctatagccactttaaggaatactataagcttaacttccagatcatcacaaaaataccgtatacgaagcatgacagcaataatattaacaacacgggtgatcaaactttgatgaatttcgtgaaagaactgaaggagaagaacaatatcaaaccttataagtacctcctggaaaagtctaaaatcaaaaacccgaagaatccagtgatcgttattttcgacagagatagaatcaacatcatcaaagaattcgagaagaatatcaagaacgagaactgtaaattcgtgttctttgaacccaatatctactatttcgtactgcctaaacttatcggaaaggagtatcttagcattgagtactatttccccaataaaatcctgaacaagaaaatcaaaggcaaaaacttgtctctgtgccaagagaagcacaagaaacacatcatttacaagattgacgagaataacgatgggctctctaagaacgagttctccaaatacatcaaaaagcttcgatacaataccaagagagataacattctcaatgagaagaacaagaagtacttcgataatttcaagtccatattcgacatcatcaatgacattcgtaaagactacaagaacaagttgcagaatatcaacaaatga

SEQ ID NO: 8662 - RNA, 1737 nt, synthetic construct
  source 1..1737: mol_type = other RNA
atgatactggaaaaactgcagaattgccaggataaaaaagacctggcccttctgcttaaatgtgatcttcaaaacctgtcaagaatactcttcaaagacttcaacaacaactactccatcttctttattgacaagaaagacggtggcaaacgagaaattttagctcccaagaaggatttgaagatcatccagaaaaaactctctaagatcctagaggaatgttatattgagatttccgagaagaacaacaagatcaacttcaactcgataaatggatttatcacaggcaaatcaatcatcactaacgcaaaaaagcataccaataaaaggtacgtgttgaatatagatctgaaggacttctttccaagtattacatttaaccggattgtggggtttctgaagaagaataagtactttaagctcgaacatgacgttgcgatgttgattgcccaaattgcctgtcacaaaggtagtctcccgcaagggagcccttctagccccatcatatccaatctgatcatgctgtctcttgacaaagagataaatattctcgcaaagaaacacggcttgacctatagccgttatgctgatgacatcacgctctctactaataagaagaattttcccaacgagatagctagtggaaacggaattgagtggaatatccataaaaaactggaaacgctgatcaacaactacaaattcaacatcaaccacaaaaagatccgaatgcagtacaaaacctcccggcaggaggtgaccggcatcattgtgaataaaaaggtcaatgtcaacaggaagtatattcgcaatgttaaggcaatgctgaataagagcatcatcaatcattctatggagaattatgagtacttcaagttgtcacttcggggaaaaattgatttcatttatcaggtccgcaaactgtacatggaaaacgataagtctaacgaaaaggatctaatcagcaagattttcaacaacttcctgtactttaaccatttcatcaacaacaacaaggtgactattctgactgaaggaaagaccgacaagatttatatagatactgcctttagtcacttcaaaaacgaatacaactaccagataaacatcctcaaacagtccgacatgtttacaaatatcaccaaactgaatgggattaacaatctggtgaatttcatcaagtcctatgattcgaaaaacggcatcatcaataagctgataaacaagtcaaacatccacattccaaaaaagcccgtaatcataatcattgactccgacgaacctactaaatcaaaagccctcgagttacttgataacaaaaacgggttcatctttaaggaacctaacctatattgctttcagttacctgagatcaaagacaagaagttcttcagcattgagtactattttccagagagaataaggaactatgaaaacaatgggaagaaattaggtgagaataccaaaaacaagtacaacaacaaggagacaatatacaagattgaagacggcggcaacaatttgagcaagtcctacttttctaactacattaagacactcaagcacaaggagattagcgataaaaagaacaaaaccaaggaggatattgacaatatcaagagaattaacgaggtcaataagaattcattcgaagagttcaagaagatctttaacaaaatcgacgagatcattaacgattataagaagatctgcaacagcaaaacaagtgaacaatga

SEQ ID NO: 8663 - RNA, 1674 nt, synthetic construct
  source 1..1674: mol_type = other RNA
atgaatcttgagaaactgaaggagtgcaaatcaaaatatgacttggctaatctcttgaagtattcgctccaaagtctgtcctgtattctctttaaggacatagacagcaattatagcatgttctacatcgacaaaaaggatggcactaaacgcgagatcctcgctcctaacgagaaactgaaaaaggttcagaagaatctcagtaagattctgtgcaagtcatacgaatgcattaataaaaaccccaaagccgtgcacggctttattgagaaaaagtccatcataaccaacgctaagatgcacaaaaacaagagatacgtgttgaacatcgacttgaaggacttttttccatccatcacctttaatcgcatagtcggattctttaagaagaacaaacactttcagctggaacatgaggtggcaatcctgatagcccagatattatgccataagggtaaactgccccaggggagccctagcagccccattatgagtaatctgataatgctgtctctcgataaggaactcaatatcctctctaagaaatatggcctgatttatacacgttatgccgatgatatcacattctcgacaaacaaaaggaaatttcctaaagagatcgcatacagtattaataacgtggattggaatgtcagcaaaatcctggaaaggcttatcaataactaccacttcgaaatcaaccataataaaacccgaatgcagtatcggactagtagacaggagactacagggattgtggttaataaaaaggtcaatgtttccaggacttatattcggaatattagagcgatgctaaataagatgatctgtaattacacgatggatgagtacgatagctttaagtcatctattaaaggacggattgatttcatctatcaggtcagaaaagactatattgatctgaaggacaagaaaaactacgaaaaagacttgattgtgaagctgttcaacaagtacttttacttcgataagttcgtcaacaattctaacgttacgatcctgaccgaaggcaaaaccgacaaggtgtatatagacgtggccttttctcactttaagaacgagtacaactatgacattgatattgtgcgtcattctgacatgtttcttaacatcaccaaactcaacggaatcaagaagttaaaagggttcattgacaattacaaggataagtacaagcaagagatcgtaccactactgaagaagtctaagattgagaattccaagtatccggtggtaattattatagactccgatgaaatcgagtttttaaagcagctgaaactatttgacgacaagtacaaccttaagaacaagtacatcttcaaaaagccaaatctttactgtttccacttaccccagttggacgacaaagaattcttcagcattgagtattacttccaggagaacataaggaacaaatatatcaacggtaagcgcctgcgcgatatcatcgagaaggagaatatatacaagattgatgacaagtcccttactaagtcaaaattctcacaatacatccgaaaactgaggtacgataatgaaaaaaagacagacatcaacagcaacaacaagaagatattctccgaattcaaaaagatcttcgatctgatcgacgaaatcctcaaagattataacacccggatccaaaaatga

SEQ ID NO: 8664 - RNA, 1698 nt, synthetic construct
  source 1..1698: mol_type = other RNA
atgtacggactgcatggtgggcccaacggccagtataccgactttactatcaaaaagcggaacggcaccgaccgcaacataagcgctccaaccacagctctgaaagctatccaaagatctctggcaattaggctgagcggagtctacgagcctaagaaagcagcctatggatacatcaaaaagtccgacaacaaccaagacaaaactgtgtttggaaacgctttggtgcacagcaaaaaaaggtacgtgttcaacgtcgacctcaaagatttctttccatccatccacttcggtagagtcatggggctgttccgttctaatccttataagctggacaggtccattgccatattaattgcaaagattgcctgctacaatgattttctgccccagggcagtccttgcagtcccatcatctctaacatgatttgcagtcatatggatcgagatctcagcgacctcgccaaaaattacaggtgctactatacaaggtacgtcgatgacatcacattttccacaaacgtgaaagactttcctgaggatattgctttctttgatggcatctggaatccgggagaaggtctggtagagatcattgacgaccacggttttaagattaacggcgaaaaaacctcactcagaacacaaagtgacaggcagatcgtgacggggttgactgttaatgacttccccaacgtgcgcaaacgatccattaatcaggtgcgggcgatgctgcatgactggaaggtgaatggcctagagctggcctatactaaatacattgagaagtacgatacgagaaataaccagcacgaagaggaggacaagactgtttttgggaagataatcaaaggaaaactggaatggattggatcagtaaaggataagcggttcgagataaatgagaagcataagggcaataaagccaagctaaatcgactcgggtatagcaagaatctgctcgagcggcagagctataagaaatacattgagaggcttaagcacctgaccattaacgaatcagacatggtcactgtgcttggggaagggcagacagattggatgcatcttaagaccgcgtacaaacggctctgttccgatccagaattgtcattccctatctacttctaccctcactcccgcaaggagaaagggggcgaggataacttgtggaccttttgttcaacagcaaaagatcactacgtaacttatcgccacccagtcgtgtgtgtttttgattgtgacctagagagaatcaataataagcacaagggcaagaagttcatcgaccatggcaacaacgttttctctatactgctgcagaagccggaaggctcaatctatgaaaagtatgcaatcgagcagatctatgatctccacgacatgctgaagaccgacgaatatgggcgcagattgtatctttctagcgaattcgatggaaactccgtgcataaaatgaaccccaacattttcagcaagaaaaagacctctaatgacgaaaagatcgtcgataacgaggtgttcttacggaaaaaggacggcacggagaaatcgattgctctttccaagacaaattttgccgttagtatcgccagaggaatacaacccttccgtaccatgaatttttctggttttatgccaaccttcttacgcattaaagaaatctaccagctgcacatatcggatagcagtcattga

SEQ ID NO: 8665 - RNA, 1200 nt, synthetic construct
  source 1..1200: mol_type = other RNA
atgacaagaattaataacctgtcccgatttcagcaaatttccacattgaaccagttagctctgttcctcgggttcaagccaaaggacttttcttacatcctttaccgtctcagtgacggaccaaatgggcagtataccgagttcgccatcaagaagaggaatgggaaagaccgcaccatcgctgcaccacacacagcgctgaagactattcagcggtcactgacatctaaactcgaagggatttatgatcccaaaaaagccgcatacggatatataaaggagactcctcacaataaggataaaactgtcttcggaaacgccctggtgcattcaaagaagcgatacgttttcaatatcgacctgtgtgatttttttcccaccatccatttcggtagagtgatgggcttgttccagtcgaatccgtacaagctcaaacgcaatatcgccatcctgctcgctaaaattgcttgctataatgactgtctcccacagggctctccttgtagtcccatcatttccaacatgatatgctcccacatggacagagaattaagcgacttggcaaaggcttatggttgctattacagccgatatgccgatgatatgaccttttccaccaatataatcgagtttcctagggacatcgcatttagagacgagaactggaagcccggcgaaggcctcatagagatcattgataaaaatgggttcgagatcaactcagaaaaaacgactctgcgcacccaggccgatcggcaaatcgtgacgggcctgattgtgaacgattttcctaacattcggaagaggtctattaatcaggtacgggcaatgctacacgactggaaactgaacggtatggaagccgcttacgagaaattcatcaactaccacgacacacggaatagcgaaaacaaggaagatagcacagaactatttagcatggtggttaggggaaagttggagtggattagaagtgtgaaggataaacgtttcaacatccaggagattcaaaacaaggccaagagtaagcagaatagactgtcatatagctcccgccttcttgagaaacagagctacaaaaagtacttcaaccggtataagcatctgaggataaatgaatctgacatgttaactgtccttggcgagggacaaaccgattggcgccattttaaaaacgcgtacgaggtcctgtacaggtga

SEQ ID NO: 8666 - RNA, 1056 nt, synthetic construct
  source 1..1056: mol_type = other RNA
atggaactgaaactgaatcggactgacgaagagatattagcgcttttcaagagcctcaactctgttgagacagtggcaaacattttggaggtcagtcccaagattctgaattactacactttcaagagcgaaaactatcagaagttcttcatccggaaaaaaaacggtaaaccacgcaccatttactctcccaataccaacattaagattctccagcagaaactcctgtacattttcaacctgctatacaagcccaaccagtacgcttatggctacatcaaggaaagaaatatagtggacaatgccaacaagcacctgaaaaagaaattcatactgaacgtagacctgagtgactattttccgtccattacttaccggagggtgatcggatacctagtcaaaaacttaaagatcgagaataccgccgcacgaatcatcaccaaacttatctgtgtcgaagatgagaagaatacgttccttccacaaggaggcgtgacatctcctttgatctccaactttatctcagagaatctggataaggatctatcctattatctgaagagattcaggtgcgagtatactaggtatgccgacgatctgacaatttcctcggaagatctcaagtttccagataagattgctgtagaggaccagtttcgtcaagtttggcttcataacgatttcgagcgtataatcaagaaaaatggctttgaggtgaattatgagaaaatacggttaagaaagcctaaccagcgacagactgtgaccggtctgattgttaacggatcaaagcctaatgtgaaacgcagctatattcgcaatttgagaagcatcctgtacaattgggaaaccaaggggtacacacacatccaaacggcatacgaattgaagtataggaaattcgacaacgccgaatttaaacccatccctaagatcgagaacgtgattgatgggaagcttaattttttgagcatggtcaaagggaaggacgacgagatctacctcaaactcaaaaagcgctttctgaagctgaaagctacactcgatgacgtctga

SEQ ID NO: 8667 - RNA, 1044 nt, synthetic construct
  source 1..1044: mol_type = other RNA
atgaagctcgaactcgttaaaactaacgaggaaatcatcgagtgtttctattcactgagaaccaaatccgacgtggctgatcttctggagatccccatcgaggtgctgaattattatctgtacatctcctcgaactacacaatttttacgattcctaaaagggatggctctcctcgtgtaatatattcacccatcacaccgatcaaaatcttgcagcgtaagttactctatgtgttcaacctgatttatgaaccagatgacaactctttcggattcatcaaaaaccggtccatcgttcagaacgctgccaggcaccagaataaaaagtacgtcctgaacatcgacttgaaggattactttccgaacattacatttgggcggattcttggctacctcaagaagaatctgatgctgggggacgaggccagcgtgataataactaaactggcctgcgttgagacagaggaaaatacctttctcccccccggctcacccctctctccaattctgagcaatatgatttcaagaaagctggacgtggaaataagcaactttgttaagaagtacgactgcacctatagtaggtacgcagacgacattagcatttccactgatcgcatcgtattccctgaacaagtggccatcagagatctatacggagatatctggttgaacgcgaaattcgtcaaggtgatctccgacaacgacttcaatatcaactacagaaaggtgcgcctccggtctaataagcagaggcaagaagtcaccggtctgattgtgaacggggtgcgcccaaatgtaaagcgcgagtatatccgaaatcttcgagctatgattttcgattgggaaaaaaacggacttgagaatgcacagagcaacttcgagattaattattggaagcctaaagacagtgactttaagcagataccaaggattgagaatgtcatagacggcaaactaaattttctgagtatggtccggggtaaggatgatttattgtaccagaagctgaaaaccaaatacgataagttagtgagcatctga

SEQ ID NO: 8668 - RNA, 1716 nt, synthetic construct
  source 1..1716: mol_type = other RNA
atgaagaataagttcaaacgcctagtagactttgaggatgtggccctcctgctcgagatccctacagagtttctctggaaaattctgatacgggacaagcagattaattataccagcttccctctgggaaagaagtcgggcggctttagaacgatctacagccccagcaagaatctcgcaatactgcaggctaagcttgcatacattctctctctaaatttcaccccccataatcgcgcccacggctttattgaaaaacggagtatcgtgaccaacgctagtgagcacttaaagaaatctttcgtgctgaacattgacctggagaacttcttcgagtcaatatctttcgcgagagtccggaagatgtttatctcctactttaagttgggcgagactgtggcaacgacccttgcaaacatttgtatccacccaggaggttttctgccacagggggccgctaccagtcctatagtcagcaatatcttggccaagtcgctggataaagagctcaagcagctgtctatcgagtccaaaggagttaagtataccaggtatgccgacgatattacattctctaccaacaaacgtgtcttcccgaggtccatcgcctccctgaatgaagatgggcaagtggaactttcagagaggctaatgcagatcatcaagaagaacggattcaacgtgaacggaaagaaagtccgaatgcaagattcaaagaagaatcagagtgttactgggataacagtgaacgagaaactgaacatctccaggacttacattcgcagaattagatctatcctgaattgcatcgaaaaaaacatcgatgacttggacagagccagagaggtttttgagcgcaaatacccgttccgccaacgggccaaggaaaactatcctgaaatgttttccgtgttaagggggatgataaatcacgtggggcatgtcaaagggaaatcagacccagtgtatttgaagctcgctaatcgattcaacgatgtgagccccgagcacaaagtgatcaagtcagttgacaagcaatcatctaagaggaaaatgtacgaggactatacatatgtcattgaacaggaaaatcccgtagttgctttcgcgagcgaacagcggaacgaatttgaacacgtttatcataaccagggaactgggttcctgctgaaaggttttggcctggtgacgaatgctcacgtcttgaaggatctggtggatgctatagaactcgagatggtgatccttgagccatactacgtccgagtgttcaagtccaatgacatcaatgtgcatatgatgcggatcgaatgctatgacatcgaaaaagacatcgcaatacttagaagcaacagtgtcgatcacaacacagaaggctttaactacaacgaactgattcagaaagagcagttaatcgatctggtaggataccctgattaccgccggggccaagagatcagggtcgacaatggttttgttcgtggcattcgaatgcacactgactcctctgacaagacaaccgcccataagcgttatgaaattacccccacaatttacggcggcaatagtggtggccccattgtgaacgagaaaggtgaggtgattgccgtggcggtgaaaggagcaactatgaacggggtagttccaaatgaggtcattcctatctccgaggtaattgagctcgccaaaaggcagttgttcagccatagcctttga

SEQ ID NO: 8669 - RNA, 1656 nt, synthetic construct
  source 1..1656: mol_type = other RNA
atggaaataccaactgagtttctctggaaaatcctaattcgcgataagtccaataactacacatcattccccatttctaagaaaagcggtggataccggacaatacattctccctcctctaatcttgccatcctccagaaaaagctcgcctacgtcctgtcattgcaattcaatccccacaatcgggctcatggttttatcgagaaaaggtccatcgtcacgaacgcatcagagcacctgaagaaaagtttcgtgctgaacattgatctggagaacttcttcgaaagcatctcttttgccagagttcgcaagatgttcgcaagctattttaagttatcaggggtagtcgccacgaccctggcaaatatttgcagtcacccagaaggctttctaccacagggcgcggcaacaagtcctataatttccaacatcattgcgaagtcactggataaggagcttaaacagctgagcgtggagtccaaaggggtgaagtatactaggtacgccgacgacatcaccttctcgacaaataagaaagatttcccgaggaatatcgcttttttgaacgaggactctcacgtggtattgagtgagaagcttttaaggatcatcgagaataacggcttcaatgtcaacgagcagaagattcgcctgcaggatcggcagtccaaccagagtgtaactggcattgttgtaaacgagaaacttaacgttagccggacctacattcggaggatccgctcaatcctcaactgtatcgagaagaataataatgacctggacgcggcccgagaaatttttatcagacggtatcctttccgccaaagagctaaagttaaccagcccgagatgttttccgtactgagaggaatgattaatcatgtgggccatgttaaagggaagagcgatcctgtctacctcaaactggccaaccgattcaactccgtttctcctgagcagaaagtgatcaagtctgtggaaaagcaaataaacaagaggaagatgtacgaggattatactttcgtgattgaacaggaaaagcccgtcgtggcccttgtcagtaaagaatcgaccgaatttgagcacgtgtatcataatcagggaaccggctttttactaaagggtataggaatggtgacaaatgctcacgtcttgaaggatctggtcagcgctatcgagctggagatgttgattccaatcccttactatgttcgtggttttaactccaaggacttcaacgtgcacatgatgcggattgagtgcttcgacaccgaaaaagacatcgtgatcctgcgaagcaagtccctcgatcacaataaagagggattctcttatagtgaggcaatccaaacagaccaactcatagaactggtggggtacccagattacagaaggggtcaggaaatcagagtcgacaacggctttgtgcgcggaataagaatgcacatcaactcaggcgacaaaaccgtgactcataggcgttatgaaatcactccgacgatttacgggggcaatagcggaggaccaattgtaaatgaggtgagcgaagtgattgctgtggccgtgaagggggctaccatgaatggggtggtccccaacgaagtgatacctatctctgaagttattggcctggccaaacgaaacagcctcatatga

SEQ ID NO: 8670 - RNA, 1749 nt, synthetic construct
  source 1..1749: mol_type = other RNA
atgaagcctgtactgctctctacagacgaggaaatcaagaataagttcaagaatctgaccgattttggcgacgtggcccttctttttgagatccccaccgagtttctctggaagatcctgattcgtgataaatggatcaattacgtgtcattcccgcttcataagaaaaacggtgggtaccggaccattcactcccccagcaagaacctggccattctgcagaaaaagctggcctacatcctatccttgaatttcacaccgcataatagggcacatggctttattgagaaacgcagcatcattactaacgccagtgaacacttaaaaaaggctttcgttctgaatatcgatcttgagaattttttcgagagcatttcatttgctcgggttcggaagatgttcatctcatattttaagctctccgaaatagttgcaaccaccctagcgaatatctgtacccacccagacggatttctccctcagggtgccgctacaagtccgataatctccaacatcctggccaagacactagacaaggagctgaaacagctttccatcgaatccaagggtgtcaaatacacgaggtatgccgatgatataactttctcgacgaataaaaagctgttccccaagagcatcgctttcttgaacgaggacgggcaaatagtactgagtgagagattcatgaagattatcacgaagaatggattcaacgtgaacaagaaaaaaatccgacttcaagatagtgaagggaaccagtctgttacaggcattaccgtcaatgagaaactcaacgtgtctcgaaactacatcagacggatcaggtccattctgaattgtatcgagaagaacataaacgatctggactacgctcgggaagtattcgaaagaaagtacccctttcgccagcgtgccaataggatccatcctgaaatgttttctgtgctcagggggatggtgaaccatgtcggccacgtcaaagggactagcgatcctgtttatctcaaattggcaagccgattcaataatgtgtcaccagaacacaaagtgattaaaagcgtggaagagcagagtaacaaacggaaactgtacgaagaatatactttcgtcattgaacaggagaacccagtggtggcgttcccattcaaaggttccatggattttgagtacgtctaccacaatcaaggaaccggttttctcctgaagggaatcgggctcattacaaacgtgcacgttttaaaggacttggtcgatgccattgagttagagatgtatattccccagtcgtattatgtgcgcgtatttaacagtattgacttcaaagagcacatgatgaaaatagaatgctatgacatcgagaaggacatcgctatactgcgcagctctagcctggatcataatgcagagggcttctcctacaacgaattgattcagaaagaccagcctatagacctggtgggatatccagattacagaatgggccaagacatcagagtcgataatggctttgttcgcgggatcagaatgcataacgactcatgcgacaataccgttaagcacaagcgttatgaaataacacctactatctacggcggcaactcaggagggcccgtaattaatgtgaactctgaggtgattgcggtcgccgtcaagggcgcaactatgaacggagtggtgcccaacgaggtcattccaatttctgaggtgatcgagttagctaataggaagttgtttgtgtattctgtgtga

SEQ ID NO: 8671 - RNA, 1770 nt, synthetic construct
  source 1..1770: mol_type = other RNA
atgatatttatttctacacttgtgcgccccctcctgcagtcatctgacgataagatcaagagtaagttcaagacgctgaccgattttgaggacgttgctcttttgttagaaattccagtcgaattcctctggaagattctcatcagagacaagcagattaactataagtcatttccgctggctaagaagaatggcggctatagaaccatttatagtcctagtaagaacctgaccttgctccagaagaagttggcctatatcttgagcctcaattttacaccacacacaagggcctatgggttcatcgagaagcgcagtatcgtgactaatgctagcgaacaccttaaaaaaaactacgtgctgaacattgacctggagaatttctttgagagcattagcttcgcccgggtgcgtaagatgttcatctcctacttcaagttcaacgacactgttagcactacactcgctaatatatgtgtacaccccgacgggatcttacctcaaggggccgcaacctctccgatcatctcgaacattctagccaaatccttagataaggaattactgaggctgagcctggagtcgaaaggcgtgaagtacacaaggtatgcagatgacataaccttctctaccaacaaaaaaactttccccaaagcgatagccctgctgaatgatgacaagcaagtcattctgtcagacaaccttattcagatcatcaaatccaacggctttaacgtcaacgagcggaaaattagactgcaggatagagagggaaatcagagcgtcacaggaatcaccgttaacgagaagctaaatgtgagccgaacctacatacgaagaattcgatccatcctcaactgcatcgagaagaacattaacgatctggactttgcccggtcaatctttgagcgtaaatatccattccggcagcgcgtcaagggaaactaccctgatatgtttctggtcctgcgtgggatgattacgcacgtgggtcacgtgaagggtaaacgggatcctatatacctgaaactcgcgagcaggtttaaccggatctcccctaaaaaaatgataatcaactccgcagagaagcagaacaataagaggaaagcttacgaggactacacatatgtgattgatcaggacgacatcaagtgcgtcttcgatcccaagatggatgatatggtggatctatattacgggcagggaactggggtgttgctaaaaggcattggtgtggtcactaatacgcatgttctcggaaccattattgacgccttggacaacggagccaaacttccctctagttacaggattagagtattcaaacatgactcagaactggcgtgtaccatcacttgttatgatccagagagggacatcgccatactgaccccagatgacattgactgctctgcaataggcctggaatacaatacaagtatcacgaagggacagtccattgatttgatcgggtaccccaattatcgccagggccaagaaattcgcgtagaaaatggatttgtccagggcaaacgaatccataaaggtactaaaggagagtacattcgccatgaaatctcccctaccatctacgctggcaatagcgggggcccagttgtaaacgaaaatgccgaggttatagctatcgcagcaaagggcgcaacagagaatggcgtggtgcccaatgaagtgatcccgatctctgagataatcaaactcgctcaagacaatggtcttctgaatgaaagaatgtcctcagtgcaactttga

SEQ ID NO: 8672 - RNA, 1707 nt, synthetic construct
  source 1..1707: mol_type = other RNA
atgcgtaccgaattgttggccaacgaggacaagattaaacgcaattttcagaacctgaacacctttaatgacatcgctaaccttctggaaatccccgttgagttcctttggaagatattgatcagagatcgggctcactcctaccgcagattcgagctgcgaaagaaaaatggggacccacgcatcatttattcaccaaacaccaatctatctatcctgcagaagaagttcctttatgtgttggaactcaattttaacagccatcagcgagcccacggctttgttaagaaccgggatataatcactaatgccaatgaacacatcaataagaggttcgtgctgaacttcgacctggagaacttcttcgagagtataaacttcaggagggttaggcacatgttcatcagttactttaagctgaacgagacagtcgcttcaactctagctaatctctgttgccatcctgatggcttcctgcctcaaggagcagccacatcaccgatcatttccaacattctgtcaaaaagcatggacaaggaactcacccgcattgcgattaacgtgcgggggtgcaactacacaagatatgctgatgatattaccttttccagcaataagaggatctttcccacacagatcgcaatccaacattctgatggcaacattgaaatcagcgaggaagtgattaaaatcatcaacaagtatggcttcagcataaaagaatctaaaactaggatgagcgattggaaacaacatcagtctgtaaccgggatagttgtgaactctaagctcaacgtaagccgcaaatatgtgcgtaaggtgcggtccatcttgcattcagccgaaaagaacattgataatctggacgtggcggtcgagctgtttaactccaagtataattttcggcagaaaaacaacaacacgtaccctgacatgttcagtatactgagaggcaagatcgcccacatcggaaatgtaaagggaaaaatcgatccagtttttctgaacttagccaaacgttataaccagattgcacatctgaatgaagagccactaatcatcatcccacccaatgacattcagttttatcaggagaacacattcgtgatggagtgcaatgaattcgagctgtacattgacaaaaacgatgagactggtgaattcatctacgggcagggatctggctttttactcaagggcattggtttaatcactaatgcacacgtggtgaaggaggtgattgatctcatgaagaacgaggtgaagttcataaataagtactacgtcgccatccacagagcatcaccttacgacattatatacaaggcacggattatctgttatagtattgagaaggacctggctatacttgaggtcgagaatctcgacatcgagagcattgggtattccgccaatgaaagtatcaagaaagacatgcagattaatctcgtaggttttccctcctacagagaaggcaatgacatcaaaagccaatctgggtatgtggaagggattcgaatgcacgagaaaataaatgtccgctacgagatttctgccaccatttacgagggaaattccggcggtcccgtctttaacgccagtaatgaggtcatcggagtcgctacaaaaggcaccacgtcgaacggagtttcgcctaatgaaatcataccgatttccgaagtgcttaaactggcgaaagaggtgtga

SEQ ID NO: 8673 - RNA, 1761 nt, synthetic construct
  source 1..1761: mol_type = other RNA
atgagtgggcatgttaacgtagagttgaagtcctcaccaactgacatccggctcaagttcagaaagttgaatacatttgacgacatagcccaccttttggaaataccagtgcagttcctgtggaagatccttgtcagagataagttagtgaactaccgaacgtttaagttaaggaaaaaaaacggcgacgagcgtactatatatagtcctctctccaatctggcaatcctgcagaaaaagctgtcgtacattctgagcctcaatttcacacatcatgaccgcagccatggtttcatcgagaacaggtctattgtcaccaatgccagcgaacatctgcgaaaaaagtatgtgctgaaccttgacctcgagaatttcttcgagagcatttccttccggcgcattcggcacatgttcatttcctactacaagttcaatgataaggtggcttctactctagccaacatttgttcacatcctgatggattcctaccacagggagcacctaccagtcccgtggtgtctaatatcattgccaaaaccctggataaggagctgaaacgcgtagccatcggcgctaaatggacacaatacacgagatatgctgacgacatcaccttctcaacaagtaaagaacaatttcccaaggagatcgcaaccataaacgaatccggaataatcaccctcaacgagaatatcatcaagatcattgaaaagaacggctttaaggtgaacgataaaaaaacccgccttcaaaaccacaaacaatctcagagtgtcactggcatcactgttaacgagaaactgaacatcgacaggaggtacataagaagaattcgctccatcctgtcttgcatagagaagaacattaacaacctggatgaagcccacaaaatctttgaaatgaaatatcccttccgtcagagaaagaggggatcaaatccagacatgtttctcattttgcgggggatgatcagccatgtgggaaacgtcaagggcaagcaagattctgtctattggaaacttgcgaatagattcaataaggtcacccctcacgagcccatcaagttgcagctgtctcggcgagaatttcacgaggacaatacgtacgttatagactcagattataccgcgaaatactacaaccacaacgagaacatttttgacgaagccctctacggacagggtaccgggttcattctgcggacaatcggcctggtcacaaatgctcacgtgatcgaggggatcattgagggtctggagcagaagttcattttttcgaagaagtactacatcgaagcctataagtctacactgtacagctttcctgaaaatgcaaaggtgctctgctacgatattgaaaaggatattgccattcttagtgtggaaggcctcgaaatccacgaaaaagggtatatgtataacgagagcatcaaggaggagcagcagatcgagttggttggatttcccggttataggaaaggacaggatataaagattcagaaggggtttgtgcagggtgttcgaatgcacctgtcaaaagatggcaccaaacgctataaacgtagggaaatttccgctactatatacggcggcaatagcggggggccgatagtaaacactgacaatgaggtaatcggcttagctgtgaagggagcaacaatgaatggggtgagcccaaatgagatcgttccgatcagcgaggtgattgagctagcgaaaaaacacggcattattaatgaacatgtctccatctccttttga

SEQ ID NO: 8674 - RNA, 1758 nt, synthetic construct
  source 1..1758: mol_type = other RNA
atggaactcaagtcggacgtaagcgtcatcaacaagagattcaagaagttacagaatttcgatgacatagccctgctgctggagatcccagtggaatttttgtggaaaattctcgtgcgcgacaaacataccaactacagggtctttaaactgaggaaaaagaatggaggggagcgcacaatttacagtccagccagcaatctcgccattttgcagaagaagctcgcatacatacttagtctggagtacaaagtgcattctcgagtgcatggcttcactaagaagagatctatcgtcacgaatgccttcgagcacctggataaacgatacgtgctaaactttgacctggaaaatttcttcgagtctatcgagtttaggcgtgtcaggaagatgtttatctcatatttcggtttcaacgacaaggtagcggccactctggcaaatatttgctgccatcctaacggctttttaccccaaggggccgctacatcccccattgtgtccaacatcatagccaatggactggataaggaattgaccaggattgcgaagaactcaaaatggtgtaaatacacccgctacgctgatgacatcaccttttctacgaataacaagaagtttccacaagagatcgctcacattgtggacgaaaacattgtcctgggagagacaatccttaatgttgtagagaagcacggatttaagattaaccacgagaaaacccggctccagaaccacaaacagaaccaaacagtaaccggcattaccgtgaacaaaatctccaatgtaaaccggacctatattcgtcgtatcagaagcatcctgaactgtatcgaaaagaacaagaacgacattgttaacgccgagaagatcttcaagatgaaatatccttaccggcagaaacgcgaagataacaagcctgatatgttccatattctgaaaggcatgatcgcgcacgtgggcaatgtcaagggcaaaaaagatccactctaccttaaactagcaacccggtttaatggagtggtggagttgagcgacctcactcccttccgcctgcctataactaagaagggttttcaagagaatcacacctacgtgatagacaatcctgacttcgagatgtacttcactgaagatggatatgaagaagtgatgtatgggcaggggactggcttccttttgaaggacatcggtctggtcaccaacgctcacgttattgaagatgttatcaagacagtcgagaaaaaacaggggaaatttcagaaggagttttacatttccttctttagagctgtggactaccacgttaagcattgggccaaactgttatattatgacacggatatggatatcgccattctagacgtcaaggatatcaatatctccaagacaggctacgagtataacgaattcattgagaaaggccagaatgtggagctggtgggtttccccaattatcgcgagggacaggagatacggattcaggaagggacaatacagggggtcagaataaatgaatctagggaccgaagcagaaaatatatacggcatgagatcacaactactatttatggcgggaatagcggaggtcccatcgttaatgaaaacaatgaggtgatcgcagtggcagtgaaaggtgctaccctcaatggcgtcagtccgaacgaggttattccgataagtgatgtgatcaagcttatcaaccaaaacaaacagccagaagaaaagtcagaggcttccatcgaagtggttcagtga

SEQ ID NO: 8675 - RNA, 1776 nt, synthetic construct
  source 1..1776: mol_type = other RNA
atgagtaatcatacctatgtggagctgaaaagtgacgtcagcgttatcaataaacgctttaagaagctgcagaatttcgaagacatcgcgctgcttctcgaaatccccgtggaattcctctggaaaattttagtcagagacaagcacataaactatcgcgcatttaaactaagaaagaagaatggaggggaacgtactatttactcccccgcctctaacctagctatcctccagaaaaaactcgctcacattttgagtcttcagtataaggtgcatagcagggtccacgggtttacaaagaagaggtctattgttacgaacgcattcgagcacttggataagcggtacgtcttgaattttgaccttgaaaacttcttcgagtcgatcgagtttaggcgagtgcggaagatgttcatttcttacttcggatttaacgacaaagttgctgccaccctggcaaatatctgctgtcacccgaatggttttctgcctcagggtgctgcaaccagccccattgtttccaatattatcgctaacggtctggacagggaattaacgagggtggccaaaaataccaagtggtgcaaatacacccgatacgctgacgatatcaccttttccaccaataataagaagtttccccacgagatagctcacatcgtggatgggaatatcgtcttaggagagacaataataaacatcgttgaaaagcacggctttaaaataaaccatgagaaaacgaggctgcaaaaccataaacagaaccagactgtgacaggcatcaccgtgaataagatcagcaacgtgaatagaacctatatccggaagattagatccattctgaactgtatcgagaagaataaagatgaagtggcccgcgccgaaaaaatcttcgagtctaagtaccagtaccggcaatctcgcaagggggataaaccagatatgtttcgcattctgaagggcatgataagccatgttggtaatgtgaagggtaaaaaagatcctgtctacctgaagctcgccaatagatttaacgaggttgtagagctgggcaacagtacaccatttaaactgccaatgactaggagagcattccatgagaatcacaccttcattatagataacgaagactttgagatgtacttgaacaaggatggaacaggagatgtgctgtcagagcaagggacaggcttcattctaaagggaataggcctgattacaaacgctcacgtgttggaggacttcattaaggtgcttgagacagaagaagggagattcgtgaacgagttctatatcagctttttccggtccgtatccactcatgtcaaacataaggccaagatcctgtattacaacactgacatggatatcgcggtactttctgtgaaggacatggacatatcaaaaattggctacgagtataatgagttcatcgaacgtgaccagaaaatcgaactcgtcggcttccctaattatcgtgacggccaagagatcaagattaaagaaggaactgtggaagggatccggattcagcgaagcaaagacggctcaaaacgctacgaacgatatgagatctcggccactattcacggggggaacagcggcggaccgatagtgaacgaaaacaacgaggtggtcgccgtagccgttaagggcgccaccatggcgggagtatcaccaaatgaagtcatccctatcagtgatgtgatcaagctcattaaccagaagaaacagcccgaggagaagtccgaggcatcaattgaggtcgtgcagtga

SEQ ID NO: 8676 - RNA, 1764 nt, synthetic construct
  source 1..1764: mol_type = other RNA
atggtttacaagctgaacttcgaacttcagtctaatctcgaggacattaagcagaacttcaaaaacctttcttgctttgaggatgtagccctgttattggaggttccaaaagaattgttgtggaaggtcttgattaagaacaagggagcaaactataaagccttcaagctcaaaaagaagaatggctccgagagagtgatctttagccccaccctgtccttgagcatactgcagaagaaattggcgtatatcctggagtcaaactacaaaaaccacaggcaatcctatggctttgtgaaagggaggggaattgtggacaatgcccagaaacatctgaacaagaaatatgtcctgaactttgatatcgagaactttttcgaatctatcaccttccgacgagtgagaagcatgttcatgacgtactataaattcaacgagaaggtggccacaacccttgctaatatatgctgtcaccccaatggattcctaccacagggcgctgctacatcccccatcattagtaatataatctgcaaccgcatcgacaaggaattcagtaaactcgcaaagaataatcggtgccagtacacccggtacgccgacgatattacttttagtaccagcaggcgtgtctttcctcatgacattgcatacattaaagaaggtagcatcttcctgaactcaaatgtcatctctatagtcgagtatcagggttttaagataaataaggagaagacacgtctccaaaattaccgccaaaaccagacggtaaccgggatcacagtaaatgaaaagctcaacgtgaaaagatcatatgttcgcagaataaggtcaatcctgcattgtattgagaaaaatgtggaagacctgcagaaggccgaacaaatttttgaagaaaagtacccgttcagacagaagaagtacctcgacaacattaatatgtttgccatcctgaaaggtatgatcagccatgtgggccacgttaagggaaaggacgatccattatacctgaagctcgctaaacggttcaacaagatcagttatctgtctgagactatctcgccctttaagctggagtccctaaaaaagtttcacgagacttatacctacatcatcgattatgacgacaaggtgcccttagtctgtttcgagaatgataaaatggaagaaatcctttacggccagggcacaggattcttactgaagggtgttggcctaatcactaacgctcacgtgatagaggatgcgattgaggccatcaaggacaataagaagttcaacaacgagtatggaatttcattcttccgcgggaattatccagatctgaaatacaaggccaaagtatcgaaatacgatctcgataaggacatcgctatccttgacatcaaaggctttaacattgacaatcaaggatacgagtataatatcgacatgaaagatgggcagaaaattgagctcattggctaccctgattataagataggccaggagattaaaattgagactggacaccttaaggggatacggaaacatcgcgatagcaccggcacatttcactctaggcgggaaatttcagcaatcatttacggggggaatagcggggggccgattatcaacgagtccaatgaggtgataggagtggccgtgaagggcgcgactctgcatggtgtcagcccttccgaaatcatccctattgaagacgttattaatctgaacagctccaactctgaagtgagttccaaaatcgcaaccaaacctcactga

SEQ ID NO: 8677 - RNA, 1752 nt, synthetic construct
  source 1..1752: mol_type = other RNA
atggtctacaagttgaatatacggttgcagtccaatttggaagacatcaagcaaaagtttcagaacctgtcatgtttcgaggatgtcgcactgctgctagaagtgccaaaagaactactgtggaaagtgttgataaaaaacaagggtaacaactacaacgccttcaagattaaaaagaagaacggatcagaacggtttatttttagcccaacatccaatctcagcctgctccagaaaaaacttgcctacgttctcaaatgcaactacaagaatcacaatcagtcttttgggtttgtggaagggagaggcatagtggctaatgcccagaagcatctgaataagaaatacgtcctcaattttgatctcgaaaatttcttcgagtcagttaccttccggcgggttcgtagcatgtttatgacctactacaagttcaatgagaaagtcgccaccattcttgctaatatctgttgccaccctaatgggtttttaccccaaggcgcggccaccagcccaatcatctccaacattatctgtaacaggttggataaagagttcagtcagattgccaagaagaatcgatgccagtataccaggtacgccgacgatattaccttcagtaccaataagagacagttcccctacgacatcgcatatgtgagagagggatccctgtttctgtcaactaatatcatctcgatcgttgagagtcaaggcttcaagattaacaaggaaaaaactaggctgcagaacttcaagcagaatcagacagttactggcattactgtgaacgaaaaactgaacgtcaaacgtagctatgtgaggcgcatcagatctattctgcattgcatcgaaaagaactccaacaacctccacaaggctgaacagatatttaaagagaaattcccgtttcgacaaaagaagctttttgacttcaacaacatcaatatgttcgcaatcctcaaaggcatgatttcgcacgtgggccacgtgaaagggaaggacgacgccgtgtatctcaatctggcaaaacgctttaatgatactgtctatctggaccctacaatcagccctttcaggttagagtctcttgagaaattccacaaatcctatacgtacattatccaggacgatgagaaagtacctctagcacattttgaggatggcatggaagtaattggttatggccaagggactgggtttcttctgaagggtgttggactggtgacaaacgcccatgtgatcgaagacgtgatcaaagctattgaggatggcaagaaattgaacattgagtacggcatctcattcttcaagggtaacgatccaaacattaagtataaggctaaagtggctaagtatgatctggacaaggacatcgcaattctggacatcaaaaatttcaatatcggggagcacggatacgagtacaatattaacatgacaaccggtcagaagatagaactgataggataccccgactactctattggtcaggaaatcaaaatcgagagtggctatctgaaggggatacgcaagcacggagattccacgggaaagtttcatacaagacatgagatctctgccatcatatatgggggaaacagcggcggaccgattataaacgagtctaacgaggtcatcggcgtggcggtcaagggagctacattacgcggggtagcgccctccgaaatcatccccattgaggagattattaatctcaatagcaaccttaccgatgtaagtaagcggatatga

SEQ ID NO: 8678 - RNA, 1761 nt, synthetic construct
  source 1..1761: mol_type = other RNA
atgtcaaaaaaaatgaatgtgcgcctcctgtcagaggaagatgtgatcaagaaaaacttcaagtccttgaaagacttcgcagacattgcgaacatgctggagatccctaccaagattctacaccagattttggtggaaagcaagaagaacaattatagtacctttgtcatcaagaagaagaacggtaccgataggacaatccatgcccctaaaaagaacctgtcaatcattcagaagaagctctcaaacatcctcgccttggtgtacaacaaccatttaaatagccatgggttcatcaaaaatcggtccatcgtcactaatgcggcgcagcaccttaagcagaagtatgtccttaattttgacctggagaactatttcgagacaatcaatttcggccgcgtgcgggctatgtttatccattactacgggtttaatgagtccgtggccagcacactggctaatatatgctgtcaccatgagggatttcttcctcaaggagccgctaccagtcccattatttcgaacatcatctctttcaagatggataaggagctcaccaaaatcgccaaaaagtaccactgcacgtatacgcggtacgctgatgatatcactttttccacaaaaaagagcgtatttccgaaagaaattgcctttataaaggattccagtgtacaaatttcccacgaagtggtgaagattgttaagggcaatggctttttcataaataaggacaagaccaggttgaaccaccaacaggaaagactgagcgtgacaggtatcactgttaacgagaagctcaacgtcgagcgacggtacatccgtaagatcaggtcaattctgcactgtatcgaaaaaaatagctctgacattgaggttgccaaaagcatcttcaatgaaaagtataccttcaggcagcgacgcgacgaggggaacccagatatgttcgacgtgctgagggggatgatcagttacgtgggtctggtcaaagggaaggaggacgaagtttttctgaaactggcacagaggtacaacaaatgcgtcgatgctatgggcgtcagtgttattaaactaccagtagagagaagacgattccaggagcttaacacattcgtgatagagcaggagtattgctactataagtatgatggagttccagataactctcaatgtgtagtcgtgggacagggtacaggctttctgctgaagggcattggccttataaccaacgctcacgtcataggaaaagattactttgacctatgggagttaagcggagtcgaattcaatggaatatcaatcaatcggtccaaatacgagaaggataaaacttactacgccaaactgctctgttacgactatattaaggatatcgcaattctcgacgtggacggcatcgatatcgacaaagtaggcttcgaatataatgattccatatcgactgacgaagaaatccaattaatagggtatccctcctaccagaaaggaattgggctgtccgttaaagacgggaaagtgttggaacagcgctacaccattgaggacgagctcagtcgttctatcagatatgagatttctgcaactgtgttcgggggtaactctggcggccccgtcgttaatatgaacaatgaggtgattgctctggccgcaaagggcagcagcgaaaagggaaacgtgcctaatgaagtgataccaattaagcaggtgattgaccttgccattaaaaagaaactgatcccctctagagaggaaatctctgtgtga

SEQ ID NO: 8679 - RNA, 1734 nt, synthetic construct
  source 1..1734: mol_type = other RNA
atgctgaataggatgaagcctgaactggtgtgtgaggatgacgctataaaacggaagttcaagaacctggaaaactttgaagacgtcgctcgcatgctggaaattcctgtgaaaaaactacgagagatcattgtcctgtccaagaagaacaattacattaccttcaagatcaagaagaagaacggaaatgataggacaatccatgcccccaacaaaaatctttcaatccttcagaagaagttctcatacattctgagcttggtctacaataatcaccttagcgcacatgggttcataaaagacagaagtatagtgtccaacgccacccaacacataaagcagagatacgtgctcaattttgaccttgaagactacttcgaaaacattaactttggacgagtacgtgccatgtttatccactatttcgggtttaacgaggcagtggcaagtaccttgagcaacatatgttgtcatcacgatggttttttgccccagggtgcagccacttcgcctgctatctccaacattttatccttcaagttagacaaagacctcactaaactcgcccgcaaacatcactgcatatattcccggtacgcggatgatatcaccttttccacgaaaaagaatcaatttccgaaagacattgcgtttattgagaattccagcgtgcagctctctaatgaggtgatcaagatcgtcaaaggaaatggctttttcattaatgagaacaagacgcgtctgaacaacaataaagagcacctatcagttacaggaattacagtgaacgaaaagctgaacgtggagcgaacatatattagaaagatccgctctatcttgcattgcatcgagaagaatatcgatgatatcgaggttgccaagaccatgtttaatgagaagtacaaattcaggcagagaaaagagaataagaatcccgatatgtttgacgtgctgcggggtatgatctcatacgtggggcaggtcaaaggcaaagaagacgaggtcttcctgaaactcgctaataggtacaaccgcgccattgagttcttcgaccttccactcattaaaataccggtgcccaagaagaagtttcaggaggataatacttacgtcatcgaaagtctgaactacgattataccttcggtggcgaacggcattatagcttggtcagtcaggggaccggctttatcctcaagggaatcgggttaatcacaaacgagcacgtgctcaaggagtatatagaaatgctagaactgggggtgcagtatgattcttcggagaacattgtcattcacaggagcaagtactctcatgagaaacagtacgcgaaacttctgtgctacgataaaattaaagacatagccatcctgagcattaaaggactcgacatcaaaaaggttggcttcgactataacgtatcaatcgagcccgatcaagagattcaactggtaggctatcctaacttcagagagaatatggacatttctatcaagaacggcgtgatcctgggagaacgctatactgacaagaccggcttcgtgagcgaaaaacggttcgaaactagtgctcacatatatggtgggaactctggcggaccagtagttaacatggccaatgaagtaatcgcagttgccgtgaagggggctacagaaaacggcgtggtcccaaatgaggttatcccaattaaggaggttatcgatctggcaaaaaagaataagatcattaccacttga

SEQ ID NO: 8680 - RNA, 1746 nt, synthetic construct
  source 1..1746: mol_type = other RNA
atgattaaaaagatgagtccagagctgctctgcgaggatgccatcctcaaggaacggttcaaatctctgaatgactttgagggggtcgcacacctcctggaaattcctgtgaaggagctaagaaaggtgctggtgctgaacaaaaagtataactacaccactttcaagatcaaaaagaagaacgggaatgataggactatctacgccccccagaagaatctcagtattatccagaagaagttctcctacatactgagcctcgtatacaacaaccatttgaactcccatggattcatcaaggaaagatctatcgtcaccaatgctgagcagcacatcaaacagaagtttatcttgaacatcgatcttgaaaacttctttgagagcattaactttggccgggttcgcgctatgttcattcactacttcaagttcaatgaactcgtagctaccactctggcaaacatttgttgtcactatgacgggttccttccacagggcgcagctacatcaccaatcatctccaatatcctttctttcaagatggacaaggagctgaccaagctagcaaagaaaaatcactgcatatattcgaggtacgccgacgatattacgttttcaaccaagaaaaaccagttccctaaagacatcgcctacatagagaactcattcataaagatcaacagtgagcttctgaaggttataatggggaacggctttttcatcaacaaaaataagacacggctgaattcacaccgcgaaaaacttagcgttacaggaattaccgttaatgaaaaactgaatgtggagagaaagtatatccggaagattcgatccatcctgcattgcattgagaagaacattaacgatatcgaagtggccaaatccatcttcaatgagaaatacaggtttagacagaggaaggagcacggcaaacccgatatgatagacgtgctccgtggaatgatctcctatgttggccaagtgaagggaaagaatgaccaggtctttttaaaactggccaaacgctacaatttaattgtggagctgatagacatggacttgcccattatcaaattgccaatatcaaagcggaaatttcaagaggataacacattcgtcattgaatctctgtattacccgtactttatcgatggagagagcgcgggggaggcacctatcggacaaggaacagggtttttgctcaaaggcatcggtttaatcaccaatgcccatgtgtttaaaggtgagtacaccgagatgctcgagattggagcgacatttaagaagatcgaaatccatagaagcaagtactccagtgggaaaaagcactacgcaagtcttctgcactacgacaagattaaagatatcgcgatcctgagcgtggacggcctagatatggctaaaatgggtttcgaatataacgagttcattgagccaaatatggaaatacagttgctcggttatcctaattttcgagacaatatggacatctccattaaatcgggaactgtgttaggcgtgcgctataccgacacttataggctgaacagcgaaaagcgttatgagattagcgcccatatatatgggggtaactctggcggccctgtcgtaaatgaaaataacgaggctgttgccgtcgctgtaaaaggcattacggatgatgggagcgtcccctctgaagtgattccgattaaggaagtgatagaactggccaaaaaaaagaacattatccccctgaaaggctga

SEQ ID NO: 8681 - RNA, 1737 nt, synthetic construct
  source 1..1737: mol_type = other RNA
atgacgtataaattaaacgtggaccttgtgcagaacccagaaattatcaaagagaagttcaaaagcctctccaattttaacgatgtagcaaatatcctggaaatcccttcgagctttctgcgccaaattcttatcgtgtctaagaagtccaactacgggacttttacgatcaaaaagaagtctggagatgaccggaaaattcacgcccctagtaagaacctcctgattatacagaaaaagttgacttcaatcctcaacctagtctacaagaatcacaataattctcatggcttcgttaaggatcggtccatcattacgaacgcaaataaacacattaggaagcaatatgtgctcaactttgacttagaggacttcttcaacaatatcaactttggaagagtgagagctatgttcatctattacttcaagttcaacgagactgtggcaaccatcctagcgaacatttgttgccattacgacggatttttgcctcagggcgccccgacctcaccgattatttcaaatatcctggcgaataagctggataaggaccttactcgccttgctaaacgtcatcgatgtgactacacgaggtacgccgacgatatatcaatcagcaccgacaaaaacaaatttcctaaagccatcgcccatacaaaggataaaaagacctatcttagcagcgaaattatctccatcgtcaaaaataacggctttttcattaacgacaagaaatctaggctcaattctaaattcgaaaacctgtcagtgactggactaacagtcaatgaaggccttaacgtaaagcgctcttatattcgccgagttcgcagcattttgaactgcatagagcaaaatctggataacctggacgaggccaaaaggatattcatcgaaaaatacccctttagacagatttcttatgccacagaacctgacatgtttgccatcctcaaaggaatgattgctcacataggacacatcaaagggaagaccaattcggtgtatagaaagttggccatccggtataatgacattgctgagattgagaacattctgtccataaagctgcccagcacacgtaggcagttccaggagactaacacctttgtcatagagagcagtttcttttacaagagtggggacgatgaagagtttgagccctgcggccaaggcaccggctttttgctcaaggggatcggtctggtaaccaacgcacacctgttcgacatatacttcaagaagagcaatgacggttacaatataaccaacttctcaattgaggtgcaccagtccaaatatagtaccaataagaaatacgcgaagctgttgtggcatgaccggattaaggatatcgctatcctccagttcacaaatggcaatctgacagatcaagggttcgattacaacacctccattaagactgggatggagatagaactcctgggttatccagcccacaccctggataattccatcaagattgagtctggagtcgtgagacaggagcggaataaccctatgcccgataggcagaagcagacacgatttgaaattagtcccctgatctacggtggaaacagcggcggtccagtagttaataaagaaaaccaggtcatcgctatcgcaacaagagggataacctccaatggggtggtgccaagtgaggtggttccaatcggcgatgtcatcacactgttcgaaaagcataatcccatcttaactaaaaacgtttga

SEQ ID NO: 8682 - RNA, 1713 nt, synthetic construct
  source 1..1713: mol_type = other RNA
atgactaccatctacattaatctgaagtcagatgatgacgtgatcaagaacagatttcggacactggatacgttcgaagacatcgctaatttattggagatcaaacccaaaatgcttcgagatattctcgtcattaacaaaggaaagaactacaagagtttcgtgattaagaagaaaaacggcggagagcgcactatttactctcccgaaaaaaacctttcaatcctgcagaagaagttcttatacatactcaacttggtgtataggaatcacgaaaacgcccacgggtttgttagagacaagagtattaagaccaatgctacaagtcatttaggccaaaactatatcctgaatttcgacctgaaggacttctttgagaacattaatttcggaagggtgagaagcatgttcatgagttactttaagttcaataccatcatcgctaccactctagcgaacctctgctgtcatgaagatgggtttctgcctcagggtgctgcaacctccccagctatcgccaacatcctctcctacaacctggacaagacattttcaaaactggcaaaaaaggagaagtgtgtgtacactcgatatgcagacgacatcacgttcagtactaacagagaaaagtttccgaagaacatcgcttttcaaaagaaaggtcaggtcctgctctcaagctacgttgagaaaatcatcagggaaaatggcttcctgataaacgaaagcaaaacaaggcttcacaataaataccagaatctctctgtgaccggcattacagtcaaccagaaactgaacgtgtctagaaagtatattaggaagattcgcagcatcctccattgcatcgaaaaaaatatttcgaatctcgagctggccgagaaacttttttgcgagaaatataccttccggcaaaggaagaactccaatactccaaatatgttcgatgtgttaaaggggatgatttctcacctgggcaatgtacggggcaaatccgatgacatatacataaagttggcaacacgatataacatcctggtcaacaacattgacaaacctgagatcaagctgcccatctccgcccagaagtttcaggaacgcaatacttttgtcgtagactccctgtattctaaatatagcctctatggcgccgaggatcaggttctaaatggacagggcacaggattcctgctgaagaatgtaggacttatcacaaatgcacacgtgttgtatgataatatcgatcttctagacgacggagccgagtataaaactgaatattacatccgcgttcatcagagcaaatactcaatcgataacaaacagtactacgcgaaaatcgtgtactatgattcttttcgtgacattgctatcctgtccataaaggatataaacttgaataccgagggctattcttacaacgaagagattaaccccaatcaaagcattaagctcatagggtatcctcagtacattgatggtcaggatctgcgtgtattggacgggcatattatgaattcacggatacacaccgacggtacccgcacgcaaaaacggtacgagatcagtgccaccatcttcggtgggaatagcggagggccaattgtgaatgccaacaacgaggtcattgcagtggccgccaaggggatatccgacaagggctcggtgcccttcgaggttatccctattagcgacgtcataaagatttacaactga

SEQ ID NO: 8683 - RNA, 1773 nt, synthetic construct
  source 1..1773: mol_type = other RNA
atgaacgttgaactcaccaaacccgatactctgctgatatacgagttccagaacttgcacagctttagtgacatcgccaatcttctggagattcctatcgaagtcttatggaagaatgttgttgacaagaaaaagtaccactccctaaagatccccaagaagcagagcgacaaattccgcatcattaacaagccgagtaagaacttgaatatcatccagaagaagttcaactacattcttagcctggtgtataaatcctcacatagcactagtcacgggttcgaaaagcataagtcaatccgtactaatgctatctgccacctcaataggcaattggtgctcaatctagacctcgaggagtttttttcatctatcatcttccctagagtgcgcgcaatgttcatgacttacttcaagttcaacaatgaggtggccaccacattagccaatatttgttgcgacaacaacaacaaactgccacaaggcgcagctacctccccaatcgtctcgaatatcatcgcttataaactcgataaacagctgtcacggcttgctagaaccaatggatgtatatattcccgatatgctgacgatataaccctgagcacgaataacaagaagttccggtttgagattttcaacgggaacgacggggtcaaagaagtaggcgagaaggtaaaacagatcatccaatctaacggctttaagataaactccagcaaaacaaggatttgtgagaacagcaaagcacagtatgtgactggagtgaaggtgaactccaaactgaatgtgaaccgcacctatgtccgacggatcaggtcaatacttcacaccatagagaagaatctggacaatatcgaggaggcagtcaaaattttcaaagaaaagtacccctacagagcgaccctctttaataactacgacatgttcaacatcgtcaggggtatgatttcccacattgggcatattaagggaaagcaggatgccgtgtttcagaaatttgttatacgctacaaccgcattatcagtgagatcaatacaaaagaaggcacaaattatgcgtttctatatcgaccatacacctggacagagtttaggcagcagaatatttatgtgatcgaggaggatgaaatttcttacaggctcggaagcttgaataaaaagatcatctctagtcaagggtcagcctttttactgcaaggaataggtctggtgacaaactggcatgtggtaaagtgctttatcgaaggagtcattaacaatgaactggcgacgtttaattctaactactacatacctgtaaccaagtcaagatattccgacaagatctggttcgccaaaattatcatgttcgacaaaggcagagatattgccgtgttgaaaattgatggcgtggatgagaagctgtatgggttcgactactctcttgatatcaaggaaaatatggaatgctgtctgctcggttaccccgaatacattcgggatcagaccctgcacgaggtggagggcaaaatacaatcccagagaattagtcggtactatccgaatgattacgttcgttatactacgacaatggccattcacgggggcaactctggcggaccagtcgtcaacaaggaaaacaatgttattgcaattgccgtgaaaggctctaacaatactgtggctgaagtaatccctataggtgacctgctggagagcatcaaccagcagcagatgattaaaatcgagcagcataacatcgtgcagacaactgaagtttcgaagagctga

SEQ ID NO: 8684 - RNA, 1728 nt, synthetic construct
  source 1..1728: mol_type = other RNA
atgcacgtagacctgaaatcagaagataccgctatcctgaataagtttaacagcttgcaaacttttgacgatatagccgacctgctggaaataccacccaaaaaactttgggaggctgtgatccagaacaagacttattccgagttcaccattcctaaaaaaaacagctccaattttagggtcataaacaaaccctcaaagaacttggatatcattcagaagaagatgaactacgtgcttagtctagcatacaagagtaccagcaatgtcagtcatgggttcgagaaaaacaaaagcatcagaaccaatgcccaggtgcacttaagaaaaaagctgatcctgaacatcgaccttgcgaattacttctcttctataaccttcccacgtattcgagcaatgttcctatcctacttccgcttcaacgaggtggtggcgacaaccttggctaacatttgctgcgataataacaatgagttgcctcaaggtgccgcaacttcccctattatctccaacatcataacctataagctggataaagaccttgtcagactggctcggaagcatcgatccaactacacacgctacgccgacgacattactttttctacgaatcggaaagaattccagagtgatatcttcaatatggacgaagacttttatgacgtgggtgacaaagtcattgagctcatctcgaagaatgggttcagcatcaacactagcaaaacacgcatccacgactcatctcagcccaaatatgtaacaggcgttaaggtgaacacaaagctcaacctcaataaacgatacataagacggattaggtcaatcctgcactgtatagagaaaaatatcaatagcctggacgaggccattaccatcttcgaagcaaagtatccctttcggaagactaagtttaagaatcgggatatgttcaacatcgtgcgggggatgatttcacatctgggacacattaagggcaagcaggaccatgtgtaccagaagctggctattaggtacaatttgatcatttccgccgtcaatggctcttctaatgaaaactacccctatattcataggccgctgacgcacagcgagttcagagagcagaatgtttatgttattgaatctgacttcgtcaactataagtttttcgagtccaaaaagaacatcgtgacctatcagggtagcggctttctcctgaaagaggtaggattagtgacaaactatcatgtggtgaaagagtacatcgagatcctggaagaggagaatacgtcttttgaagaagagtattacatccctctctccaaatctcgttactcccaagatatttggtttgcgaagatcataatgtatgataaggctagggatctggccgtgctccacataaatattgtcgaccacttcgagcatggctttaattacaatcaatccattaccgaaggaatggatagcgtcattataggctacccagaatataaggagagttcaagtctccatatcgatcagggaaagattcttggggaacgcatccactactataacgataagaggtttacccgctacagcactagaatgccaatccacgggggtaactcaggagggcccatcgtcaacatgaagaacgaggtgattgccgtggccgtaaaaggcaaggacaatagcgttacagaagttatcccggtgagtgatctcttaaagtcgatcgaggcaaaagaaatgtgtctagtttga

SEQ ID NO: 8685 - RNA, 1746 nt, synthetic construct
  source 1..1746: mol_type = other RNA
atgtccttccagggttctccgaagttacaggacagcgatgacaacattaccaaaaagtacaagtcactcaacagttttcaggatatagccgggcttctggaaatcccccaggagttgctgtggaagactctcatgaaaaataaggaaaacaactaccggacgttcaccttgaagaaaaagagtgggggcgaccggataatcaatgcacccactaacaacctgtcaatcatccagaagaagctgaactacatcctctccatttcctataagaaatctcacacgaatagccacggctttgtcctcaaaaagagcatcgtgaccaatgcatcacagcatgtggcgaaaaagtttgtgctcaattttgatcttgacaatttcttcgggacaattacctacgctagggtgcgcgcaatgttcatgacgtactacaaattcaacaacagcgtcgctagtaccctggcgaatatctgttgcaacaatgatggcgtcctgcctcaaggggccgccacatctccaattatctccaacattatctcccgcaggatcgacgaagatctgagtaggcttgccaagaagatgaattgtacatattccagatacgccgacgacataaccattagctgcgacagcaactatttcccttctgaaatcgcctactttgaagaatccattaccaaaatcggatcccaagtgaagtcgataatcagcaaaaacggcttcagtattaacatgaaaaagaatcgactgaggtcccagtaccagaatcagagcgtgacaggcatcactgtgaatcagaaaactaatgtagacagacagtatattcggaagatacggtctatcttgaactgcatcgagaaaaatatagacgacattagcatggctgaaaagacttttcgggagaaatatagcttcagacagtctcaaataaagaaacccaagatgttcgatgttctgcgtggcatgataagttatgttgggttggtgaagggaaaagatgaccagctttttctaaagttggccaaaagattcaacaaggtgatcaaaaatcagaacctggcattcatccgagttccaattagtaaggtggaactccgcgaggagaacacttttgttatcgattccctgtacagcatttattctatggacggcgaaaagtcagaggcgtgtaatgggcaaggtactggggtactgatcagaaacatgggattagtcaccaatgcccacgttttatacgagaacatcgaggtgctggagtacggagctgagtttgagcgggaatactatataaggatccataagagcaagtatggctcccaggaatacttcgctaagatcgattactttgattcttttcgcgacattgccattcttacaatcaaagactttgataccagtaagtatggtttcgaatataacgaggagattgagttcaatcaaattatcgagctcatcgggtatccttcgtataaagatggtcaggacctgcgcgtcagctcaggtgtagtgatgggagagcgtacccacgctgatagagtccgtaagcaaaaacgatttgagatttcagctcagatcttcggcggaaactcaggcggacctattgtcaattctgacaacgaagttattgccattgccgcaaaaggatctacagagaaaggctcggtgcccaatgaggtaatcccaatttccgatgtgataaatgtgttcgataacaagacaaggaaattttaccatctagcacactcatga

SEQ ID NO: 8686 - RNA, 1071 nt, synthetic construct
  source 1..1071: mol_type = other RNA
atggcaaaaggccgggtgacaaccgccctgcttcttatgctcccccggagatgtgagtttatggagattgaaatccggaataccgacgaggacgttaagcgaaacttcgagaacctcataaatttcaaagacgtagcacatttgctcgagataagcgccgaaaccttgtacaaaattctgttcatcaacaagcacttgaactataaagagttcaccctaaataggggaaaggtgcgtaccatttatagccctaagaagaacctgatgattatccagagaaagctggcctatatactgagcctgctgtatagccaccatacgaagtctcacgggtacatcaaggagaaatcaattattagcaacgccaatgaacatgtgcagcagaggtacgtgctgaacttcgatttaaaggacttctttgacagtatctcttttggcaggattagagccatgttcatgacttacttcaagttcaacgataaggtttccacaacattagcaaacatttgttgccacccgaatggctttctcccacaaggagctcccacgtccccaatcattagtaatatcatcagctataggctggataagaatctggattcgatctcccgcaggtacaactgcaaatatactcgatacgtggatgacatcacaatttccacaagtcgcatctattttcctaaggctataggccacggccaaaagggttctgatcaggcggtcgtgtcggaaaaaatcaaatccattgtccacaagaacgggtttaaggtcaatgacaaaaaaactcgtcttaactcaaagtatgagaatctctctgtcaccggtatcactgtcaatgaaactctaaatgtgaaacgcagctacgttcggtacatccgggtgatcttgcattcaatcgaaaagggaatagaggaagataatctcgacaaggctcagaaaaagtttaacgagcagtacaactttagacagcgcaaaaaaggaaatcttcctgacatgtacagtgtaattcgagggcgctctcccatgctggataaactgaaggggagaaaaatcatgtccattatatcatga

SEQ ID NO: 8687 - RNA, 1728 nt, synthetic construct
  source 1..1728: mol_type = other RNA
atgaacgagaaggttagcgagtttaagaacatcaacggcttcgagtccattgccgagtttcttgaaatcccgaaacccgaactatggttgatgctggtcaagaggaaaaaattcaactacacgcagttcaagatcccaaagaagaatggcgagtttcggattatacacagcccatccgagaaacttgctgagagccaaaagcgcctggcaagtgttatcgggcatctttatgcttcaaatcacaccactcatgggttcgtagccggaaagtctatcaagaccaatgcccaggaacacgtgaggcagagttctctgctgaatctggatctggcagattttttcgagaatatcagctatggtcgcgtgagagctatgttcggcgagtacttcaagttcaattacaaagactcctctaccctcgccaaccttgtgtgccatcccgatggatttttgccccagggcgccgtgacgagccctatgatttcaaacatcatctgctactctcttgataaggaaatcaatcggctggccaagcgaaatggatgcatttatacaaggtacgctgacgacttgacaattagcagtaagaaaatcgtgtttcctagatcgattgctcacaaaaacattaatgagggtgtggttctgaatcggcagctggaaagcatcataaacaaaaatgggttcagtgtcaacgcgtcaaagactagattaaacaccaaatacgagtgtttgtcagttaccggagtgaaagtgaacgacaaactcaatgtgaatcgggtttttgtccgtagggttaggtccatcctcaatagcatcgaaaagtgtgagggggatctcatcagtgcccaaaaaatattcgacgaaaagtatcactcccgtaaccagggctctggaaactcaccaaatatgttcgaagcggtgcgcggcatgattgggcacatcggatttatcaaaggggaagaggatctagtgtttatcaaattggccgacagatacaactctataattaacggcacctctaggtccggcttaataaaggtccctctatctattgagaagtcccgacagacatacactttcgtggtggaatcaaacgacttcatcaagtacaagtatgaagaagacgacggttattttatttgtgagggcggcagcgctttctttctcaagggtataggcctggtcaccaatgctcatctcttcggagagctgaaggacacactgaagtattgcgagaacggcctgattgacttggtgatggatgaggaatattacatcctcactcaccggtcacgatataacgccaagaaaatgaagttcagattagtggcgatagactttatgaaggatatcgcaattctgcaacctgagaataaagatgcgtacaaatatggatttgagtacagctgtgatctgaagaagggagataaagtagtcgtgcttggctaccccgagtataaagcaaaccaggaactcagatccatggtaggggagattctgggggagcggagtcacgagctggaaactaaaccagccgaatacgccgcacgttatgaggtgtccgctactatctactccggaaattcgggtgggccggtagtgaacgaagcaaacgaagtcattggcatcgccacaaaaggtacgacagaacgcgggcaggtccccaatgagtttgttcctattgtcgagattgtagagctccataaagcaatgataacccgcgaatga

SEQ ID NO: 8688 - RNA, 1341 nt, synthetic construct
  source 1..1341: mol_type = other RNA
atgcatttgcaggagctgaagagcttcacagatatcgcctcttccctggatgtgacagccgggcatcttagacggctgttgttcgaggaaaagaacaacttgtactttgagttcgaaatccccaaaaaaaacggaagtcttcgaaagatctacgcaccaaacgattctctgttattcatccaaaagcggctcagcgcaatactcagctctagcgtgaagctgcacgataaagcgtatggcttcataaacaagcgatccattgtcgacaacgctcagctacatataaggaagaacgtgctcctgaatatcgacctcgaaaacttttttccgagtatcagcttcgggcgggttaggtccatgtttatgaactactttaggctggacaagaatgtcgccaccacacttacaaatatctgctgtcaccccggtggctttctccctcagggctctccaacctcccccgtcatttccaacattttgtgtaagactctggacaaagacctcgaccgtctggctaaaaattcatttggtgctacctactcacgctatgcggatgatatcacttttagtacaaagacttcctgggaggaaattatctcaagcaaagtgactctcttccaaaagctcaacgatatcctatttgaccagaccattgttttggacatcgcttcgagctacaacccttcaatacacaagtatgaggaacgccttttgaaaaaaaagtattactctgcactgcagagtataggcttcatatccaaacacgagctcgacacagatttatctgtgctgcacggagatattggggagtttctgatgcaccatttagtgtccaactacatttcagacaataactctgttaagtacttgtatccaaagctggtgctgaagagcaatcctaagatgcccgcatatgggaatgatggaactatttacgtgccaagcaagaaagaaatcttttaccttgaggccaaattctacaccaatctcaccaaagccattaataaagccgtggatagtctgaaagaacataatgaggtcacgcaggaaaatattgaccacaagaccgagctgtttagaaacatcaaaacgaagagtaatgacgagattattgaaattaccgacgatgtcaatgagaagctagttttattcctgatctgcgacaacattttcaaggaagaggacgtgcttaaatgcctgaaaaagaacaatggcctgatcgagctgaagaaatcattcgaggtaatcatcttcgtactgcctatactttcgaaatctgagttcctcgaatccttcaagaagcagagcatcctaagaggaaatcagtattatgtacaatga

SEQ ID NO: 8689 - RNA, 1641 nt, synthetic construct
  source 1..1641: mol_type = other RNA
atgaagatgcggcttcaggagcttaagtcttttaatgatatcgctagttcactgaacgtgaccaccggccatctgcgtagattgctattcaaggaaaagaacaacctgtactttgagttcgagatcccaaaaaaaaacggcaccttcagaaagatctatgcccctaatgacagcctcctgtttattcagaaacgcctgtgcaagatactgaatagctccgtgaaactgcataataaggcatatggcttcataaatgagaggagtatcgtagataacgctcaactacatctcaagaaaaatgtcctgctcaacatcgatctcgagaacttttttccttccatctcattcgggcgagtaaggagcatgttcatgaactactttaagctggataagaacgtctcaacaatcctcgccaacatatgttgtcacccaaatggtttcctgcctcaaggctctcccacctccccggtgataagcaacatactgtgtaagacactggataaggatttggaccggttggccaagaactccttcggggctacctactcaagatatgccgacgacataacctttagcactaaaaagagcttcaaagagaacatcgttattgaaaagaacggggaaatcattctgggttctagtcttacagatattattcggcgcaatgggttcaagatcaatccaaataagacgcgcctgcagaaagccatccagcaccaggaagtcacggggataatagtcaatcagaaacttaatgtggacagacgctacatccggaaaatccgtgcgatgctttactctatcgaggagaattctaacaatctgtccattcccctcgaaaaatttgccgaagctggctataaggggaacgacattgagaatattctaagagtgattaagggcatgatcaactatgtctctatggtaaaaggtaagtatgacgccgtgtttgagcaacttgctaacaggtacaataccattctcgaagaactagagattgaaaacctgaaaccaattttcataccgcccaaaatttgcttagaggagagtgtgtgcgtcatcaaggagacagcgattaccttattcagcgataaggagaacatgattacagcatattatggacagggctctggattcctgctgaagaatcatgggattatttcgaattaccacgtgttcgagtacttgatcgaggacctgtcccgaggatttagcactatcaaaaacgagttcttcgttgaagtatttttcggaaaaaggactagtaagttggtcaaggccaaaattgagaaatacaacaaagacaaggacctcgtgctgttagttcctgaagattcctcattgcttgactttggctttgagaaatttgaggacgtgttagagcaaaacactgaagtttatctcctgggttaccctgacttcgcagatggagatcagatgaagtttgaaaagggacactatctcaggacagtgaattccaaaggaatcaagaaatacgaaatctcgcagatcatctttggcgggaatagcggtggacccgtgctcgatcgggaaaatcgcgttatcggcgtggcaactgagggcaaaaggatttcaatcaaccgaatcattcccatcgaatacctgcacgacttgaagtga

SEQ ID NO: 8690 - RNA, 1659 nt, synthetic construct
  source 1..1659: mol_type = other RNA
atgcgcatacaggagtttgagtctttcaaggatatagccgacgccctgggcattaagtcaggccaccttagaaaacttctattcgaagagaggaacaacctctactcggattttgaaattcccaagaaagacggctccttgcgcaagatctactccccttctaaaaaactgttatttatccagaggcggcttctgctaatactcgaaaactcaattaaggtgcaccctcaggcttatggcttcgtgaaaggaaaggggactgtcagcaacgcctccttgcatcttcggaaaaattacctcctgaatattgacctgaaagacttttttcccaacatcacgagcggccgagtcaggagcatgttcttaaactacttcaagttgaacaacactgtggcttcaacactgacaaacctgtgctgtcacccgaagggtttccttcctcagggagctcctactagtcccattatatccaatattctctgcaaaaccctggatcggaacctggatcgactagccaaaaacagtttcgggtccagctattctcgttacgcggatgatatatcattttccagtaacagaccgttcaaagaaaacatcgttagcgaacagaacggaaatgtgatcctcggctcctctctgttagacatcatctcatccaacggctttaagattaatctggataaggtcagactccaaaagaatcatcaacaccaagaggtgactggtatcgttgtcaatgaccggttgaatctggacaggagatatataagacgcgttcgggcgatgctgcacagcattgaggttaacattgacgatctctcaatcccaaccaagaaattcgaagagtcaaattacaaaggaaacacctttgataacctcctgatggtaataaagggcatgatcgattatattggcatggtaaggggaaaggcagacaatatctacgagaaactcgcagtgaagttcaattatatcctagagctgctcgagctggacaacatcaaaccacttttcattacagagaaaatcgagaacaatgtgtgtgtcattaagttcaagaagatcttcctgttcaaaacggactttagcgagatggttgagctggattatggtcagggaagtggtttcctcctcaagtcttatggcattgtcacaaattatcatgtagtggagggtcttatagaatccggttttctgaacgggtttcctaagtctacaaacgagttttacatcgaaacctttttcggaaaacattcttcgaaaatcgtgaaggcaaagatcaataagtacagtaaggaaaaggatctggtgctactgatcccagaggatttgagccttctggacaaagggttggacatttctaccgatgccttaaatctgaatgaggaaatccgcttattgggataccccgaattctatgagggggacgaactgaaaaacgagctgggcaattatctccgaaccgtcgtagacaatgtggaaggcaacagtattaagaagtacgagttgaataccatgatttttgccgggaattccggggggcccgtgataaatagcgacggcaaagtgatcggggttgcaaccgaaggacgtaagattgaaacaaatcgcgctgtgccaatcgactacatcaaaactctgcagagcttggatatttga

SEQ ID NO: 8691 - RNA, 1629 nt, synthetic construct
  source 1..1629: mol_type = other RNA
atgaagatccagaatatcaacagttttacggagttatccttcgtgctgggatacaagagcggccacctcagaagaattctgtttaacatcaacagcagcagctatacttccttcgagatacctaagaaaaacggtgaggttcgcaagatatacagtccacagagtcaattactgatcctccagaagaaagtggcagctatactagaaaactcgttcaacccacactacaaatcatttggattcattaaagggaagagcatcgaaaaaaacgccaagctgcatttgaaacggaagtaccttatcaacattgacctcaagaattttttcgagtcaataaccgcgggtagagtttacagcatgtttgtgaactactttaagctggatcggaatatcgccgcaattctcactaatatttgttgccacccagaaggattcttacctcagggggctccgacttctcccatcattacgaatatactgtgcaagactctggataaggagttgaataacctgtcaaagaaatattccgtgacctatagcaggtacgctgatgacatcacctttagttctaacaaggccttcaatagctgttttcttacccgggaagagagcctatcagatgacattaagcgaatcattgaacagaacggctttttcatcaatgacaataagtttcggtactctaagtttaaccagcgtaaggaagtgacaggcattatcgtcaacgagaaactgaatgtggatcgaaggtacatcaggaagatccgcgccatgttgtactccattgagaataatcttgacaatctggaggtaccccgcactaagttcgacaaatcccattacaagggtgactccattgagaacctcctgaacgtaatcaaaggcatgatatcttataccaccatggtgaaaggaaacaacaatattagcacaaaactcgcaatgagattcaacgatatcttggagtgtttagagatcgacagtgtaaagccaataaaggttaaacctctggatattaacgaggaaaaggtctgcgtcatcaagctggagaacgtgttcttttattctaagaacggcgaaccttatgacatagactatgggcaagggacaggctttatcctgaaaaatgtgggaatagtctccaactaccatgtttttgaattcatcatcgaggagattgagaaagaaaagaaaccgctctgcgaagataagtatttcatcaacctgtatttcggaattaactgtaccaaaaaggtgaaggccaaagtgctgaaatatgacatcgacaaagatctggtgattctgcaacccaaagacttgaatatccttgaaatgggcttcgagcttgaagagggcacaatcgagaataactctaaggtcacacttctaggctacccctcatataatgaaggtgatcgcataaaagaggagcaggggaaactcctgcgtaagattaatgacattaagggattcgagaaatacgaaatttcctccgtcatccacgctgggaattctggtggccccgtgctcaataataaaggcaaggtactcggggtcgccacagaaggaagggggaatgatattaacaaagttgtgcctatcaccaatgttctgtcgatgttgaagtga

SEQ ID NO: 8692 - RNA, 1683 nt, synthetic construct
  source 1..1683: mol_type = other RNA
atgagaattcaggatatcagtacctttgatcaaatcgcgaaggccctcggtatctccaccggatacctgcgcagactactcttcgaggaaagagacaacttctacactgagattgagatacccaaaaaaaatggcgactcccgcaagatttttgtccctagtgatgaactgctgcagctgcagaagaaactcaatacgattctcatcagttctttcaacccctccagccgagcttttgggtttgtgcagggcagatccacagtgcagaatgctagcctgcacttgaagaagaagtacatattaaacatcgacctcctagacttttttccttcaatctcctctggaagggtgcgctcgatgttcatcaattactttaagctttcctctatcgtcgctagcaccctcactaatttatgttgccaccctgacggtttccttccacagggtgcacctaccagtcctaccatttccaacattctttgcaaaacactggacaaagagctgatcaacttagccaggaaactggggaaaatcacctattcacgatatgccgacgacattacattcagcaccaactcaacctttagcagaaaactggtgaggagaaataacggggagatctgcttggggaatgaactgatcgaaattgtcgagaaaaacggctttgaaattaactctagcaaaactcgccttcagaataataaccagcatcaagaggttactggcataaaggtgaatcggaaattgaacatcgacaggcgattcattcgcaagattcgcgctatgcttttttctattgaaagcaacctggacgacttgagcatcccggccacaaaattcgcagagtcagattataagggagattctataggaaggctgatgaaggtcatcaagggcatgatttcatatgtgggcatggtgcgtggtaagaatgatgcattgtttatcggtctggccaagaggttcaacaaactgttactcgttgtggatcaatttaaggacgaaaagcccatagtcattgatagtggcctgtcgcagctaccaaacttagtatgtgtggtcccgcagactaatattcagctgtggaagaaagataatgagatgaacatcttcagcgagattgactacgggcaagggacaggatttttgattaaggggataggaatcgtttccaattaccatgtgttcgaattcgtgatcgattccattaaagatgggtttctgcccagggagacggagtacttcgtgaaccttcggtttggcgccagccaatctaagaagatctctgccaagatcagttttttcagtgaggagctcgatttggtaattctgatccccgaagaccagattatactaaacaacggtttcgagcgggagctgagagagccagaacagaatgagacaatcactctgctcggatatccagacttctctgaaggagatcagctcaaaatggaacgtggcgattacctgcggacaaccttctcaaagaaggttgagatgtatgaaatcagcccaataatcttcgccggcaattcaggcggacctatcattaacaaatccgacaaagtaatcggcatcgcgacagaggggcggcgtatagctctgaatcgggcaatacccattaaatacgttgacgaagaaaagcttaccaccctgacttatacgctcttcaagttttga

SEQ ID NO: 8693 - RNA, 1767 nt, synthetic construct
  source 1..1767: mol_type = other RNA
atggccggtaaagtggagttaccattttgcttcggcggctttctgttgctgctgaaagagcttaagtctttttcagatatcgccgaagccctgtcagtatctagcggcaacctgaggaatattatcttcgagtacaagaagaattcctacgaaaagtttgacattcctaagaagtctggcggcattcgaacaatttacaagcctaactctcagctggcagctatccagcatgaactgtgcgacatactatataatagctacaaaccgcactacaacgctcatggctttatcaaggacaaatccatactgaccaatgccgagaaccacgtcggtaagaagtacatcctcaatctggatctggaaaacttctttgagtcagtgaaattcccaagagtgagggggatgttcattaactacttcggcctgaaagagaatgtggctacgatcctcgcaaatatctgctgccacccagagggttttctgccacagggcgctgcaacctctcccgtcatcacaaatattctcctgaagacccttgataaggaactgaccagactcgcaaaagaaagtaattgggcgaaatattctcgatacgctgatgatattacctttagctccaacaagaagttcataaagaacattgtggaggagattgatgggcagattgttcttggcaaagagttagtttggctaatccagaaaaacgggttcaaggttaacgaaaaaaaaactcgcctgcaaacgaagtatgatcaccaagaggtgactgggattgttgtgaacaagaagctgaatgtcgatcggcggtatatcagacgtatccgcgccatgctccatagtatcgatatgaacaagaatgatctcaagattcccaaggacaggttcaagaaaaaatattttcccaggaactgtaactgtagtggcgacttgttcctcacactgaaaggaatgatcacccacgtcgggcacgttaaaggaatatacaacctcgtgtacaaaaaccttgccatgaaattcaatcgccttttgcttgagtgtcggctgccatacccagcacccatcaatattttagagaagagcgatgtctattacgacaacgtatttgtgatagactcgagcaaggacatattctttattgacaacaatggcgacatggaatcctacgactacggacaaggaactggattctatttgaaagggtacgggatcattacaaattatcatgtgcttgagtacgtgctcgacgaaatcaattccggcaagaaaccgatctcttcctcaggcaatcagtatttcatcgaattctttagcggtcgggacccgtccactataatgaaggcgaagtatctctatggatccaaggaaaaggacattgtggtcctagagcctagcgactccagcctgatcggtcagggattcgacatattcaaatcaaagatcatcccccaaaatatggaactgaatctgttgggttatcccgattacaacaagaacgatgacttgaaaatcgaatcaggaaagtttctccgtaaaattgtacctgatggtaactctagaattgagatcactcagacaatttttggagggaacagtggggggcccgtattgaacagcgataatgaggtgatagggattgccgtgcgcggcgacggaaaatatcctaataccgctatccctatctatgaggttgagaatctacacgcctcgcatatcgaaagcttacctaacagtagtgtcaaagataataacctgtcaatgcagaggtga

SEQ ID NO: 8694 - RNA, 1728 nt, synthetic construct
  source 1..1728: mol_type = other RNA
atgtctctaatattccacatttccgacatcaagaactatcaggacctggctgattacttggaggtaacaaccggctatctttcaaaagtgatcaatgaccctaaccgctatcaatgtttcgaaatccccaagaaagataattccctccgatccatatattctcctactaaagatctgctggttattcagctgaaaatcaagaagctcattgaacagaatttcaatccccactacaaggcccatggtttcattaatggaaaggactttatcaccaatgcctataatcatatcgggaagaattttgtgctaaaccttgacctgaataatttcttcgagtcgatcagcattaaacgggtcaacaacatgtttcagcgttactttaaagtgcggcccaatatctccactgtcctggcacatatctgttgccacccagatggctttttaccccagggtgcgccgacgtcacctattatcagcaacgtgatctgtaagtctctggacaaggacttgactgagctggccaagagtttaaaactgacttactacagtaggtatgcggacgacatcacctttagctgcaaaaaaaaagacttcccaaagattctggccgaggacataaacggaaatatcgtgctgtcgaaccatctcaccaacctcattgaaaagcatgggtttaaagtcaacttgaacaaaacccgcttgcagagtaagtacatgcaccaagaggtgacaggtatcactgttaacaaaaagatcaacctgaacagaaggtatataaagcggattagggccattctgtacagcttcaagaaatatgtggatgaaccggatatacctattggcaaattctgcgagttctataatatcaccaacaataacatcgaggagacaaagtaccgcatttttaacatcttaaaggggcacattatccatatcagccacgttaagggatataatgacagtaacttcctggacttcatgcgaaagtttaatgaactccttgaactgtactccttatctattccagcaattaaagttctcgactctagcaacaatttctttaagcgtaatacactagtcatctacccacttaactcactggatgatccccagtactttgtggatagagacttcataaagaatggcaacttcgaaatcgattcagtctgttatgggcaagggtctgggttttaccttaaggacattggcattgtgacaaactatcacgtggtatcactgataattgaagaggtcctcgagaaaaaattgacgttctgcaaagagtattaccttgagtactttaccgagagtaatggcaagcagtacaaataccatgccaaaataatcgcatacgacaaagaaaaggacattgcaatcctcaagcccaaatatccagatctggttgactccggattcaagtacaataagaggttcaacatcaacgattccataacgctgttgggctttcccaatcacacaactggtagcgagtttcggagcgataaaggcaagataatcagaaagatcaagaacaagaacatctctacatacgagattgatgctaagatattcgccggcaattccggagggcctgtcctcaattataaaaacgaagtaatcggaatcgctactaaaggctttaccgatagaggaattgtgccgccagaatttattcctattaagtacgctatcgaggtgtataagaaccacaccgataagaaactctga

SEQ ID NO: 8695 - RNA, 1698 nt, synthetic construct
  source 1..1698: mol_type = other RNA
atgaataacccctttagtaatttgaccgtgaaactgaagaaatccgacgacgagctgatcaacgcctttggctctctgtccacttttgaggacgttgctagtattctcgaggtgtcgagccatgccttgtggataattctcgtcaaaaacaagccatataactatagagaagcatcaatcccaaagaaagacgggggcgagagaaaggtgtatattccaaacaacaatctgttcatcctccaacaaaagctaaagtatgtgctggagcttatttattcaccccactttacctcacatggttttgtgaacgataggagcatcatatctaatgccgaacgacacgttaataagaagttcgtgatcaacattgacctgaaagacttcttccccactatcaagtacaaccgaatagtgaatatgttcgtcaaggtttttcgctgttcacctaacatcgcaaatacccttgctaatattgtgacacatcatgaaggcttcctgccccagggctcaccaatttctcctctgatttcgaatgtcattgcccggacaatggatgaccagctcttcaagctctgcaaagagataaaagaagtacagtacacccggtacgccgatgatcttaccttctccactaataggaagaaaattccgaattccatagtcaagaactccaataactcctatgagttgagcgacaaactcatcaatatcatcgaaaataacggctttgaaatcaactacaagaagttcagagtgcagagcgaatacgaccaccagagtgtcactggtataaaggtgaacaagaagctaaacatcaacaagagctatatccgcatggttcgggtttacctatacatattcgagaaaaacgaggatatcaatcaggccattaaagagttcaatctgcgaagacccaaaaaaagcaacttgaaacacaggttgataaaaaacgagttccagaatcagatcttccacctgaaagtccttaaaggaatgatcgagtttatcgggtctgtgcgtggtagacgggataggattttcaacaagttcagtaagaggttcaacacaatttgcgaaaccgcggggcttaacaatatacagatcaacatccctcttctcctggaagaagttattgacaacaaaatcttggtcgtgggaaacaatgaccaatacttttataccctggatcaggggattaatacgaaggagatttccttaagtaagagcctggcagtcagtaataatgaacgcggtattatttccactaaagctaattggactacattccgggatgattttgagggaacacactactatgactttcataccattccgttgtacaggaagaacacgacagatgtgttatcttatctgaagattaaccgtgtggctgaaaatgatctgatttactttgaaggcccagaagaactgactaaaaacctccaagagatcaacacagagatcgagagcctgaaaataggaaatgtaatactggtgggactccacaataatacgatcgagatctttgaggggatcttaaccaagcgcatcctctttggagagtctaaattcatctttaagcctatctctaacgaaaatctgcctatcagcttcggctttgtatttaatcaggtaggcaatcttgtggggaccctgtcccgcggcaactctgagttatacgtcaactcaattaagtga

SEQ ID NO: 8696 - RNA, 1701 nt, synthetic construct
  source 1..1701: mol_type = other RNA
atggcggataaatttacgttactggaggagatcgacgacgtgctgaactttaagttccgaaacttgaacaactttaaggagattgctgacatgctggaggtgtccagtgagttcctgcactccatactgtacaaaaagcgtagctacgaaactttcttcattcagaaaaagagcggaggatatcgcgaaatcaaaacccccaataacaacctcaagctaattcagaaaaagttggcgtacattctctcattgaattataagatgcacaagtctgcatttggcttcataaagaacaagtcaatcatcgacaatgccaatctgcatatcaacaaaaaatgggtgttcaactttgacctcgaagatttttttcaccagttcaatcaggggcgagtcatcggcttactccgtaaatactacaagttcaataacacagtagcaggaatccttgctgagatttgttgctatgaaaatacgctccctcaaggagctccaactagcccgatcttatcaaatatcttggcttttgagctcgacagggagttccaaaaggagtgtaagaaatatcactgtacctacagtagatatgtggatgacatcagcatctccacaaataaatctcacttccctaaaaacctcgcatacaagaactcacaggaggaaatcatcctgggggagatagctcaaacaatacttgacaagaccagttttaaagtcaaccctaagaaggtgtatctgcggcatgagacacaacatcagaatgttacgggacttgtcgtgaacgaaggggttaatgtgtcacggacatacattaagagaattagggccacgctccataatctaagagtgagtaacgaggaggacggtaaaaacaaattcttcctggaactcagcaaacattcaagttcgaggtcgcaacagtttgatatgtatgccatcctgaaaggcaagatccagtttgtgggacaggtgaaggggaaggaaaatcaggtattccggaaactagcgactagctttaatcagctggacctgcctgcatctgtcaagcccatttccattctgtcttccaccgagaagaagcgctgccaaaacacatatatcgtcgaggtcggctacgaaatcggggaggaactgttttattacacaggtaccgccttttatatgaaaggagttggcatagtgtctgccgcacacactttcaaaaactactatgactgcaaagagtacgccgattcccaccacctctaccttattaatgaaaacaagctgaccgagaagatcaacattaccaagaaatacatcgattacgaactggatattgccatattcgacatcgatacacagctgaatacagacgattggggttttgaatacagcaatagcatcattgaaggccagtcttgtgtgcttcttgggtatccacggcatatcgatgggaatactctgaatactgagtttggcaaaattacccagaaaataaaccagaaatgcccaaataggttcaacaagaagaccggcaccttgggagtggaacagactcgcttcaagatttcctctgacatatatagtggcaacagcggtggtcccattttgaacgacgacgatagagtaatcgccattgctgtgaaggggtacggcgataatgccgtagaggttaataccgttgtccccatatccgatattttcacttatatgctgccatga

SEQ ID NO: 8697 - RNA, 1698 nt, synthetic construct
  source 1..1698: mol_type = other RNA
atgacagaaaagttcacgcttcttaaggagattgatgacgtgctcatatttaagttccgcaacctgaacaattttaaggagatagctgacatgctcgaaatcagtccagaatttctccacagtatcctgtaccagaaaaagtcatacgagacatttttcattcagaagaagtccgggggcagccgggagattaaatcgcctaacaacaatctgaagatcatccagaaaaagcttgcctacatcttaagcctgaattataagatgcacaaaagttctttcggcttcatcaagaataagagtattatcgacaacgctaaacaacatacaaacaaaacttgggtctttaactttgacctgaaagactactttcaccagtttaatcagggtagagttatcggcttcttccgtaagtactacaaattcaataacgtcgtcgctggagtgctcaccgagatatgttgttatgaaaatactcttccgcaaggcgcccctacttctccaattctcagcaatatcttgtcctttgaattagatcgggaatttcagaaggaatgcaaaaagtccaactgcacttactcacgctatgtagacgatgtctcaatttccactaacaagttctacttcccgaaaaagatcgcatacaaagatgcccaggaagagattacgctgggtgagataagcaaaaaaatcctggacaagaccggatttgaggtgaaccagagcaaggtgtgcctaagacataagacacagcaccaatatgttaccggactggtggttaatgaaggcgtgaacgtctctcggaaatacataaaaaggattcgagccgccctcaacaatctcagaaccaataatgaaactaacggcaaggagaaattcttcattgaactgtctaagcattcccggaactcaagccagcagttcgacatgtattctattctgaaggggcagatccacttcgtggggcaagtgaagggtaaggataatcaagtgtttagaaagttagctaccagcttcaatcagcttgacttgcctgtttccattaaacccatcagcatcctgagttccacggagaagaaacgttgtcaaaatacatacattgtcgaggtgggttacgaaaatgatgagggcattcagtgttttaccggatctgcgttttacatgaagggcgtcgggattgtgagcgcagctcacacattccgagattattataggtgcatcaaagaggccgttaacccctatttgtatttgataaacgagaacaagcctacagaaaaaatcgaaatcaccaagaaacacatcgattatgacctggatatcgccatttttgatatcgattcatcagaggacaccgcaaactggggattcgagtactccaattcaatttttgaagggcagagttgcgtgctgttgggatatccaaagcataccgacgggaataacctgaacaccgaggtgggtaggataactcagaagctgaaacagaagcatcccaacaaattcaacaaaaagatgtccgatctaggggtggagcagaccaggtataaaatctccagcgacatttacgcaggcaattctggagggcccgtactaaataatgatgagcgcgttatcgccattgcggtgaaaggattcggcgacaatggcactgaggtgaacacagtcgtaccagtatctgacatcttttcgtacatgatatga

SEQ ID NO: 8698 - RNA, 1737 nt, synthetic construct
  source 1..1737: mol_type = other RNA
atggataacaaaagcattctgttaaacgccattgatgacgtgcttatctttaagttcagaaacctcaacaacttcaaagagatagctgacatgctcgagatttcgccccagttcctgcattctatcctttacaagcggaaatcatataacgtgtttcagattcagaagaagaatggcggcacccgcgaaattaagagcccagacaacaatctgaagatcgttcagaaaaagctcgcttacattatatccctgaattacaagatgcatcggtcttcattcggcttcattaaaaaaaagtccatcgtggacaacgctaagccccacacaaacaagaaatgggtcttcaatttcgaccttaaagacttctttaaccagttcaatcaagggagggttataggcctgtttaagaagtactacaagttcaacgatagcgtggctggcgtgctggctgaaatctgctgtcacgagaatgtgctgccgcagggtgccccaactagtcctatcctgtctaacatcctgtccttcgaattagacagggagtttcagcacaaatgtaagaagtataactgcatctactccagatatgtagatgatatcacgatcagtacaaacaaggcctattttccgaaaaaaattgcacgacgggacgccgagggcgagatagttctcggtagcgtctcacaggagatcgtcgataaggcagattttcaggtaaatcaatccaaagtgtatctgaggcattcctctcagaatcagcacgtcactggtctgaccgtcaacgagggagtcaacgtgtccagaaaatacataaagaaaatccgggcgaccatccacaatcttaaggtgaacaacgagaaggttgcagaggaaaagttctttaaggaatacttgaagggacccataccaaagaagactgacctgaacatgtacagcatcctaaaggggcgtattcagttcgtcggacaggttaaggggaaggaaaactcattgttcaggaaattggcgaaggagtttaatgatttgaaacttcctaagcaagtcaatcctatctctatcttgacagccctcgaaaagaatcgccgaagatattgctttatcgtggaagttggccacattctcggggaggatatataccattataccggtagcgccttctatctgaaaggaatcggcctagtgtccgccgcccataccttcaaggaatactacgaaaacaaagagtatgctgataaacactacatgtacgtggtaaatgagaataagccagacgagaagatccctattgtgaaaaaacatatcgactacgcgttagacatcgcaatctttgaaatgccaacaaaactaagggataataatgaggggtttctgtatagcacaactgtgaacgtcggccaaaagtgtgtgctccttggatatcccaaacacttcgtggggaacactctgaataccgaatttgggcagattaatcaagagttgaaggtaagactgcccgacaaatataatagcgttacgggagaactcggggtgatccaaaaacgctataaaatttctgccgtgatctacgccgggaattcaggcggccccattattgatgaacgcgagaaagtcattggaatagcagtgaagggacatggtgagaatggcgtcgaggttaacacagtggtacctatttctgacatttttacctacatacaggactatagtctcgaacaccgtacctcgctgagtagtaaatga

SEQ ID NO: 8699 - RNA, 1695 nt, synthetic construct
  source 1..1695: mol_type = other RNA
atgcaacagattcaattgaaggaaatcgatgaggtccttgtgctgaaatttcgcaacctaaacaactttaaggaggtcgccgatctcctggagatatctccccagttcttgcgcgatatcctctacgagaaacgcaagtactcccacttttatataagcaagaagaacggtggcgagcgcgagatcttttctcccgtcaacaacctgaagatcattcaaaagaagttggcatacatcttcacactggactacactcctttcaaatcttcattcgggtttgtgaagaagaaatcaattatcgacaacgctgccctgcacactaacaaaaaatgggttttcaactttgacctgaaagacttcttccatcagtttaatcagggaagagtgataggcctgttcaggcggtatttcaatttcaataatgtggtggccggcgttctcgccgaaatttgttgccatcagaacattttacctcagggcgcccccacgtcacctattctcagtaatatgctgtgcttcgaagtagaccgtgagctccagaagctatgttccagcaaacagtgcacatactcgcgatatgtcgatgacattaccatttcttcctcgaaggattactttccaagattgttcgcgtttaaagacggggagggaaggatgagactggggagactgctcgaggagatcttgaggaagacaggtttcgatgtgaaccaagagaaaatatatcttcgaactcccaatcagaatcaaaatgtgaccggactgaccgtgaatgaaatcgttaacgtgaatcgaaactatgtgaaaaggatcagggcaagtatacataatcttaaagtcaacacggaggaagcggcccgcgaaaagttttttattgaatacacgaagcggaaagcacacattaacccgaatgcaaatgtgtatagtatccttaagggccagatccagtttgttgcgcaggtaaaaggtcgtgagaaccccgtatttaaaaaactcgcttcccaattcaactccctgaatctgccgagcaacattaatccaatttctcctctgacacgggtggaaaagtttcggcgtcggaattgtttcatagtcgagattagttttgagagagaaggcgaatttttttgtaataccggtagtgccttttaccttaaaaagatcggcctggtatccgctgctcacattttcaaagactacttcgagcactatgatagcgccgttaagcgcgagatatacatcgtgaacgaagtcgacaggaagcacaagatcaagatcaataagaagtacatcgattacgacttagatatagccattttcaatcttgacactaccatcgacaccatgaattggggtttcaacagatcagataccatctatgagaaccagaagtgcattttactagggtacccagaggactgcaatggcaacacactcaatacagaattcggaaaaattactcaggttatcagcaacagctttccaaacaaattcaactcaatagaacaggagctgggactgacccagattcggtataagatcagcgctactatctatggcggaaacagcggcgggcctatcctcgatatccatgaaaacgtgatcgggatcgcagctaaagggacctccgataatggaataactattaacacattcgtgccaatttccgacatcaagttcttgatgaattcttga

SEQ ID NO: 8700 - RNA, 1686 nt, synthetic construct
  source 1..1686: mol_type = other RNA
atgactaaacgcatagatcagctaaagacagaagacagcaacctcatctcaaactttagaaagcttaactcgttctatgatatcgcaagtctgctggaagtgacacctaagttcctctactatattctgaatgtcgaaaagtcatacactcctttcaaaattcccaaaaagaatggcgacatgcgaacgattatggctccctccaaaaacctgaagatcatccagaagaagctaagctacatcctgactaagtcttcctctctgaataagagcgcccatggattcgtacagggcaagtctattatcaccaacgcagccatgcatgttaacaaaaaatgggtactgaatttcgatctgaaaaactactttgaccagtttaaccagggaaagcttatcgggttctttaagagctactacaaattcaatgacgaggtcatcgggatccttgtgtccatatgctgccacaacaacatactgccacaaggtgctccaaccagtcctatactgaccaatatcctcacctacaatttcgataaacagatgagtcagctgtgtcggaagaataactatatatacacccggtacgtggacgacattacaatttctaccgacaagtacgagttccaaaagaggtttgtgtattataacgagaacaacgatgtgcagatcggaaatgcgatcaacaagattctcgagaaaacaaatttcgagatcaacactaagaagaccagactgaggataaattatcagaatcagaccgtgaccggaattacagtgaatcgtaagttgaacgttagccgcaagtatatccgaaagacgagagccatactacacaaccttaaagtaaataacgacaacgtggcccagaaaaaattcgacgaatactaccccgtccgccactatcgtgactataaggcatccgacaagtacaatgttgtcaaaggaatgattgagcacgtggcacaggttaaaggccgggacgataggatcttcaagaaactggctctgtccttcaatgatctcaacttacctgagcacgtctatgagctgaatttgtacagccctttcgagaaaaacttgcgcaagaactgtttcgtggttgaaatcgagtattcattatatggcgacttttaccccgccactgcttcagcctttctccttaaaggggtcggtgtcattacgtccgcccacacctttaaacagtatctcgagtataaagacgaagtggaggatataaagatctgggcatttcgggaaaatgaaacaactttgaagaggccactggatatcaagaattttgacttcacactcgattttgcgatttgccatgttgccggcatcaatcatactgaatacggctttgagttcagcaaacatatcagtctgggcgaagatatcacccttttggggtttccccagtatcagcacaagaatctgttgaataaagaacacggcgtaatcacgcaagagattaatgagtacttccaagagaagttaaacccaaagacacagagtccaggttacaaccaaaaaagatacgggattagctcacagatttttgaaggtaactcgggagggccggtgctcaactctgactacaaggtgataggcattgccaccaaagggattacttccgatgctgtgaaagtcaatacaattgtgccgatctctgatatttttcaatga

SEQ ID NO: 8701 - RNA, 1746 nt, synthetic construct
  source 1..1746: mol_type = other RNA
atgtcctacttccgcgctaaaccgaccctgcaagcctctgatgccaaactggtgtcttctttgaagagtctgcagaatttcgatgatgtggcatctctgttggaagtaaccccaaagcacctgcgatacatccttttcgagaaaaaggtcagtggatattataagtgcttcgacatccccaagaagtccgggggttctcgcaagatttgggctcctcaagggtccttaaagatcctccaggaaaaattgaacaagatctttagcctgacatataagcccaacattacttcgcacgggttcgtcaaggataggggcattgtgagcaacgcaactgttcatctccgcaagcgacatgtgctcaactttgacatagaagacttcttccatcggattaattttggaagagtgagaggcgtcctgaagagcttttttggtatgtcctgggacgcggccacagtgatcgcgaatatatgctgctacaataatgtgcttccccaaggagcacctacatcaccaatcattagcaacatgatttgcttcaacatggacatggaaatgcggaaattggcaaagaaacacaactgtcactacacgcgttatgctgatgatcttacattttcaaccaccagacagacttttccttctgccatcgctcacctcgatgaggaaagggtcgtctacctgggatccaaaattcagaagatcctggacaacaatgatttcgccgtcaagaagagtaaaactaggctgaataatcgggatcaaaatttatcggtgacgggcatcaccgttaataagatcacaaatgtggagcggaactatatcaagaaggttcgtgctatcctgaagtgtctagagagccatcccctgtcagaggcccagaagatcttcgagtccaagtattactctaaacctgggaaaaaaaacgcagaaatcatgaacgttgtcaaaggcatgatctcccacatcggatatgtgaaaggaaaacaggacccaatttacgagaaactggcccgccggtacaacagactggcagggattgagacgttaaaagtgggggaggcctttcttaaggactggtcacagaatgtcttcgttattgaagttggctatgacaatagcggcgtattcgatccacagcaacaaggcaccggattttttctaaaggacgtgggcttcgtgacaaaccaccatgtcgtaaaagaatacatcgatgacccggatatttatgaaattcgggtgcaccgttcaaggtacaataaaaaatgcttccaggctaaagtgaagatgtactgtaaggagcgcgacatagctatcctcgagatagatgggtttaacatcacagggtttgactatgatctgataaactatgacggccagtccataaaagtgataggttatccaaggtacgggcatgaggatagtttgtttgtggaccagggtaccattgtgcagtacagaagtgagttcatgcgcaccatctacaataagaaaactcaggaactcggactctaccaggaacgaatcatatgtagtgccaggatcatttatggaaactccggtggccccgtgataaacaccagaggccaggtgattggcattgccactaagggtttcagcaatgtaagcaaaaaggaggaagatgacgactccagcgctgcctcataccttgtaaaaatcggcgacgtttttgacatgattggggagaaggaggagtctgtcccctcacctgttagcgcgatttga

SEQ ID NO: 8702 - RNA, 1737 nt, synthetic construct
  source 1..1737: mol_type = other RNA
atgtcccactttatggccaaaagccaacttaaagcctccaatgagaaactcttggaaagtttccgcaccctgcagtcctttgatgacgttgcagacatattagaggtcagtccgaagcaccttcactacattctattcaagaaaccaaagtcgcagtactacaggtcattcgctataccaaaaaagaacggtgggtaccgtgaaatcactgcccccactaggtcccttaagattctgcaggaaaagctaaatcggatattcagcctggtgtataaacccaatattactgcacacggttttattaagggccgcgggatcgtgactaatgctacagtacacgtaagaaagaagcatgtgctgaacctggatttagaggacttcttctcaaccataaatttcgggagagtgcgcggaatcttgaaaagcttttttaaaatcggcgatgacgcagctactgtgatcgcgaacatctgttgttacaacaatgttctgcctcagggggctccgacctccccaatcctgtcaaacatgatttgtttcaagctcgataaagaaatgcggaatatcgcaaagctctataattgcgattacacccgctatgccgacgatattactttcagtaccaatcatcagacgtttcctaaggagatcgccctgtttcgggaggaaaatatcgtacacctggggatcaaggtcgagaatattatagagtccaacggtttcaagacaaacaactctaaaacgagactcaacaataggaatcagaagctggccgtgacgggcctcactgtgaataaaatcgtcaatgtgaaccgtggctatgtcaggaagacaagatctattttgcgctgcattgagaaatatagcctcgagaaagcccaagaaatttatgtggagaagttcgccaaaaaccataagggggttaagatcattaacgtggtgcagggcatgataacccatattggacatatcaagggaaaacaggaccaggtttatgagaagctcgcgaggcggtataatcggattcgaggcgaggaggtgctgaaaatcggtgatacatttttgagccagaacatctgcgtcattgaggtggggtactatgacgacgagcagaattttatgcctgaagtccaagggactgggttctttctgaggggtgtgggactgataaccaaccgtcacgtgattaaggaacacttagaacttcccgagatctatagcatcaagatccaccggtctaaatacgactacacatattataatgcggtggtgagaatgtctgacgaggaacgagatatcgccattttggatgtcattggcatcgccccagagggcttcgagtacgataacgacaactacacaggccaaaacattaagctgatcggataccccgactacggccataaagattctctgtacatggaccagggcgtcatcacacagtacagaaaacagtggatgcctaacgtttacaatctcgataccgaagaattgggagtttttcaggaacgaatcgtctgcagtgtgcgcatcgtgatcggcaactctggaggtcccgtcgtaaaccttaacggacaagttattggcatagctaccaaaggattcaaaaagattgacaagtccgagaaagacgacacatcaaccgaggcaagccatctggtaaagatagaagatgtttttgaactcctggctgaacaggagcaaaagcttctaaccaacaccctggagaatgtgtga

SEQ ID NO: 8703 - RNA, 1740 nt, synthetic construct
  source 1..1740: mol_type = other RNA
atgaattacttcaacgccaaaccagaacttatggccaacgaccagtcactgatatccagctttaagtccttgcagtcattccgcgacgtctgcaatctcctggaagttactcctactcatctgcgctatatactttttgagaaaactccaagccagtactatacctttttcacgatatctaagaagagtggcggtattcgggagatcattgcccccaatggcgctttgaaaatcctgcaggagaagcttaataagatctttaaactggcttacaagcccaacgcctccattcacgggttcacaattgataggagcatagtgacgaatgcgcggatgcacctcgggaaaaaccatttgctgaactttgacctggctgactttttcccctcgatcaacttcggcagggttaggggggtcctaatatccttctttggtatgggatccgaggccgctaccgtaattgctaatatctgttgctacaagaactctctcccccaaggagcaccaacgagcccgatcctttctaatatggtgtgtttcaacttggacaagcagctgcagctagtcgccaggaagaacggttgcacctacaccaggtacgcagacgatattacctttagtacaaccaagcacttatttcctaaatcaatcgcattcgtggagaatgagatcgtgtatatcggacccaaaattctgaagatcctggaggacaactcgttcaaagtaaatcacctgaagacccgtctcaacaatcgcctccagcacctaggggttacaggaatcactgtaaacaagatcttgaacgttaagcgggattatatcaagaagattcgagcgattctgcggtgcctggaaatcaatagccttgaacaggcacaattcatctttgagacaaagtacacaaagattcgcaataaagcacctaacagtgagtatcccagtatactcaacgtggtaaaaggtatgatcgactacgtgggtgcagtcaaaggaacccaagatcctatctacgagaagctcgccttcagatacaatcagatctgtaaattaccagtgtttaagatcggggaggaaaataccgagtcttggaacaaaaaagtgtgggtcgtcgaactctgtatcgaggccgaagacgatggcaagatagaatatataccagtgatacaaggcactggattctttttaaatgatattggcttcgtgacaaacgctcatgtcgtgagagactaccgggaatatgatatcattcgaattagcagatccagatacggcagtgaagtgaagaaagcctctgtcatcaagttggatcgagacagggatatcgcaattctgaagatagacgacttcgaggattggtctggcttcaaccattccttcgttcattatatcggcatggacgtcaaagtgattggatatcctaattttggtggcaatgattcactgtatgtgcacaagggggagatcctgcagtatagagttgaacacttcccggacaagtacaataaagcgactgattcactggggatgaaccagcatcgtaccgtgatttctgcccgcattattgccggaaattccggaggccctgtcgtgaacatgcagggcgaagttgtgggggtggcgacaaagggctttaaagagatcagcccagggaaacacgacgatgatactgccacaagcattatgatcaaaattgaggacgtaattagctttgctaacgagatggaacccaccaaagcttga

SEQ ID NO: 8704 - RNA, 1728 nt, synthetic construct
  source 1..1728: mol_type = other RNA
atgtcatattttgacgctaagattgaactccaggcgactgatgaggaactcatccacagttttaaagacttggagaactatcgggacgtgtgcagcctactggaagtgaccccgaagcacctccattacatcctatataagaagaagaacctgtactatcagttcgacatcccaaaaaagaatggcggcacccgtgagatttatgctccgtgcgactcacttaaaatcctgcaacagaagctgaattacatcatgagcctcatatacaaacccaaatacacaatccacggctttgtcaaaagcaggggaatcgtatcgaacgcaaagcaacacctgggtaagagctacatcctgaatttcgacctgtacgacttctttccatcaataaatttcggaagggtacgcgggatactccggtcttattttgggttgggcgatcatgcagctacaattattgcgaacatttgttgcttcaacaattctttaccccaaggtgcacctacgtctccaattctctcaaatattgtgtgcttcaacctggataaagagttgcaatttatagccaaacagcattcttgtatctacaccagatacgctgacgatatcacgttcagcacaacgaagaaagatttccctaaaagtgtggccttcaagactgattcccagatttttctcgggaagaagattttgaaggtgatcgagaagaacagcttcaaagtgaacgagaataaaactaggcttcacaaccgctatcagaatctttccgtgacagggattaccgttaacgagaaactgaatgtgccccgaaactacattaagcgcatacgcgccatgctgcgttgtatcgagacaaatacaccagaagatgcccaggttattttcctggagaaatacaagtttcggtatagagccaatatggaacctcctaatattatgaatgtcctgcacgggatgatcaactatgtcgggtttgtcaggggcctggacgacgaaatctttaagaagttagccttgcgatataatctcattgtcggcaacgataaaatcaaggtcaagaaagacaacctcgccctgtgggaatcttacgtttgggtggtcgaggtgggatacaaggatgacgacgatttttacgccgaggaacagggaactggcttcttcttaaagaacgtgggtttcgttactaacgcgcatgtaattgagaaatacgatggtgaatccattaatgcaatctatctgaatcggagtcggtacagtgaggaacagaaattggcctccatcataaccatcgacaaagacagagacatcgctatactgtacgttgagggctttgatattgattatggctttagctacaacatccatcacaacttggggcaggaaatcattttactgggttaccccaatcacggagacggaaattccctttatatcaacaaaggccagctcgtacagtatagatcccactatatgcctaacacccttaataaggagacaggaaagctgggagtgaaacaggagagggtgaccatctcctctcgaatagtgactggcaattcaggaggcccagtcattaacctgcaaaacgaggtgatcgggatagctaccaaggggttcaaggatatcagccccaatctaaaggatgattccaccgcagaaagcatgatcgttaagattaaggacgtgctgtcggtccttagtcagatgtctaaacttcatagagaaaactga

SEQ ID NO: 8705 - RNA, 1743 nt, synthetic construct
  source 1..1743: mol_type = other RNA
atgtcctacttcgatgctaatatcgagctacaggcaaaagatgaggacctcattgttgccttcaagaaactcaaggattttcgagatgtgtgcgatattctggaagtgacgcctacccatttacactacattctgtacaaaaaaggtccatcaaaactttaccatcccttcaatatccccaaaaaagggggtggcactcggcagatcttagcccctaacgactcactgaggatccttcagcagaagctgaactacattatgagcctaatctataagccaaagtttgccatccatggatacgttaagggccggagtattgtgagcaatgcaaagcagcacctcaacaagaactatatactgaacttcgacatagaagatttcttcccgtccataaattttggccgtgtccgcggagtgctgaagagtttctttggaattggcaaagatgcagcgacaatcatcgctaatatctgttgttacaacaaccttctaccccagggagctccaacttctcctattctcagtaacatgatctgctttcaactcgacaaagagatgcagttgattgcgaaacaacatagctgcgtctacactcggtatgcagacgacctcaccttctccacgactaagaagtccttccctaaggccattgcttatcacggggacgattgcgtccacctggggaagaggatcctggctacgatcgagtctaacggattcaagatcaacaataacaaaacccgcttgcattctaagtatcagcacctgggcgtgaccggggtgacagtgaacgaaaagttaaacgtgaagcgggactacatcaagaaaatacgcgcaatcctgaggtgtttggaaattaactctctcgacgaagcccagaaaatattcgaggacaagtacatccgccgccacaccaaggaggtgaattttccgaatattatgaatgtggtcagaggcatgattaattatgttcggcttgtgaaaggccccgaggattctatctttgagaaactggcaaggagatacaataaaatcgccggtgttgaggtcttcactgtaggtattcagcactccagattttggactagctacgtatgtgtggtcgaggtcggctgcaaggacgaggatgaattctatgcggatgaccaagggaccgggttttttcttcaagggatcggattcgttactaacgctcacgtggtgaaaaagttcaatggcattgaattcaacgccatatatatcaacaagtcaaggtatgaccaaaccaaaattgccgctagcatactgactatggatgaggagagagacttggctattttgaagattgatgggtttgagagcaacatcggattttcatactcgacaaactactatgggggccagcccataacactgctgggttatccgaatcatggtggaacagacagcttgtacacagaaaatggagaaatcaagcagtatcgtccccactatatgcccaataagtacgacgaaaaaaccggcaaactgggcgttcatcaggagcgaattgtgattagtcctagaattgtgaccggtaactcaggaggccctgtagtgaattctcaaaaccaggtcatcggcgttgccacaaaggggtttaatgaaatatccccagggagtaaggatgaaccaaccgccgactccatcatcgtcaaaatcgaagacgtactggccctccacaccgagatgcgaagcgatgagacaccaatagccaatcagtga

SEQ ID NO: 8706 - RNA, 1746 nt, synthetic construct
  source 1..1746: mol_type = other RNA
atgaacactaatttcaaggccaatttgcagataaagagctcggtagaggacatccaaaaaaagttcaagaacttatccagcttcgacgatgtgagcgatctgttggagatctcccctaaacacctgagatatatcttgttcgagatgaaggacaggtacaagagcttcgaaattccgaaaaagaacggggagacaagatctattgttgcgccctctaaaagtataaagattctgcagcggaagctgaactacatcctgtcattaaactattccaaccgacctacgagtcacggttttattaaagggaaaagcatagtgaccaatgcccagccacacgtgaaacagtccgtagtgctgaatttcgacctgaaggacttttttagtacaatcaactttggcagggtgcggggtgtctttattaagtttttcgacattggcgacgatgctgcaaccgtactagctaacatatgttgcaaggacaatgttctgccacaaggggcacccacctctcccattatctctaatatcgtctgttataagctcgacaaagagcttctaaaattcgccaaaaaacatagctgtgtgtatacccgctatgcagatgacataacactctcaacgaataaaaaacacttccctaacgaaatgatccagctcaacaagcagacatacaccctatcaaagtctctctttaataagatcgagaacaatggcttcaaaataaacgacaataagacacgcatccgctactgctctcagcgtatggaagtgaccggcctcactgtaaatgaaaaacctaacgttacaagacactatattcggaacatcagagctataatcaggtcaattgaaaaatacgggttagaggtggcccaagagatccacgagggcaagtacatcaaaattcatctgaaatctaccccacagattaccaatctgcttatcggaaagctgaactacgtgaagatggttcgagggattgaggactccgtctttaacaagctcgccaagcgcttcaacaaagctatgggtgacgaacttgtggagacgtacaagtctaaaagggaattgcgagagttgcatacttacgtcgtagattgcggctttattgtcgacggcgaattcatcaacgagtcacagggcagtggttttttcctcaaaggagttggatttgtcactaatgcccacgttgtgaagctgtataaagaaaacaattccaacgagcttccatacgagattcgtattcatcggtcgagatacagcgatactgtcctcaaggccattctgactatctacaatcgggacttggatattgcaattctgaacgtggaaggatttaactccgattatggttattcctacaaccttgacaatgaatatggtcaggaaataagagtgatgggctatccgaatcacaacaagagggacagcctggccaccgatagtggagagataaagcaatacagggacaattacctcaaagaaactgttaatcaagagacaggagagctgggagacttccaggaacgctttgtggtgagcgctcggatcgtggatggcaattcagggggccccgtgatcaacaatgacgatgaggtcatcgggatcgcgacaaagggattccgtactcttacagatagtgggtacgatgaagataccgataccagcattgcagtgaagatcgaggatgtcatcaaactgatcgagtccaaggatcagaaggacctgaattatcagcattattga

SEQ ID NO: 8707 - RNA, 1464 nt, synthetic construct
  source 1..1464: mol_type = other RNA
atggacgagagccaaatcaccaatatttgcacgtttgacgagttggccaatgccctggaaatcgaaccatcgaaactgagatacatcttgtggggaaagaaacctccatcatattatagccgcttcactattcctaaagccaatgggaccaagcgacaaattagcgccccacaggggcctatcaaggtgttacagtaccggctcctgagaatcctgaacgcctattattcacctaaacgggtggtgcacggttttactaagggccggagcattgtgtctaatgccaactcccacattaacaagaattgggtagtcaacattgatatcaaagacttctttccctccattaattttggacgggttcgcggtctgtttctgaaatctttcccagggatgactaaggaatccgcaaccgccatagctcagctcacatccgtcttcaatagccttccccagggagctcccacaagccccatcatctcgaacatgatctgttctagattagatcgagatttaatggactttgctcgccaagataacataaaatattcacgctacgctgacgacatcacactctcaggcgatggcgcagtgaggtccagtatcggcgaatatagtaacggactcttggttttgtccagcaaatgtatcaagatattcaacgacaatggtttccagatcaacagtgataaggtcagagtaagcttcaagtaccgcagacaggaagttacaggccttgtggtgaattctaagattaacgtctctcgcaagtatatccgcaatctgcgggcacttctgcacaacatcgagacactggggttgagtgaggcgcaggagctgtacaccgaaaagtaccatggccggggttcactgcagagttatattcacgggaaactcttattcctaagaatggtgaggggatctagcgacaatctatatgatcggctggttaacagttttaatctcaacatagctgaccggccgggaaatgactccaacacccacctcccgaccagggcagagattaaagctatcctcagcaggctagatccctcctacggcaataggtaccatcgaatatggagggaactttacgacgagacggattcaacaggagagaacctgaaaactgccctgtacttaatgagagaggtgattggcgggctgatacgtaggttcgcgaagaatgagtccgtagaaaactatttgaacctgtcccctaacctgcgtataaccaggttgcagcgttgcaagtatctctcagaaaagtctcttgcaactggggaggaaagactggccaaactttttatgtacatcccaggctactacaatgatctgaacaagctacattctctcgagatcgttgacaaagtcgatgtgaaagtgctggtcgacaaggtcaatgagctgattattgaggtggtgaagagcattgagatgctggaacttttccgactcagttga

SEQ ID NO: 8708 - RNA, 1659 nt, synthetic construct
  source 1..1659: mol_type = other RNA
atgtcctttgtaagaaacagggtgaattcgaatcggaataggagtgagacgataaaagagttttgcgataacatcggggtgtcaaaagagggcttcctcctgtataacaaggaaaacgagaaagaatacaaggtgtttgatctcataaagaagaatggctctctgcggaaagtgaaagctccatctgcaggactggcgggcctccaacgcaagatctccaagatcctgcagacaatctacaatcagccaaactgtgtgcatggttacgtgcccgaccgaagtgtcgtctccaatgcccagtgccatgtcaacaagaggtatattctgagcatcgacattaacgacttctttggatccattaccagaaatagaatcttggggctttttaggtccatcttttctgatcaaaacctctgcgaggctttgacaaacatatgcgtcgtagacggatgtttgcctactggctctcccgcctctcctgtgttatctaacatgatcatgttcaagatggaccgtaaaatcatgagcatctgtaaaaacaaccacgttttttatacccggtatagcgacgatctgacattctccacaaaaaccaagtcattcccctctgagttcgtatatttagatgcttgtggttccctgactctcgggaaatcaattgtcgcgatattcaaggagaatggattcagtataaacctgaagaagaccaagctgcgcagccgaagtaaccgtcaagttgttaccggggtggttgttaacaagatcaccaatatcccttcgagctatatgtctaatttgcgcgccatcaaaaatagcatatcaaagcacggtgtggacggggcccagaagattttcgacgagaattacaaggaaacacggtacaaaaatagagttaacattggccatcacatttctattaaggacatggtgcgcggcaaaatcgaatacattgggatggttcggggaaagcaggacgccctatacagaaagaacctggattggtacaataagaatttccgatcactgggcgacccagaagaatgtgtgtaccccatctactttatcatcgatatgccagagaaaagtaaacagaaggaccataggattaagaatgactgcggccagggtacttgctttttcctggaagatgtgggcatactaactgcagaccactttcttcctagcgtcgaggatgtggaagcagctggagatcaccttcggctgtattttgagactaaggacggctgcaaacacaacgtcaagattgagaacaggtatccgaagattgacatggcagtactttccttagaggataatctgttcagaagcaaaaagctctacgtgaataccgacttctcacacagcgatcgccttaccgtgtcgttgtatggatttcctgactgcgccgtgggcgaaagtctgcaggtgagagattcagtcattacgggaacacgcaacagagccgatgaaaaagagattataattcgagacggcatcaaagctggtatgtccggcggtcccgtaactgatcaggccaacagggtcgtgggggtcattcataaagggggaatcgatgagagtgggaaatgttactacaaaccgatcaacgatctctatcacatcatcaagccaatgcattccagcaatcggagccgttga
